United States Patent Application Publication US 2007/0048818 A1 - sequence listing, part 3

SEQ ID NO: 5889 - DNA, 54877 bp, Homo sapiens
gatgatatgagtaatgctggtgattttctaaatgacaatgcagttgagatcccttctttttcaaaagggattataaatgatgatgaggatgatgaagacctcatgatggcttcaggtcgtcctagacagcgaagtcacatcctagaagatgatgaaaactcagttggtaagaatttgactttgtgcatgtgattaccctgttgattaatattttagattttttattaacactattaaagtcattattgaatttgtagaatgtagctaagtggtgcttagaggaaattttatagcattaaatgactttgttaaaaaaggtttcaaatctataatccaagcttctgctatggcagactagaaaaagagaaaactaaaccccaagcaaatggaaggaaataatacagagcaaaattcaataaaattgacaacagaaaacctatagagaaagtcaatgagaccaaaagctggttctttgacaagatcaataaggccgggcacggtggctcacgtctataatcccagcactttgggaggctgaaatgggcagatcacttgaggtcaggagttcaagaccagcctggccaacatggtaaaaccctgtctctacaaaaatacaaaaattagctgggtgtggtggcacgtgcctgtaatcccagctactcaggagactgaggcaggaaactcacttgaacccaggaggtggaggttgcagtgagccgagatcgcgtcaactgcatgccagcatgggcaacagagcaagactccatctccaaagaaaagaaaagatcaataaaattaataaatatctatcgtggttgatcaataaagagaagacacaaattactaacatagagaatgaaagagaggtgggccatcactatagatctgtagatttgtgctatccaatatatagtagccactagccacatgtagctgttgagcacttgaaatgtggttagttcaaactgagatatgttatgagtgcaaccggattttttttttttttttgaggcggagtctcactctgtcacccaggctggagtgcggtggtgtgattttggctcactgcaacctccgcctcctggattcaagtgattcttgtgcctcagcctcctgagtagctgggattacaggcatgcgccaccacgcctggctaatttttgtatttttagtagagatggggtttcaccatggagtgcaaccagattttgaagacaatatgaaaaaaagaatgtaaaaatcttgggaaattttttatattgagtacatgttgaaatgataatatgtattttaaatgcactatattattaagattatggctgtttctttttactctttaaactttagaaatattagaaaatttaaaattacagctgtaactcacattatatgtctgtatggcagtgctactattaatatcaaaggcataatggcaatattatgaataactttgtgcccataaatttaacaacttaaatgaaatagacgaattttctgaaagacacaaagtaccactgctaactcaagaagtaatagataacctgaatagtattgtatctattaaagaaattgagattgtaatttaaaatcttcaaatagagtgcttattgtaacaacttacatgctacaataacacttgaacattatcaagtaaaatgaagaaattgagattgtaattgaaaatcttcaaatagagtgcttattgtaacaacttacatgctacaataacacttgaacattatcaagtaaaatgccaatgtgcagtgctatgttgtgctttttaaagtcatatagagtttatagaacagcagtcctcaaatgttttggtctcagtagcctttatactctaaaaaattttgaggacccttccgagagcatttatttatacagagttacggctatcgtcatttacatattagaaattaaaattcagaaatttaaaaatatttattcacttaaaaataacattaataaactcatgtaaacatgaatagtacttttttatgaaaaacaaaaaaaattagtgagaagagtggcattgcaatctttgtaatgtctatcatagaggatagctggattctctcatctacttttctggattaagtctattgctatacattgtttttgtttgaagtgtataaagaaaatttggcctcacataaatatgtaatttgaaaagggagaagtattttaagaaatcttttaatagcacattcaattaattgtggatattctttgatgttgcaccaagactcagaagatgatcgtttcctaaagattacttgcaaagtgtaatctgaaaacttcagtgaactcttacggctctgttatgttaagattcattggtctggctgggaatggtggctctcacctgtaatcccagcactttgggaggcccaggcaggaggattgcttgaggccaggagttcaagaccagccagggcaacatagtgagacctcctctctacaaaaaaactttaaaaattagccaggtgtggtgacgtgtgcctgtaatcccacctacttgggaggctgaggtaggaggatctcttgagcccgagaggtcgaggctgcagtgagccatgattgcaacagtgggctccaggcagggtaacagaacgagaccctgtctcagaaaaaaacaaaataaaatcaaaaaattcattggtctgacttgaatgttgaatggattttttaaaatcatgtttaattttgtaacatatgaattgataatattggttcactgaagtttatagatcctctttatactgacactttttattatctaatataaattatttgtttttgtttttaattaattatatgttgtttttaattaattaatttttgtttttagagatagcatcttgctctgtcacctaggctggagtgcagtggtatcatcacacctcactgtaaccttgaactcctgggcttaagcagttctcccactcagccttccgggtagctaggactacagatgcatgccaccatgcccatctaattttttattttttgtagagatggaatcttgctttgttgcccaggctggtcttgaaatcctggcctcaagtgatattccctccccagcctcccaaagtgctgcaattacaagcgtgagtcacagcacctggctgtaaattatatctgctagtgttgttaccaatctcatcagtagtttctaagtattagaaagttgtgaagctcataatggcaaatagaagctttccaatatcttaatttttaattgaaagctcaaatttcttgtttttattttttgagagggagtcttgctctgtcacccagcctagagtgcagtggcacgatctcggttcactgcaacctctgccctctgggtacaagtgattctcctgcctcagcctcctgagtagctgggattataggtgcccgccaccatgccaggctaatttttgtattttagtagagacggggtttcactatgtaggtcaatctggtctcggactcctgacctcaaatgatctacccaccttggcctcccaaagtgctgggattacaggcctgagccactgtgcccagctcttttttttttgagacggagtctcccgggttcaagcgattctcctgtctcagcctcccgagtagatgggattacaggcatgtgccaccatgcctggctaatttttgtattttcagtagagacagggtttcaccatgttggccaggctggtcaacgtggaactcccgaccttaagtgatctgcctgcctcggccttgcaaagtgctgggattacaggtgtgagccaccgtgcctggcctgaaagctcaaatgttatcattggcaacaaattctgccagttattttttcttaattgataggctcacttcattcatttacaagaaaatgtttgccaaagatccaattctgcataaccgtagtttatctggcatgtgttttttaagtaaaagtagtgttgtatgaaaaaaaatcacttagttcagcttacaactcaaacaattgcataagtgctttttttcaagacaaccatcacacttctcattttagcacacagaactttaaaaaaaaaatctgtgtaagcgtcaagatttaataaaattaatatttttactgcaagtgagtagtggttaacaatgcagtaacgactaatacagttaggtgccactgccttgattggtgccaaggcaccaggaattttacccaccattgcttttgcaccatcactgcatctctttaacacagtgaaagaggcaaatagcatgtcagtgtcattgaatatgaatgaaaaagttactagattccataatgctttcctttttccaaatcattggtattcgtgattcccttaattatgatcctttgtgttgtagatatttcaatgctaaaaactggttctagtcttctcaaagaggaggaggaagatggtcaagaaggcagcattcacaatctaccacttgtaacatcccaaaggccattttatgatggacccatgccaactccccggcaaaagccatttcagtcaggttctacaccgttgcatctcactcacagattcatggtaagacttggatctacacttaacttcttagtaggttttcagcacttttttcttactatagttaatttttttggataaaacatatttttaaaaactttgattaagtagcctggagcactttggttgattacagttttgtggttggtttattttatggttagctcacagttttaatcttgtttcaaccttattgaaaatgatgttaaataaaattctgctttccaaaatgacattaaatgaacataagtaaatattactatcttgcaatatttcttggcaatactttcaaaccttattcttcatggtcattgttacatagaagattatactgactccaaaacactagtaaggaggtgctttcttagaaggcaactactagtataatatattagaaggtggcaagtactatggggggaaaagtctgacccttttcctcactccaccacccaccagaatgtaagctacacgaggataaagatttttgttttgtttactgatatgttcttaggatttggaacaaggtatgatacagtgcacattaaatatatatttcatgaatagacaaaatgaatatattggctttttgccttagatttgagttctttttttttttttttgagatggagtctcgctctgttgcccaggctggagtgcagtggcacaatctctgctcactgcaagctccgcctcccaggttcacgccattctcctgcctcagcctcccgagtagctgggactacaggtgcctgccaccatgcccagctaatttttgtatttttagtagagatgggatttcaccatgttagacaggatggtctcgatctcctgacctcgtgatccgcctgcctaggcctcccaaagtgctgggattacaggcgtgagccaccgcgcctggcctgagttcttaaaaagtttagtttttctgtgttggttatatgatgttttccattctgaggattttgcctttttaaaagtataggcctggcataaatttgaagagtataggcctggcataaatttttatgtaaagattaagggtggtgattaatattaataaaactttttattgctatcagtagtcatcaagtcataggtcttaatttttttattagtgtcaatattttatttatagttatgttaaataaaatattggcactaattttattagaaactctagggcctagtgtgagcctataatggacatcagtggaagataagttttccaagtggtatcaatttatgttgcctctgccgggcgtgatggctcacgcctataatcccagcactttgggaggccaaggtgggttggtcacttgaggataggagttggagaccagcctggccaacatggtgaaacaccctatctctactaaaaaaatacagaaattagctggacctggtggcatgcacctgtaaccacagctacacaggaggctgagggaggagaatcacttgaatccaggaggcagaggttgcggtgagccgagatcatgccactgcactccagcttgggtgacagagcaaaactgtctccaaaaaaaaaaaaaaattatgttttcttaaaatgtatgtatttattttatcatagaatagttaggaaaaaagtctgttgttatttgcatccatatttgtaagaaaactcaatttttgaaatatttcttttgaggaatttaatggtttggttgttcaaaggacaactgtaatgtgcttttaaagtaacagtcatgtaatttatttttaaatattattaaatactctatttgctaattaataagtatatatgtatcttattctcaccaaggaaataataagtaattgtagctctggtattatgactcctgtcagaaactatttagagatagatgagatgtagtaactcccaaaacctaaatcttaatacaaatttaattataatatttgttaatttgtactactgtggcttactgattctaggagcttcagtttttctcagacttatatttaatcttacctgtttgtaggtgtggaactctattggaattattcgctgctataatgatgagcaagacaatgccatagatgtggagttccatgatacctccatacaccatgcaacacacttatcaaacactttgaattatacaatagcagatctttcccacgaagctattttgttggcatgtgaaagcactgatgaactagcaaggtaaactcaagattattaggaagaatttggcactgttgaactgttagatacagttgttgaaattaaagacaaaaagttaataaaacaaaatttattttttgtaatatgaaatttcagaagagtttggtacaaacaccagcacacccaaaatacctcagaacatatgtctgtttttgccataatgattccctcattacatgctctaactacatagcaaaatgacatggcatagttagtaatgcaagagatgggattttttttttacattgttaagtgcttttttttttttttactattataagagtaatatacattcattgtaaagaaaaaaaaccagtatacagtatagaagtttcggaaaatgaaaactcctcccagaattctactctcagatataactgctatttacaatttgatatgtatccttccagatttctttctatttgaacctcccttattttaatttactttattgagatgtaatttatttacaataaaatgcacccatttgatgagttgacaaaggtgtatatacacagataacccctaccacaatcaaaatacagaatgttctttatcacccgaaaatgttttcttatatccctttgcagttagttcaaccctagccttggccaactattagtctagatttttgtcactacgtctttatcacccaagaatgttttcttatatccctttgcagttaattcaacctgagccttggccaactattaatctacatttttgtcatgatggattaaatttaaaatctctcttcgagaaaggaaaaaaaaacggaaaaacaaaccaaaaaatgtactagtcacccgtttgctttttctacttaatattttttggatgtttacatgttttgataagtaggtaggtaagtaaataggtagatagatgtcaagaaaaaaattatgatgggaaagcaatgggtgcagaatgtttttcttttcaaaagaaaagaaaatattttttcagctttttgttaatcaagagattgccctctcttgatcccttcttcagctgattatagtactgatacacttcatggattttactatcttctatgtgatttgaaatttgtatccttcaggctgggcatggtggctcacgcctgtaatcccggcactttgggaggccaaggcggacagatgacctgagctcaagagtttgagaccagcctgaccaacatggtgaaactgcatctctactaaaaatgcaaaaattaaccaggtgcagtggcacccacctgtagtcccagctactcgggaggctgaggcaagagacaggagaattgcttgaacctgggaggcggaggttgcagtgagcagagatcacaccactgtactccagcctgggtgacagagcaaaactccatttcaaaaaaaaagaatttgtatttaataataacttacatatatgtatgtgcaaagaaaaaaggctggaaagatatcaatatagttcattttaagggtatttcataattacttttttaaagcaacttcttatactagtgtataataggaagtaaactatttggtttttttgttgaatatcatgattgcttatatatatatatatgtaaatatcatatgaaagtttgattgtttctgtcttgttttaatttttagcaagcttcactgcctgcactttagttcttgggattcaagcaaagagtggataatagacttgcctcagaatgaggatattgaagccatatgtctcggtcaaggatgggctgctgccgctactagtgccctgcttcttcgattgtttactattggaggggttcaaaaagaggtattcagccttgctggacctgtggtgtcaatggcaggacatggagaacagcttttcattgtttatcacagaggtagatttttttcagtcttttatgacttgaagtaaaatggaaattacttgagcttttttgctgtttttgttactctttttgtcttggattatatacttccttttgaatccgtgtaatctttaaatgtagataattttgttgtgttcactagcagcaatgaaaatgaaaatgtttcttaatagaactatattatagagagaattccaaggtggaatttggttaattacttccatgtctaaatcttaccattttggcaagcacgaccagagaactttcagcgttgaaattccacaaaaataactcctagtaggaagggccaaaacaactctgaatgtgacactttttaaaagctgctgcctcctttttcctcccctcatgtctttcttcagtccccgtcactatgctaagactggtcttatcaaggtaaccgataatctctgtgcttttttaaaaaaataattccattgaaaataccttcttctcatgacttctgtgacatcatactttcaatatttttcctcactggcagctccctttttacttttttgttggctctatcttttagctggagtgtatcccctttttctctactactctctaggtcagggtctttcagtctttttgtctgctttgccacagtaagaaatagattcatagattctggaccaggtatggtgtggtgtggtgtggtggctcacacctgtaatctcagcactttgggaggccgaggcgggagagttgctttagcccaggagttcaatacaagtctggatagcaatagcaagcccctgtttctatttttaaaagaaaaacagaagaaaagaaatatattctatataactgttctataaatatctgcaaatgtaactgaaataaaagtctcctggacaatgtttactcttttgatatcagtttaaatttttttatttcattttttaaaatgctagttgcaaattaaaattgattccatgactcttaggtcaaaatatgcagtttgagaaaccaccctggggaattttatcataatccatggctttaaatacatctcagtgtctatgacttttaagttgatagcaccaaccctaccctctccttgtgtctccagacttacacatccagttgcctacttgaaatctatttagagtttggacagacatttcagacttaatttgctcacaataaaaactgatttttttccttccaagcttgcttcttatgtagtttccccatcttagtaaatggcttactaacaatctagtggctgaagccaaaaatctaaaaattatcctcgattcttctctttccatttcccctgcatcaactccaacagtaaaattatatcatcatgtcaattctatggaataacacattctaaatttgtctcttttcatttcttctgctaatacaacctggatgtcatctcttggactgtcatagtagcctcctaactagtcttttagcttcagttcttgccttccacagtccattctccacagagcagcctaggtgatcttttaaaaatatagatcatgctcctcttctcaaatccctctgactttccttcacttttagaatcaaagtcaaacttctgatagctgtcaaggtgatctactgatcccgtataatctgacctttgcctgcctctccaacctcatctcttaccgttgtttctcattaccatgttctggccatactgcctctttgtgttcttcgagccctccattcttcctaccttaggactttgcattagctgttccctccatccacttccgtgttccttcccctaatgtttgcatggcaggctccagcttgcagttcatgtctcagcttaaactttactttctgagaggtcacttctgactaaccagtctaacaaaccactctgacattctgtatcacattattttaactttgtgataatttttttgttctttttgtgttttttaatttgtcttctacctgaaatttgaatttaataagagtggtgactttgtttattgctgtagccccagtatctaggccaatgctggcgtgtagtaagctctctgtaaatatgtcttgagtgaataaatgcccacttataaggactttatgtgaagagtccatgtaacatcttactgtgtttctaatacctgaatgatgcctcagttggatgggttattcataaaaagtagtgctagtcagtctagtaatttaccacaaaatcaattcacagaaaataatttagactgcgttatagttggataacctttgatgcctgatttatatttacattttctcattaggtacaggatttgatggggatcagtgccttggagttcaactgctagagctggggaaaaagaaaaaacaaattttgcatggtgaccctcttcctcttacaaggaaatcctaccttgcatggattgggttttcagctgaaggcaagataaatttgtttaaaaaaaacaagtataatataaagtgttagatattcttcaagaagaaaattatttcattgttttattcctaattaatttaagaataaattatctctattttatattttaaatttctattttaatatgttggcagaactgggagctgcaatctttaggcaaggtagccattgttttatgtataagatcttgtttttatttttatgttcttttaagacagggtctggctctgttgtccaggctggagtgcagtggcatgatctcggctcactgcaacctccacctcctgggcttaagccatcttcctacctcagcctccttagtagctgggactacaggcatgtgccaccatgcctagctaatttttgtattttttgtagagacagggttttgccatgttgcccaggctggtctcaaactcctaggcgcaagtgatccacccaccttggcctcctaaagtgctgggattacaggcgcgagccactgcacccggctaagagctctcttcatgagaattctcattagaaaacttataaagaaggaaatatatttttctgaaagtattaaatagcaaggaggtgatacaaatcaataataagttgtgtcttttccagcagatcatacagaaaacttagaattttctagagcttcactgtttactacaataactagtatgtgtgtctgttgagcacttgaaatatggctgagatgtgcttgtatgtgtaaaatactctggattttgaagacttagcatgaaaaaagatataaaaatcaatttttttatgttgattacatgttaaatgataatatttgagatatcttcgatgaaataaaatgtattattaacattaacttcatcctttttttctttaaaaataattttttttttggctgggcatggtggctcatgcctataatcccagcactctgggaggccgaggcaggaggatcacttgagcccaggagttcaagaccagagtgggcaacatagtgagatcccatctctatttaaaatttttttttttttaaggaataaattaggagtcttgctctgttgcccaggctggagtgcaatgatgcgatctcagcttactgcaacctctgccttccgggttccagcaattctcctgcttcagccttctgagtagctgggattacaggcttgcgtcaccacactcggctaatttttgtatttttaatagagacagggttttaccatgctggccaggctggtcttgaactcctgacctcatgtgatccacccgcctcgacctcctgaagtgctgggattacaggcgtgagccaccgcccccagcctaaattttttcacttaacttttttttgttgttcagatacatggtatgtagccattttttttttaatgtggcactaggaaattaaaaattacacttgtggctcacatgatatttcttttggataagtgctattttagaccaaattctagaggcttatgacagatgatttgaaagacactgaggagtaccttattttattttatttgtttttgtgtttgtggtttttttgacgcagagtctcactctgtcacccaggctggactgcagtgatgtgacctcagatcactacaacctctgtcttctgggttcaagtgattctcgtacctcagcctcccgagtatctgggactacaggcacataccaccacgcctggctaatgttgtatttttagtagagatggggttttgtcatgttggctaggctggttttgaactcctggcatcaggtgatccacctgcctcagcctctcaaagtgctgggattacaggagtgagccactgcacctggcccaggagtaccttattttaaatcacctgtcatctctgtctcatggggacttaaatatttctctttttggagattcatgttcttcatttacattgctggaaactccactttgtctttaaaatatcaaccatttctaaatgtgttttctattagtcattcaggctttaataatatgaaccattgataacttccatttgtatagatttttttctccgaagtaccaattagatccagaccctgcggaaactaatgtttgcagagtgaggggggtgtgaagccacagataagaaaagggataatcaggtaatttgccacagatttcctgagttggaagcagaataggtggaaaacaagaatgcttccctgttttacgaggtaagaattgcttacctagtagttggggacagagtagtgacaaggccaacaaaaagaagagagaggaagaagagtactaaagataaatttcgtaaagatcactttgtatcagattttggtcatttttctaaatgtttctcaagcgggagccttctgattcatgtttaattttttactaaaattggctttaaaattattatcggccgggcgcggtggctcacgcctgtaatcccagcactttgggaggctgaggcgggtggatcacaaggtcaggagattgagaccatcctggctaacatggtgaaaccccgtctctactaaaaatacaaaaaaaaattagctgggcgtggtggcgggtgcctgtagtcccagctactcgggaggctgaggcaggagaatggcttgaacctggaaggcggagcttgcagtgggccgagatcgcgccactgccctccagcctgggtacacagcaagactccatctcgaaaaaaaaaataataataataaataaataaataaatgaaattattattatcttccagcaggtggcatagttttcactgaaactcagttttttcactttatttgtgtaaattttagtcatatcaaatccaatgttttttctttttttagttaggtcttactttatatggttaatgaaattttacgtaataatcttagattatttgcttctgttttgtgttttgcttttgaaagcaaagttgaatccttggtatgtataatatatttgaaatagggttcctttaacaacatgtagctatgtctccaagtgatttttctgttggtgtttaggtaccccttgttacgtggattcagaaggaattgttcgaatgcttaacagaggacttggtaatacgtggactcctatatgtaatacaagagagcactgcaaaggaaaatctgatcactactgggtggttggtatccatgaaaatccccagcaactaaggtgggctattaaaagaagtctaaagttgactctttttaaaaagtatgttgaaattctttttatgaggccctttaagtgtatttgtcttttatcttagtccaattacttgctttccatagtcactaaattaggaatttgttcatattcactctgaagttttcagtcacttgctttacttgaaacatgttgaacaaaatagaaataattaggatgaccttaccatcatttcagccacacagggagaggaattctgattaaacatggcatttcaccttttattactgtcttttattttaataaaataacaataaatataaaagttaaagtgaaaataaaacaatatatattcaattgagaattgaaatatacaattaagctgctttttgagatgttttgcttaattatcgtaataggaggaaggactaatagaagacagagtctcgctctgttgcccaggctggattgtagtggcgtgatctcagctcactgcaagctccgcctcacgggatcacaccattctcctgcctcagcctccccagtagctgggattataggtgcgcaccatcacgcctggctgatttttttgtatttttagtagagagggggtttcaccgtgttagccaggatggtttcaatctcctgaccttgtgatctgcctgcctcggcctcccaaagtgctgggattacaggcatgagccaccacgcccagctgagtttttttttttttttttttttttatgtggagtctcactctgtcacccaggctggagtacagtggcgtgatctcagttcactacaacctccactttgagttcaagctattcttctacctcagcctccccagtagctgagattacataggcatgtgccaccatgcccagctaatttttgtatttttagtagagacagggtttcaccatgttggccaggctggtcttgaactcttgacctcaagtgatccacctcaagtgatccacccaaagtacaggcatgagccaccgtacctggtcctggactaatagtattttatattgatccgtgtgcacattaaagtttgggaagtactgctgctggcatatgtataaaatgatacattggctgggtgtggcatgggatttctttttggggtgatgaaaatgttcagaaattagtgttgatagatgcacaattctgtgaatatacaaaaaaaccactgaattatgtcttttttttttttgagacagagtctcactctgtcacccaggctggagcacagtggcccgattatgtctcacttcaggctcacttcagtgacatcctgggctcaagcgatcctcccaccttagccttccaagtagctgggactacaggcacgcaccaccacacccagctactttttgtagagacagggtttcaccatgttgcctaggctggtctcaaattcctgggcttaagggatcttcccgcctcggcctcccaaagtgttgggattacaggcatgagccactgtgcctggctgaattgtatacttaccatatgatatggctggtacattctctgtgaactcaatattatgtgaatcatatcttgacaaagctgttaaaaaggatgaggacactatataatgatatagaaaaatctgcaagatgtgttaagtgaaataaataccatttgtgtaaaagtggggaaagaataagaatatgtaattgtatttgctttacatacgcaaaagaattcctagaagaatgaaaaggaaactaacaataatagttacctcacggagagaaactcagtggatagtataggagacttttctctgtattcatttttatactttttgagcatgtaaattgagcatgtaactttgaattactagttcaaaagttaaataaattgaatttttaaacaaagcagcaattcaataaactaaatcagataaggccagaagttaagttcaagaagacttcttaatttggctacatggaggttaacggtgactctgataaaagtgataaaatgttaaattccagattggggtgggcatgggaggtaaagaaatgaaagtagaatatgtggataactcttatcaagaaatttgactattgggccaggcgaggtggctcacgcctgtaatcccaacactttgggagcccaaggcgggaggaatgctggaggccaggagtttgagaccagcctgggcaacatagtgagacccagtttcaacaaaaaaaaatttttttaattacccaggcatgatggcacacacctatagtctctgctacttgagaggctaagaggggaggatcacttgagcccaggaggttgaggttacagtgagtcatgatcacacctctgcactcctgtctaggcgacagagaacctatctcaaaaaaaaagaactttggtgtgaagaggagcaaagatttggggtggcacctaaaggaggataaaaagtctttgaagggattttttagcttaggtgactctatagcatttttgtaatcttttggcaatgaatttagtaaagaagataagattgataatttaaaagaaggagccaatgaaaggaatgaaaaaagaaaaaaaagtagtagcttttagatcacctgtctaaaataggaaaatagacatttcatcagttctggaaagggaaaaaaataggcacaaatgcagatagatttggtagccaaaaggtaacaaattcctatcttctgtttttggcttctgttttgttggcagatcatgaagcagaattcagttatttctggagacagtggttggcattgtgggatgtttgagaagaaaagacatatagtctcagaggatgcaaaattgaattagtagagaactacagaggaattggtggttatttctgtgtgttttgcctttacagttgtaatcactgaatattacattctaaatattgacatatttagtatcagaagaagtatattcattaacggttttttttttttagagccagggtatcactcatttgcccatgctggagtgcagtagtgcagtcatagctcactgcagccttgaattcctgggctcaagtgatcctggcacctcagtctcctgagtaggtagaactacaggcacaggctaccacacctggctaatttttaaaaatattttgtaaagatggggtctcaccatcttgcccagattgacctctaattcctggcctcaactgatcctcttgcatcagccttccaaagtgctaggattataggtataagccagatgccaagccacattcactatttttagtagttcttatagtgtaggttgttctcagtgatttcttgcatgtccattttcaggaatctagttagtttagtaatttgaattaaagaattcacagtctatcttaatagtaggttaaggtttgaacctatgaggatttttactattctgcctaatgcttattcaagtaagattattcattttgttagtgaatgtcattatcttagaggtatatgaaattatttatttgcaatatatgaaattagtcatctgcaatgaacaattttgcttcttcatttcatttaatattacaagtatttcatcaattgcagttttcacacccttagtaatttatccagctggctttttttttcttaacatgctttttttttttttccacacaaccctttggaacacattttttacttgctttttatttaagatttgtaaagaattttaacttgttaaaaactacgataattacagctggtaacatttaactgttatattcaataatggataaagaaataatggactgtaaattacagcttttacacttagaaggattttagaaaccgtctatactagtagctcctgacattttcaaatataagagccctttttatttatttatttagaaacagggtctccttacgttatccaggctggacttgaacaagagtccttttttaaatgttgaacagttcatgcctccaaataatagtagctctagtagctctacatttagtatcagctaataaagaatatttctttattgagacacagtctcgctatgttccctaggcttttcttgaactaacctcgagtgatcctcccaccttggcctcccaaagtgctgggattacaggcatgataacataagcttctgtagacctgaaaattttattttaatataaaattgtatttacaaatcacgttatctgcatacatgtgaaaattttagtatgtaaagtggaaactatttttgtatttggtctacagacaattcatggtgcttgtgtgcattcctagacactttataatagctcagcagccctacaggaataaaagaatgggaactaccaagttcttttggtctatttgctgtctctcttcacccccagcacttctccccaatttttacatatgagaaaactaaggtccaaaaagattaaagtaatttggtagagagtacacatctatttattggcaaaaaaaaaacaaccttatttttttgtattaaaatataggaacaaagggagttagctgataagtagattgaaagaataaatacttctcctataaagaccagcttgttgtagaataattgaattactgaggggaatcttatacagtaggcatttgaagcactgagaagatacactaaaaaatctgttgatagaaatgtatttatttgtatattatgtgataaattgataactgcagactgttttcatattttcatattttcctggctttatgctggaataataaacttgaataagaatatttttctttttttttggtacacccttgtagaacatttatttatttattatttattatttattttttggtatatagccttaaatatttttcaaagattggaagcaacacttctcagtatggcttactgtacttttcacaccagttttgcttaacatgttggcatatttagagatgattcatttcctttctgtggatagcggtacatggaagttcggggaataaaattctgcaatcacttttttagtagcctgctgttgtgtttaaagagccttacctattttggctagcaagaaattcatttttggccaggctttgtgactcacagctgtaatcccaacacatcgggaggccaaagcatggggatcacttgaggccaggagtttgaggctagcctgggcaacatagagagaccctgccaggcatggtggtacatgcctgtagtcccagctgctcgggaggctgaggtaagggtatgacttgaacccaggagttcaaggttatacagcccctgcaccccaacctgcgtgacagaaggagactttgtctctaaaataaaaaggaaataaagaaattcatcttcatatttatttgcatttttaatgcctctgtttgctctcattgtttgtgataaagatagcaaatcacatgcttctctggaaagccaatgtggcctagtggtccagagctcgagctctcgagtgacactgcctgcttgtggtatcctggctgaaatcctcgttcagtagccctggctctgtgccactgtttcctcatctctaaaaccacagtgtacccatttcacagaatttctgtgaagatgaagtgacttagtgatacctctttctttattcttttaactttaaatgcattttctaacccaactcagtggtatttatgctttctttttgttcagagatcctttaaaagaaagtacattttgtgaaaaataatttttaaaaattcatttgagagcgtgtcacatcggtgcacacctgaataccagctacttaaaagacaggggcaggaggatcactggagcccaggagtttgcagacagcctgggcaacagcaaaaccccgtctctttaaaaaaaaaagcattaatttaagtcaatataaaattttcctattttcctttaattatgaatatgaggttgggtgcagtggctcacgcctgtaatcccagcaccttgggagggcaaggcaggcagatcaccctgaggtcaggagtttgagactatcctggccaacatggtgaaaccctgtctctactaaaaatacaaaaattagccaggcctggtggcagatgcctgtaatcccagctacttgggaggctgaggcaagagaatcgcttcaacctgggaggtagaggttgcagtgagccgagattgcgccactgtactccagcctgggcaacagagggaaactctgtctcaaaaaaaaaaaaattatgaatatgagaaattactgatctgtattaatgtcatccctgccccctttgagctgaacttcagtttaccaagtattgtttcttctaaagattttttcatgacactactggttaatacataactgagagttaataaattttgctgtgttacagtctaatttgctctctaccaacagagaccttctttctttttctgtttagtttttcaaaacaagagttatttaatgtgcttgaaaactagacatttttcctagttgtgttcactgaattagcatttattatagtaccgactagatgtgctataccacacaaagataaatgaggctgtggcctggaagaggtaggcttgtaaagtcattatgctactcccaaataagtgctttaaaagagatgtgagcaaagtcccctcaaatgcagaagacagtccggtccaacacagaagaaaaagcaaaacttgctggctggggcaaggttaatctggacacgacctagttttctccagtttggcatttttatttattttttcgagacagagtctcattctgtcatccaggctagtacagtggcacaatctcatctcactgcaacctcctccttccgggttcaagtgattcttatgcctcagcctcccaagtagctgagattacaggcatgtgccaccatgcccagttaattttttgtatttttagtagagacagtgtttcgccaggttgcccaggctggtctcgatctccagagctcaggtgatctgccggccttggctcccaaagtgctgggatattacaggagtgagccaccacgcctgattattttggcatttttaaactctttctttaatataacaaaaaaaaaaaaaacaaaacaaaacaggttttgtggtcaatttgaaaacaaattgaagtaattttttttttttttgagacagaatctctctctgttgcccagactggagtgcagtggcgtgacctcagctcactgcaacttctgcctcctggcctcaagcgatcctccgtcctccgccttccgagtagctaaagctacaggtccatgctgccatgcctagcaaattttttgtattttttgtatttttttgtagagacgaggttttgctatgtagcccgagctggtcttgagctcctgagctcaagcgatctgcctacctcagcctccttatgtactgggattacaggcatgagccactgtgcccagccacttttgtctttttagtaaaccaggtttttcattgtttttttttttttaaattcctcttccaggtggtttatgcacatagtttccaggaaactccgtcgtcatcaaaacccaccaaattagcagtttaaatgtgtttgttttttccttgaattcttctatgacggggatatttaacagagaaaacatctttttagttgaagtctctaaagctaaggaaaggataaaaaaatgcgaattggtgctctgctttgatgtaaatgtggcttagaaagtaacttaataaaatcctactcagtatttcctttttctttgtgataattgcttactatgtgtaaatcaataaagtgagctgtaaaatgtttttaaacaggacattttagaaaaaaatgtttaggcaattaacatttctcacagtgtttcttctaattttgttaatgtacatatatatgtacctggactcatcttttgtgaatgcacatgctctttttcattttgcatgactagtaaagtagtgattcttgtaaatagagatttatgacagaattgccacaagattctttcaaacttgaggtattcacactgccacctcatactgtgtggtgaaaactagattttttataaaatcataaaaggagagaaggaagaaataaatgaaattgtatgttcaaaaaaattagaaccctaaaaacatttgtatttttattgtatagtcagaaaaaaaagaagggagggtatttgaatctcacaagaaaggggcctgagtagtttgaaaaagaatactagacattgtcacttacttgttttctaattactctagtgggcatttgataatactggaagatatttataaaatttttaaaccctagggtctagcttctacttagtatctcccttcaagaatgtcctgattaaaaggctatactataaattaagtggatgattattagtaagcattcaaaaagagatttcgtctttttaaatgactttatgaaaatatgaaatttgcctgtggtatttatagtgtgcagtcatggttttccagtgcttttctaataaataaatcggagtacataagttgaaagagttctatatatatataaatcattctgtgattaattaatgctttttaataaatcagctgcgagagcactactcatgatgggcgtgtttgaatgccttatatagactactcagaacaggtttagacagtctttgccccgttgacctgttaccatatttatcagagtagatatagattatagtctttctaatgatgttctgcttcactctgaccaatatctaataaacacttaacctatattaggcatttcaccatctttctgtctctcttttttggaatggagtcttgctatgttgcccaggctggtctcctggcttaagtgatacccttctgtctcagcctcctgaatatctgggattacaagtgcccactaccatgcctgatttttttctcttttttgacaactcataccgacagtactaagaattcccaaactgatggatgaaagtgaatatgcctcattggcatttttttttttttttttttttttttttttttttttttgtgacagtcttgctttattgcccaggctggagtgcagtagtgcaatttcccaggttcaagagattctcgtgctttaccctcccgagtagctgggattacaggcgttcaccaccacacccagctaatttttgtatttttagtagagatgggttttcaccacattggccaggctggtctcgagctcctggcctcaagtgatctgcctgcctcacccctcaaagtgctgggattacagacatgagccaccatatctggccaacttttttttttttttttggtgagaccgagtctcactctgtctcccaggctggagtgcagtggtgtgatctcggctcaccgcaagctccgcctcccgggttcaccccattctcctgcctcagcctcctgagtagctgggactacaggcgcccatcaccacgcctggctaattttttaaaatatttttagtagagacagggtttcactgtgttagccaggatggtctcgatttcctgacctcgtgatccacccgcctcggcctcccaaagtgctgggattacatgtcttgccatgttgcccaggctggtctgaaactactggtttcaagtgatccacccacctcagcctcccaaagttctgggattatgggtgtgacccaccgttcccagccttgtatgtcttcttttgaaaagtgtctgttcatgtcctttgcccactttttattggggatatttgttttttgctgctgatttttttttaagttccttatagactctggatatcagatctttgttggatgcatagcttgcgaacattttcttgcattctgtgggatgtcttttttttttttttttttttttttgaggcagagtctcattctgtcacccaggctacagtgcggtggtgagatgagatcatggctcactgcagcctcgactttctgggctcagtgatccacctcaggatctgcaaatgtctttccatttgtttgtgtcatctatggtttctttcaacagtgttttgtagttcttgtagagatctttcacctccttggttagatatatcctaggtattttgtgtgtgtgcatatggctattgtaaatgggattgcacaagactacaggcacatgccaccacacctggataatttttaaatttttttgtagagacaggtctccctttgttgcccaggctggtctcaaactcctgggctcaagtaatcctcctgccttggcctcccaaagtgctgggattacagatgtgagccattgcacctgacctgtttactcttggtagtttcttttgctgcgcagaagctctttggtttaattaggtcccacttgtcaatttttgtttttgttgcaattgcttttgtggacttagtcatgaaatatttaccaaggccaatatcctgaagggtatttgctagggtttcttctgggatttttatattctgaggtcttacatttaagtgtttaatccatcttgagttaatttttgcacatggtgatagttaagggtccagtttcattctgcatgtggttagccagttatctcagcaccatttattgagtagggattcctttcccagttccttgtttttgtcagctttctcaaagatcagttggttgtaggtgtgtggctttatttctgtgttccctattgtgttccactggtctgtgtttctgtttgtgcaccagtgccatgttctttttcactagccttgaagtagagtttgatgttgggtaatgtgatgcctccagctttgttgtttttgttttagatcctttggctatttgggctcttttttggttccatatgaattttagaatagttttttctaattctgtgaaaaatgacattggtaatttgataggaatagtgttgaatctatagattgctttggggagtatggtctttttctttcttctttctttctttttttttttttttggtgctgtgacttcgatgcaaaccaaggttgctgcagacacagtatggtcattttaatgatattgattcttctaatccatgagtgtggaatgtgtttccatttgtttgtgttatctgtgatttctttcaacagtgttttgtagttcttgtagagatctttcacctccttggttagatatattcctaggtattttatgtacatgtatgactattgtaaatgggattgcatacttgatttgactctcagctcgaacattattggtgtataaaaatgctactgatttttgtatattgattttgtatcctgaaactttaccaaagtcttttatctaggagccctttagcaattctatgtatagagtaatatagtcagtggagagatatttgacttcttttcctattttggtatcttacttgattgttctggctaagattttcagtactctgttaaatatgagtgaaaagagtggccaaccttgtcttattccaattcttaagggtaatgcttccagctttttcccattcatatggtgttgtctgtgggtttgccatagatggctctttttattttgagttatgttccttcaatgcctagtatgttggaggtctttattatgaaaggatgttgaattttatcgaaagctttttctgcatctattgagatgatcatgtggtttttgtttttaattctgttgatgcagtgaattgcatatattgatttgcatatgttgaaccaaccttacatcccaggagtaaaacctactggttgtggtgtattaacttcctaaagtactgttgggtttggtttgctagtgttttgttgaggatttttatatctgtgttcatcaaggatattggcctgtagtttctctttttgatgtgtctttgccagattttggtatcaggataatgctggctttatagagtgatttggagaggagttggtattttggaatattttcagtaggactggtaccagttctttgtgcatctagaattcagctgtgatttttctggtccagggctttttttggttgataggttttttatttattacgattcaattttggaactcattattggtttgttcagaatttctgttttttctgagtcagtcttgggaagttttatgtttccaggaatttatccatttcctctagattttctttgctgtgcagaagttctttagtctaattaggtcccacttgtcagttttggtttttgttgcaattgcttttgaggactttctctttctctctctcttttttttttttttttcttgaaacggagtcttaatgctgggcgcggtggctcacgcctgtaatcccagcactttgggaggcataggcgggcggatcacaaggtcaggagatcgagaccacggtgaaaccccgtctctactaaaaatacaaaacattagctgggcgtggtggtgggcacctgtagtctcagctacttgggaggctgaggcaggagaattgcgtgaacctggaaggcggagcttgcagtgagccgagatcgtgccactgcactccagcctgggcaacaaagcgagactccgtctcaaaaataaataaataaataaatagaaacaaggtcttacctaggctggagtgcagtggcatgatcatggctcactgcagcctcaacctcccaagctcaattaatcttcccatctcagtcttctgagcagctggagctacagatacacaccaccacacctggctaatctttaaaaatttttgtagcaattgggtctcattttgttgcccagggtggtgtcaaacttctgacctcaagtgattctcccacctttgcctccaaaagtattgggattacaggtgtgagcccatttcctctaaattttctggtttgtgcacatagaagtgttcataatagtctctgaggatcttttgtatttctgtggaatcagttgtagtgtcacctttgccattttctgattgtgcttatatggagcttccctcttcttttctttgttaatctagctaggagtttatcgatcttgtttatcctttcaaaaaatcaattttttttgttttattgatcctttgtatggattctttagtctcaattttgtttagttctgctgttattttagttatttcttttcttctgctagctttggggttagtgtgttctcgtttatctagtttccctagatgcaatgttagattgttaatttgagatctttctaacttgatataggtgtttagtgctataaacgttcctcttaacattgcttttgctgcatcccatatattttgatatgttgtgtctgttttcatttatttcaaagaatatttcaatttctgcttaatttcattgtttattcaaaagtcattctggagtatgttgtttactttccatgtaatttgtgtggttctgagagatcctcagtattgatttctatttttattttactatggtctcagaatatatgcttggtatgatttcaatttaaaaaaaatttttgagacttgctttacggccaagcatgtggttgaccttagagtatgttccatgtgcagcttcatcagcatttatcttggtgataacatggattccatgacaggtattaatggtacaatttttatgttttaaaagtggtagtttgctaaggaaaatatgaagagagctgatttcacttttagtggttgtcatttaataaagtgagatgtgaggttgggcagggtagctcacgcctgtaatcccaacactttgggaggcaaaggtgggaggcacactttagcccaggagttcgagtccagcctgggcaacatggcaaaaccccatcgctactgaaaatacaaaagttagccaggcatggtggcatatatctgtagtcccagctacttgggaggctgaggtgggaggattgcttgaacttgggaggttggggcttcagtgagccgtgatcacaccaccgtgctttagcctgggcaacacagtgagaccctgtctcaaaaaaaataaatcaagtgagatgtgagaaggaatttttctattcttgaaatgcatgtagggatagtctttatgcctagtcaagcctaaaacacttttttaaaaagagatatttgttatatatgattaaggcagctattataatattactattctaagttactaacttttgaaaactttttaaattttgtagtttttatgacatgttagtaaatttttatgatggaacttttctttactaacaggtgcattccttgtaaaggttctcggtttcccccaacccttccacgccctgctgttgctatattatcctttaagcttccttactgtcagattgcaacagagaaaggacaaatggaggtatgtggaagtcttaccttgacactttgaatttgataatacagcacctgtgatacacacactttaaaattatcctgatggccagtattgaatattcattactgtataattacataaataggggtagcagggagggaagaggactgcttgggatcaccaggccacctgattgccatcactgcttccagggactttgtctacaaagtaaatgggtgtgactgtcagagacccactggggaaagacttactctcaggatggggcatgtccctgagaagaagtgcctccatacattttgtgccataacacctggcttgcctgaccctagtcctagccttgtgtcatcaaaagtcatttgaaatcttgcagttagttattctaaataagaaacaagttagcttttaaaaatcttgtttaccaaattctctgagcattaattatgatagctaggaaactgttttaaatgctgtattcctccccagctgccttttttaaggataggggaaaaagttaagctgtagtatcacactagaatttaaattgtaaaataaacttatagaaaggaagagttcagaacatattttattcaaaaactggtatcttaagataaatatttaacgcttgcctcatattaaggtgatagttggccttaagcaattttatttgcttttataggagcaattttggcgttcagttatatttcacaaccaccttgattatttagctaaaaatggttatgaatatgaagagagcactaaaaatcaagcaacaaaagagcaacaggaacttttaatgaaaatgcttgcggtgagtaaaataaatatactgaaaacgttaaagttaaatgcttttctataggttgaatttcttaaaggtctgtgcattaggactaagtcccacaacctaagattcttaagtttttttttgttgttgttgttgttttttgtgcgacggagtctcgttctgtcacccaggctggagtgcagtggtgcgatctcggctcactgcaacctctgcctcccgggttcacgcaattctgcctcagcctcccgagtagctaggattacaggcacacaccaccacgcctagctaattttttttttttttttttttttttagtagagatggggtttccctatgttggcccgactggtctcgaactcctgacctcgtgatccgcccgcctcagcctcccaaagtgctgggattacaggtgtgagccaccacacccagccattcttaagttttatctggtggtgttttcccttgtaaagttctatcttctagttggtcttgcagttaaaatttttttctttttttttttttaggcggagtttcgctcttgtttctcaggctgaagtgcagttgtgcagtcttggcttactgcaacctccacttcccgggttcaagtgattctcctgcctcaaccttccgagtagctgggactacaggcgtgtgccaccatgcctggctaatttttgtatttttagtagaaacagggtttcaccacattggtcaggctggtcttgaactcctgacctcaggtaattcacctgcctcggcctccgaaagtgctgggatcacaggcatgagccaccgtgcccagcctaaaataaataaaacagtaccttgtagctaagatcatgtgcaggaataaacatctctagggctacttcccttttgcttttgcccatcagtctatgttttaacgggctctcaaggtaactgagaaccactgctctagtttctgttattattttacaaagtttgagtatatactgttttttaatctccagggctgggcaatcttaagaactttgatcgggctgttagatatgcctgccttttgtcatcctctttgagttaggcagctgtgtgtgatgaaaatttatttgtgaccagtggccaggtttggtgtctagaatatttaagtacatttatctttggagcagggtgtcttaaagttcctgtgcttgtgtccccactcaaggttggtttatggagaggagtatagtatcatttcttctttatttgtcttacactagactttatgccccagagggcagagacctgctcactgctgtatgccaggcactgacatggtggcttaacacatagtagacctcgatatttgttgacaagagtgaatggtccagacttttaattttaaaattggagaaaaaaggttcttagagaaaagtggtatatgagaccacagagcaaattgccactcttgtctccaaaaggtagtactcactactgtcacctttatgcaacatggccttaagtttggtattaagaaaactcagtttattgtagaaaaagttttattccttttataaagtgttacttgtggtccaggaactagtagcctttttatttgtacaacacatataaggaaacatatttcatgtatttgctatttagcctagaggagcttttccctgtggcagtgtttctcatatcaaaaataccaggggactcatatcaaagatgccagggcaggaggatatcttgagcccaggagttcaaggggattgttgagttcttctttagcattcctgacccccgggcaaatgcctttagttcagaatagtcactgtggaaaccagactattcctttttatttctttttttttttttgaaacgaagtctcgctctgttgcccaggctggagtgcagtggcgcgatctctgctcactgcaagctccgcctcccaggttcacgccattctcctgcctcagcctcccgagtagctgggactacagttgtctgccaccacaccagctaattttttgtatttttaatagagactgtgtttcaccgtgttagccagtatggtctcgatctcctgaccttgtgatccacctgtctcagtctcccaaagtgctaggattacaggtgtgagccactgcgcccggcttcctttttatttctaaatgccccctgaggcagtgtaccatcccgattaagaagtactgattatagataaatgatactaaaaatcttgaaaagggcatccaggtgaatatctaaagcttttgtgctgatggatcagacatggaatatctaagtaagaaaatagttctaatacactatgaattaggagacccttagtaatcttcaaaataccaacttttctcagtttgttgtttttcttttttgtattttttagagaaagggtctcactctgttacccaggctagagtacagtggcaagattgtaactcactgcagcctcaacctcctgggctctagtgaacctcctgtctcaggctcctgagtagataagactgcaggtgcatgccaccacgcccagctaatttattttttgtagttatagggtctcactgtgttgcccaggttagtctcaaactcctggcctctagcagtccctctgccttggccttccaaagtgctaggattacaggtgtgagccagcacacctggcccccttgatttttttttttttttttttttttgagacagagtctcgctttctcgcccaggctggagtgcagtggtgcaatcttggctcactgcaacctccacctcccgggttcaagcgattctcctgcctcagcttcccgagtagctgggattacaggcgcacgccaccacgcctggctaattgtgtttttagtagagacggggttttgccatattggccaggctgatctcgaactcctcacctcatgatccacccatctgggcctcccaaagcactggtattacaggcgtgagccaccgtgcccagcctcccccttgaattttttaaacaaatttcttaattttcttgcaattagtagattaaagtggtatgtaatatttcatcaaatctaagccactgtttattgcatagtgcaccattactttattcatttaagccatggagacataaaaatgctgccaaactgacccaccattaattgtaattaattgtaattccaatttcagagatgttaaaacttgtaaaaatgtgcatcttagaattagggagatagagtagctagaaaactattgtctcagttttactagtagtgtcagtatctttaaaaagttttacttgatgttatttgatctcccccccccccccctttttggattagctttcttgtaaactggagcgagaattccgttgtgtggaacttgctgatctaatgactcaaaatgctgtgaatttagccattaaatatgcttctcgctctcggaaattaatactggctcaaaaactaagtgaactggctgtagagaaggcagccgaattgacagcaacccaggtggaagaggaagaagaagaagaagatttcagaaaaaagctgaatgctgggtaagaaataatttagttgtttgaattttcctttactgtcttgaatgttaagttggtctttgcatagctctttattgaataatattattttctcttagttacagcaatactgctacagagtggagccaaccaaggttcagaaatcaagttgaagaagatgctgaggacagtggagaagctgatgatgaagaaaaaccagaaatacataagcctggtgagatacattttcaagcccataaatcatgagaactatcatggatgtggcttttcccattttgcttaactgagggaaattgaatactcatactttttttcagacctctttgctatctggttgttgtatattgaggatgactatattttccccatttacattatattgctttattttaatctgtaggacagaactcgttttccaaaagtacaaattcctctgatgtttcagctaagtcaggtgagaaatatttataaatttgtaatatcaaggaaattttgcaagtcatctgcaaagtgacacatctacgcaaatacaccttaactcttaaggccacttttggtgtgtgtgtgtttatgtttttgtttttttaatctcagatgttgtttgtgaagctatggtcatttaacagatgtttataaaatgcctattgagtgtcaggcattttacttaatggtggatacagaagtcaaacagacatgtgtggttgatctctgttttaatgctattttagcccagctgagaagacagatgttgaagacagatctgggtatcactgaggaagcatgcaggatactggagaaacagttaaaaggaattgaaggctgggcgcagtggctcacgcctgtaatcccagcactttgggaggccggagtgggcggataacgaggtcaggagttctagactagcctggccaacacggtgaaaccccatctctactaaaaatacaaaaattagctgagggtggtggtatgtgcctgtaatcccagctactcgggaggctgaagcaggagaatcacttgaactcaggaggtggaggtagcagtgagccgagatcgtgccattgcactccagcctgggcaatggagtgagactccatctcaaaaaaaaaaaaaaggagttgaaaatggttgcgtacagggagtgggcctgggggataagagaaggttgaagtaaggcactgctggcccttttttggtggggagcataaaccttatagtaccatttgactttttaaactgtggacatatgttactttgatttaaaaaaattaacttaaaaaacatgtagaatatgaaaagagcgtatgacacatagctgtcatctagccagtggtggaggatgggtagggacttcaaggcaggcctcatggagtgtttacagcagagacctgaaggatgaataacagtcagcaaggcaaaggtgcatgggaacaggagcagaagagaagcatttgggcttaaggaacagtatgtgtgaactgaaggctgcaaaagggtggtgtgaaaagctcagagagcaaagagaaagtggtgctgaagggtttcggagtgatgggcaggagccaagtcatgcagatctgtgtaggccatattaaggattttggtcttttttttattttattttattttttttaatagagatggggtgtcactctgttgtccaggctggtctcaaactcaagcaatttcctcacctccacatcccaaagttgttggacctgcaggtgtgagccaccacacccggtcaggattttgctctttattctaaggtcactgagagactgttgtaggttttaagcagaggtatagcatggcacactgtgctgaagaagaacagataatagactactggccaggtgtgatggctcatgtctgtaacctcagcattttgagaggccaaggtggaaggatcacttgagaccagacgtttgagaccagccttggaaacaatgaaaccctatctctacaaaaagtaaataataaaaatattagccaggcatggtagtacacaccggtagtcccaggtatttgggaggctgggacaggaggatatcttgagcccaggagttcgagggtgcagtaggctatggttgcaccactgcactccagcctgggtgacagagcaagaccctgtatcaaaaaataaataggccaggcgtggtggctcacgcctgtaattccagcactttgggaggccgaggcaggtggagcacttgaggtcaggagttcaagaccagcctggccaaaatggtgaaaccacatctccactaaaaatacaaaaaaaaaaattagccgggcatggtggctcatgcctgtaatcccagctactcgggaggctgaggcaggagaattgcttgaatccaggagtggggagttgcagtaagtggagatcacgccactgcactccagcctaggtgacagagtgagacttcatctaaaataataataagaagaagtaaataaaaattaaaaaataaagagactacaagctgggcgtggtggctcacacctgtaatcccagcactttgggaggctgaggagggtggatcacgaggtcaggagattgagagcatcctgaagaacacagtgaaaccccgtctctactaaaaatacataaaaattagccgggcatggtgacaggcacctgtaatcccagctacttgggaggctgaggcaggagaatggcgtgaacccgggaggcagagcttgcagtgaggtgagatcataccaccgcactccagcctgggcgacagagcgagactccatctcaaataaataaataaacaaacaaactacagaggcagtccaaatgagattgaataagggcctgagctagggtggtgatggtgatgttagaaagaatgggcagagttggagagctatttctgaagatgatgaagagagtgtaggagttcagggcgtaaagagtgattctcagtttcttgtaatagaagaaaaacttaagcacatttgaatcttgaaggattaatttgaacattcagtgattcatgaatcagggaggcaccaaaccgcaaggggctagcactctgccaggagagacaaaaggggaaacttttataaagtattttcagaaacgagataaataaaacaatttttattggctagatggaaaggtttttttgtttgttttttttgtttggtggggggggtgcggatacagggtatcttgctttgtcactcagactggagcagagttggagtgcagtgatgcagtcctagctcgctacagccttgaactcgtatgctcaggtgatcctcctgcctcaccctactgagtagctatgactacagttgtgcatcaccatgcctggttaattttttgtgtgtactttttgtagagagaggagcttgctttgttgccgaagctggtctggaactcctgggcttaagtgaccctcctgccttagcctcccaaaattttcggattacaggcacaagtggccatgctcagctagaaatttcctgcctgcctgcctgcctgcctgcctgcctccctccctcccttccttcttccctccctccctccctcctcttccccccgccagggtgtgactgtcatccaggttagagtgcagtggcgtgattatggctcactgcagcctcaaccccccagacccaagcgatctttccacctcagcctcccaagtaactaggaccacaggcatgtgtcaccatgtctggctagttttgttttggtttgggttttttgttttgttgttttttgtttttgtagagacagggtctccctatgttacccatgctagtcttaaactgggctcaagcagtcctccctcctcagcctcccaaagtgctgggattacaggcttaagccaccatgccaggaaagctcttaattagagattagtttgttaacactggcttgagtacttgagtgaatgatggtgccatttcctaagtcaggaaacactagagaaaagcagatttagagaggaagatgatgaattactgtaaggtgagtagaatgtcgtgaagacagatatttgaatcaggagctcagggaagtattctggtcaagagatacaaagtgaaaatcattggcataagtatagcaatttaaaccatgagcatgggtaagcaagcattgggggagaatgtaaagcaaaaagaaaaatgagcttaagcctagggaatctccaacatttgagcatcaggtagaggaagaggaggaaccaactattggaacacaatgagtccacaggtccagagaggaaggaactaagtcagggaatgcagtatctcagaagtcaagagaggacaaagtatcaagaagtaaggaacagtcagctatgtgggatgccattgatagagcaaacaaggtgactgaaaggtatccaccagatttgacaatgtagagatcactgagggccttagcaagaggagattctgtagggtggtagagctggaagtgctatattgtatggaggaatgtatgggtggtgaggaaatgataatagtgtcaacagttcttggaaaaatttggctggatgaccgggcgtggtggctcatgcttgtaatcccagcactgtgggaggccaaggcagacggatcacctgaggtcaggagttcaagaccagcctggccaacatggtgaaaccctgtctctattaaaaatacaaaaattagccgggcgtggtagcaggcgcctgtaatcccagcaattcgggaggctgagacagtagaatcgcctgaacctgggaggtggactttgcagtgagccgagatcacaccattgccctccagcttgggcaacaagagcgagactctgtctcaaaaaaaaaaaaaaatggctggatggaggaggcgagagaaaatggtgactggaaggaatgtggggtagagaaggtttgttttttgtttctttttaagttgggagactttaggggccaataaatagggaaaagtcaaagatgtaggatgtcaagaaacttgataggtcaggttttctgacaaagcaggagggcatgggatgcagaacacaagtaaagggattactaaccttagctcagacgagctgccactcttccgcagtaacagaagataaaagatctgtacatactgaatatgtttcatagtggcacgttggggtggttcacatttaatagcttttattttggcttagaagtaggaaagaggatatctgttgttaatagttttgaaaagttgcaaaatacatttgttttcatttaatggggattaaaatactctgtctagtattatagatgtcagaagtcatctattttctaccattattaagcaagggtttcttttttgtgaaaggtgcagttacctttagcagccaaggacgagtaaatccctttaaggtaaactcttccaagtgatgttttatattatttaaatacatttgtatacaaagaaatatttccaaatgatgagatgactctccccagacttggaggcatgaaagactgatctgtgtggaaacagaagaaagcagcacttgggctgagagttgtcttttctacttaccttctaagtacctatggttttgaaagatacctctgtctttcttggggatgtggtatttgggaatatacgtatcattcttaatttggattgtaccaaatgtatttagttctaaagatgagatggcaatacaaacttaacagaaatttcaagaaaaaataagtctcttgggattttatttttcttctttaaacatacagtgctaacactagtttgctctttaggtatcagccagttccaaagaaccagccatgtcaatgaattcagcacgttcaactaatattttagacaatatgggcaaatcatccaagaaatccactgcacttagtcgaactacaaataatgaaaagtctcccattataaagcctctgattccaaagccgaagcctaagcaggtactgtttcagctaccctcatctgcagtaagcagcatgggatctgtttgtcttcagttttgttcactgtttcagatataggataggaggttctgattgtttacaattgtcttgctagggaagtgggttcaattctgtttttgcagctaggcacagtggcacatacctgtagtcccagatactcaggaggctgaggtgggaggatcacttgagcccaggagtttgagtccagtctgggaaacataagagataccccatctgaaaaaaacaaaccccaaaacagttgtgttttttgtttcagaatcactccctattctgcctcgtgagttgttacacactttgtagcagattctgacttccaagatcactatcctgctccccctgtcttttttgagacagaggctcactctgtcacccaggctggatggagtgcagtgtcaggatctcagctcactgcagcctctgtctcctgggttcaagcaattctcatgcctcagcctcccgaggagttgggattacagaggcctgacatcacgcccagctaattttggtatttttagtagagatggggtttcagcatgatggccaggctggtctcaaactcctggcctcaagtgatccacccacctcagcctcccaaagtgctggtattacaggcatgagccaccgcacccagcctatcctgcccctctccttgtttttacagatcactttttaaaaatatatatactcagaccccagaagctcagacatttatctgtatttttattaaaatcacccagatagttctgatgtatattcgtatttaatagtggctgatattgtacatggccctaatttttccttgttctgagtcctgatttttccactctgataagtatttgatcccggattagtcattggtaaaatagatctattgcttatcttttctatttaatataattgtattcatttagaaaacatggaatttaggccagccgcggtggcaggtgcctgtaatcccagctacctgggagggtgagtcaggagaaccacttgaactcggagggtggaggttgcagtgagccgagatagcgccactgcactccagcctgggcaacagagtgagactccgtctcaaaaaaaaaaaaaaaaaaaaggaaaacatggaatctgaagtgtagttttttggttttgcatgtgtttgcctatttatttacaactgagaactccagatttcacatgttagtataagaattctcaataattatagatgtttcttcacatttttcagaacgtgcttataaaacatataaaattatactagatgttattgcagtattcatgtttgtttttataggcatctgcagcatcctatttccagaaaagaaattctcaaactaataaaactgaggaagtgaaagaagaaaatcttaaaaatgtattatctgaaaccccagctatatgtcctcctcaaaacactgaaaaccaaaggtcagtacatagagaaatttagcatgcagtgaccaagtaaaaagtatacagtagcagcaatacaaaattatgcaatgctgttattccttaatacaaataatacattggcattggtagtgggcattctggacacttgtgactataaggaagccacaaatattaatgtctatttataatatttattaaaatatgctttaataaattgtatatttttaaattgtggatatattttattgggacattatattttgtaattaattttttgtttgtttttaaatagtttaatggggagaaatagcaaaagatacaaaaagaagagtgataataagtagtttcatccaactaatttctgtctccaaaaacaatcactgcaacaagtttcttgtggaactttccaaaattattctatttatgtgcaaatacatatttgtctattttttgttttacacattattctgtaccttacttttttaacttaacaatagcttttgtagcttattttatattactacataaagaacttctttatactggctgggcatggtggctcacgcctataatctcagcactttgggaagccgaagcaggcggatcatctgaggatgggagttcgagaccagcctgaccaacatggagaaaccctgtctctattaaaaatacaaaattagccaggcttggtggcacatgcctgtaatcccagcaaatcggaaggctgaggcaggagaatcacttgaacccgggacgcggagattgcagtcatctgagatcacaccgctgcactccagcctgggcaacaaaagcgaaactctgtctcaaaaaaaccaaaaaaacaaaaagaacttctttatactatagcaaggctatcagaaaaagtaaatacataaatggatggatagatagaaaaataagagctttaatctttgtgtatccattgaatagacatgtcatagttcatgtagttctctacttgtggacaaaagatggttaccggtcttttgctagtacagacagtactgcaatgaataattttatatgaatagcatttctcacagatgcatatatagctataagatggattcatgtatggttcaagttaatctgcacttataattccaatgccagattgttctgcattgatgttgtatcattttatacacctttagcaatatgagtattcctatttgctcatatcctctttgtccacaaacacagtatgttacctattttcttgatctctactatgctggatttctttgtatttatttattttttctgagacggagtttcgctcttgttgcccaggctggagtgcattggcacgatcttggctcactgcaacctccgcctcccaggttcaagcgattctcctgcctcagcctcctgagtagctgggattgcaggcatacgccaccatgcctggctaattttatatcttttttttttttttaaatacttttaagctctagggtacatgtgcacaacattcaggtttgttacatatgtacacatgtgccatgttggtgtgctgtgctcatcatttacattaggtatatctcctaatgctatccctccctacttcccccaccccacaacaggcccaagtgtgtgatgttccccttcctgtgtccaagcgttctcattgttcagttctcacctatgagtgagaacatgcggtgtttggttttttgtccttgagatagtttgctgagaatgatggttcccagtttcatccatgtccctacaaaggacatgaattcatccttttttatggctgtatagtattccatggtgtatatgtgccacattttcttaatctagtctatcattgatgaacatttaggttggttccaagtctttgctattgtgaatagtgccacaataaacatacgtgtgcatgtgtttttatagcagcatgatttataatcctttgggtatatacccagtaatgggattgctgggtcaaatggtatttctagttctagatccttgaggaatcgccacaccgccttccacaatggttgaactagtttacagtcccaccaacagtgtaaaagtgttcctatttctccacatcctctccagcacctgttgtttcctgacattttaatgattgccattctaactggtgtgagatggtttctcactgtggttttgatttgcatttctctgatggccagtgatgatgagcattttttcatgtgtctgttggctgcataaatgtcttcttttgagaagtgtctgctcatatccttcgcccactttttgattgggtttgtttttttcttgtaaatttgtttgagttctttgtagattctggatattagccctttgtcagatgggtagattgcaaaattttttcccgttctgtaggttgcctgttcactctgatggtagtttcttttgctgtgcagaagctctttagtttaattagatcccatctgtcaattttggcttttgttgccattgcttttggtgttttagacatgaagtccttgcacattcctatatcctgaatggtattgcctaggttttcttctggggtttttatggttttagatctaacatttaagtctttaatccatctggaattaatttttgtataagatgtgaggaatggatccagtttcagctttctacatatggctaggcagttttcccagcaccatttattaaatagggaatcctttccccatttcttgtttttgtcatgtttgtcaaagatcagatggttgtagatgtgtggtattatttctgagggctctgttctgttccattggtctgtatctctgttttggtaccagtactgtgctgttttgtatagtttgaagtcaggtagcgtgatgcctccagctttgttcctttggcttatgagtgacttggcaatgcgggctcttttttggttccatatgaactttaaagtagttttttccaattctgtgaagaaagtcattgatagcttgatggggatggcattgaatctataaattgccttggacaggatggccgttttcacgatagtgattcttcctatccatgagcgtggaatgttcttccgtttgtttgtgtcctcttttatttcattgagcagtggtttgtagttctctttgaagaggtccttcacatcccttgtaagttggattcctaggtattttattctctttgaagcaattgtgaatgggagttcactcatgatttggctctctgtttgtctgttattggtgtataagaatgcttgcgatttttgcacattgattttgtatcctgagactttgctgaagttccctatcagcttaaggagattttgggctgagacgacggggttttctaaatatacaatcatgtcatctgcaaacaggtacaatttgacttcctcttttcctaattgaataccctttatttctttctcctgcctgattgccctggccagaacttccaacactatgttgaacagaagtggtgagagagggcatccctgtcttgtgccagttttcaaagggaatgcttccagtttttgcccattcagtatgatattggctgtgggtttgtcataaatagctcttattattttgagatacatcccatcaatacctaatttattgagagttttttagcatgaagcgttgttgaattttgtcacaggccttttctgcatctattgagataaccatgtggttttagtctttggttctgtttatatgctggattacgtttatttatttgcgaatgttgaactagccttgcatcccagagatgaagcccacttgataagttttttgaagtgctgctggatttggtttgccagtattttactgaggatttttgcatcgatgttcatcagggatattggtctaaaattctctttttttgttgtgtgtctgccaggctttggtatcaggatgatgctggcctcataaaatgagttagggaggattccctctttttctattgattggaatagtttcagaaggaatggtaacagctcctccttgtacctctggtagaatttggctgtgaatccatctggtcctggactttttatttggttggtaggctattaattattgcctcaatttcagagcctgttattggtctattcagagattgaacttcttcctcgtttagtcttgggagggtgtgtgtgtccaggaatttatccatgtcttctagattttctagtttatttgcatagaggtgtttatagtattctttgatggtagtttgtatttctgtgggatcagtggtgatatcccctttatcattttttattgcatctatttgattcttctctcttttcttctttattagtcttgctagcggtctatcagttttattgatcttttcaaaaaaccagctcctggattcattgattttttgaaggcttttttgtgtctctatctccttcagttctgctctgatctcagttatttcttgccttctgctagcttttgaatatgtttgctcttgcttctctagttcttttaattgtgatgttagggtgtcaattttagatattttctgctttctcttgtgggcatttagtgctataaatttccctctacacactgctttaaatgtgtcccagagattctggtatgctgtgtctttgttctcgttggtttcaaagaacatctttatttctgccttcatttcgttatgtacccagtagtcattcaggagcaggttgttcagtttccatgtggttgagcagttttgggtgagtttcctaatgctgagttctagtttgattgcactgtggtctgagagacagtttgttataatttctgttcttttacatttgctgaggagtgctttacttccaactatgtggtcagtgttggaataagtgcgatgtggtgctcagaagaatgtatattctgttgatttggggtggagagttccgtagatgtctgttaggtctgcttggtgcagagctgagttcaattcctggatatccttgttaactttgtctcgttgatctgtctaatgttgacagtggggtgttaaagtctcccattattattgcgtgggagtctaagtctctttgtaggtctctaaggacttggtttatgaatctgggtgctcctgtattgggtgcatatatatttaggatagttagctcttcttgttgaattgaattgatccctttaccattatgtaatggccttctttgtctcttttgatctttgttggtttaaagtctgttttatcagagactaggattgcaacccctgccttttgttgttttccatttgcttggtagatcttcctccatccctttattttgagcttatgtgtgtctctgcacatgacatgggtctcctgaatacagcacactgatgggtcttgactctttatccaatttgccattctgtgtcttttaattggagcatttagcccatttacatttaaggttaatattgttatgtgtgaatttgatcctgtcattatgatgttagctggttactttgctcattaattgatgcagtttcttcctagccttgatggtctttacaatttggcatgttttttcagtggctggtaccggttgttcctttccatgtttagtgcttctttcaggagctcttgtagggcaggcgtggtggtgacaaaatctctcagcatttgcttgtctgtaaaggattttatttctccttcacttatgaagcttagtttggctggatatgaaattctgagttgaaaattcttttctttaagaatgttgaatattggcccccactctcttctggctcatagagtttctgccgagagatcagctgttagtctgatgggcttccctttgtgggtaacctaacctttctctctgaacattttttctttcatttcaactttggtgaatctgacaattatgtgtcttggagttgctcttctcgaggagtatctttgtggcattctctgtatttcctgaatttgaatgttggcctgccttgctaggttggggaagttctcctggatagtatcctgcagagtgttttccaacttggttccattctccctgtcactttcaggtacaccaaacaaacgtagatttggtcttttcacatagtcccatatttcttggaggctttgtttgtttctttttactcttttttctctaaacttttcttctcgcttcatttcattcatttgatctttgatcactgataccctttcttccagttgattgaattggctactgaggcttgtgcattcgtcacgtagttctcgtgccatggttttcagctccatcaggtcatttgaggagttctctacactggttattctagttagccattcgtctaatcttttttcaaggtttttagctcctttgcgatgcgttcgaacttcctcctttagctcggagaggtttgatcgtctgaagccttcttctctcaactcgtcaaagtcattctccgtccagctttgttccgttgctggtgaggagctgcgttcctttggggggggagaggtgctctgatttttagaattttcagcttttttgctctgttttttccccaatctttatggtttcatctatctttggtctttgatgatggtgacgtacacatggggttttggtatggatgtcctttttgtttgttagttttccttctaacagtcaggaccctcagctgcaggtctgttggagtttgctggaggcccactccagactctgcctgggtatcagcagcggaggctgcagaacagcaaatattggtgaacagcaaatgttgctgcctggtcattcctctggaagcctcgtctcagaggggtacccggccgtgtgaggtgtcagtctgcccctactggggggtgcctcccagttaggctacttgtggatcatggacccacctgtcactgaggaggcagtctgtccattctcagatctcaaactctgtgctgggagaaccactactctcttcaaagctgtcagacagggacatttaaatctgtagaggtttctgctgcctttgttcggctatgccctgcccccagaggtggagtccacagaggcaggcaggactccttgagcttcagtgggctccacccagttcgagtttcctggctgaggctgccgccttgtagttcaatctcagactgctgtgctagcaatgagtgaggctccatgggcatgggaccctctgagccaggagtgggatataatctcctggtgtgccgtttgctaagaccattggaaaagcacagtattagggtgggggtgacccaattttccaggtgctgtgtgtcacagctttgcttggctaggaaagggaattttctgaccccttgcgcttcccgggtgaggtgatgccttgccctgcttcagctcacactcggtgtgccacaccccctgttctgcgcccactgtccgacaagccctagtgagatgaacctggtacctcagttggaagtgcagaaatcacccgtcttctgcatcgctcatgctgggagctgtaggctgaagctcttcctattcgaccatcttggaaccgcttaattttgtatctttagtagagacgaggtttctccatgttggtcaggctggtctcaaactcctgacctcaggtgatctgcccaccttggcctcccaaagtgctggaattacaggtgtgagccaccactcctggccttatttttaatatatccgttaaatttgaaaagtcacaattttggcctggcacagtggctcacgcctgtaatcccagcactttgggaggctgaggtgggcggatcacttgaggtcaagagttcgagaccagcctggccaacatggtgaaaccccatctctattaaaaatacaaaagtttgccaggtatggtggctcatgcctgtaatcccagctacttgggaggctgaggcaggagaatcgcttgaacacaggagacggaggctgcaatgagccaagattgtgccactgcactccagcctgggcaacagagtgagactccatctcagaaaaaacaaaaagaaaagaacagtcacaatttcatttttaccataatatatctcatttttctcatgctgaacagtccagggagaaaaataataataaagtatatcttattttcttaatgactttatgttaaccagtttgagggagtggctgtggttttcacatttcctgttttgttctgaatttaatttaggtcttaaacagtgaaaattttatttaagaaaattgataggccgggcatagtggctcatggttttttttccgcttaacacttttttctttttgctcttgttgcccagactgcaatgcaatggcacaatctcggctcactgcaacctctgcctctgggttcaagtgattctcctgtctcagcctcctgagtagctgtgattacaggcatgcgcaaccatgcccgactaattttgtatttttagtagagatgaggtttctccatgttggtcaggctggtcttgaactcctgacctcaggtgatccacccgccttggcctcccaaagtgcagggattacaggtgtgagccaccatgcctggcccgcctaacactttttttgagacagtcttgccctgtcaccaaggctggagtccactggtgcaatctcagctcactgcaacctccaccttctgggttcaagcaattctcatgcctcagcctcctgagtagctgggattacaggtgtgtgccaccatgcccactaattttgttattttttggtagagatggagtttgccacgttggccaggctggtctcaaactcttggcctcaagcgatttgcccatctcggcttcccaaagtgctggggttacaggtgtgagccaccacacctggccaagcctaacactttggaaggccaacatgatcagttagcttcagcccaggagattggaaccagcctgggcaatgtagggagaccccatctctaccaaaagttttaaaatcagccaggtgtgtgtggtggcacatgcctgtagtcccaactgcttgagagtctgaggcaggaggattgcttgagcccaggaatttgaggtggcagtgagctgattataccactgcactccagcctgggcgacaaagcaagaccctttctcttaaaacaacaacaaagaagattgataatttaatttttcatactatcagttggttatacaaaaaacttacttttgaaattttaaggaattaccactattgaaactaatattttgtcacagatgttgatatacttaatcagaaatgtccagttttagccaggtggctgtgcactcttgtagtcctagccactcagaaggttgagtcagaagggttgcttaagcccagaagtttgaggccagcctaggcaacatagtgagactcacgtctctttaaaaaacaaagaaagaaatgttcaattttggttttctttttaaaaatagctgtttagaagtagatgattgcaggccactaagtagacttgtgacattgccccaagtttcattaaaatgggtcttcattaatttttggaaattcaggaacctttgttataccttgatttttacttgttttgatttgttctgttatttttctggaaatcggtttacgttaagattacttaaaatttgcatattttcagaaattgggcaaatggttatggtcatactagtaattttttaataaaaatttttttaaccttaaaaagtttagactttttatttaggattcatttaggttcagcctagtgaggggcgtatagctgctgggttaaacataagagactctgggccaggcacagtggctcacgcctgtaatcccagcactttgggaggccgaggcgagtggatcatgaggtcaggagttcgagacccacctggccaatatggtgaaaccctgtctttactaaaaatacaaaaattagctgggtgtggtggcgcgtacctgtagtcccagctgtttgggaggctgaggcaggagaatcacttgaacctggaaggtggaggttgcagtaagccaatacagagccactgtactccagcataggggaaagagctagactccatctctacaaaaaaacatagactttggagtcaaattgcctggttgttggatcccaggtctgagttttactgtttgtgtaacctgggataggttatttcacatctctgagcctcccttttctcacttatggaatggagataataactgtatccatctcatagtgttattgtcatttaaatgaggtactatacataaagcttttagagtagtgcctggtagatagtaagtgatcagtaaatgttaaatatttgcattaaaccttcacttgtgtgacttaaagacaatttgtattgtgagtggaatctaatgaaatgtacaaatgtgctgtgtccgtgcttcacctaatgctgatgcaggtcagctctgagagcaagggtgaggcgatggcaaaggggcttgagaaaagtcgtgaggaattcaaatagctggtttggggaaatagaaaaagagcctaccaaggacatgtggtaggccacaagggctaagtgaggttggagaccttgagcctgtcaacattcattaaaaagttgaaagtacagagttcatggttgctgcacttggaaaatacaaacgtgagtgatccttttgaattgaccttacaaaggattttccagttcattgatcctgcagtctccaggcagtttaaagtaatatgaggccaggcacggtggcttatgcctgtaatcccagcagtttgggaagccgaggcgggcagatcacgtgaggtcaggagtttgagaccagcctgaccaacatggtgaaaccccatgcaaaaaattagccaggtgtggtggcgcatgcctgtaatcccagctacttgggaggctgaggcaggagaatcgcttgaacccaggaggcggaggttgcagtgagctgagatcgcgccattgcactccaggctgggtgacagagtgagactctgtctcaaaaaaaaaaaaaaaaaaaaagtaacatgaattaacaagtgtaactgtgtcttccttactttatataatagatgtcagagacttatggttgattactaacttaaaatcatgaggcactttaaactctgtcttaagtataaaatgttttcacataattgtgattttaggccaaagaccgggttccagatgtggttagaagaaaatagaagtaatattttgtctgacaatcctgacttttcagatgaagcagacataataaaagaaggaatgattcgatttagagtattgtcaactgaagaaagaaaggtaaggataattgtgccgagattgagatcttagtgaattcccagatttaaaaaattcttatagaaatgccttttggctgggtatggtgtcttatgcctgtaatcctagcacattgggaggtcgaggcggatcacttgagctcaggagttcgtgaccagcctgggcaacatagtgagacatcgtctctaataataataataacaacaacaaagataataacgatcatgacaactaaaaaaaaaaggaaaagcctttttctgtttttggaaattgaatacatccaccaaactttttaaagaggaaagtaagtgcggatatatggtaatatggatatgtagtaattattatgtaatggtgatgggttttttgttttgtttttgtttgaggcaggtcttgttctttcacccaggcaggagtgtcgtggtgtgatcatggctcactgccacctcgacctcctgggcacaagcaattgtcctcttttttttttttatagagacaacctctcactgtgttgcccaggctggatggttaattttttgacggtttactgttttaatctctataagttcctgtatgttttaagttaggagaataccccaagaaaagatgcatttgttaaaaatcaaaagtgtcaagctgagttcgttggctcaagcctgtaatcctagcactttgggaggccaaggcaggaggatctcttgagcccaggagtttgagaccagcctagacaacatagtgatacaccatctctacaaaaatttaaaaattagcctggcatggtggcacacacctgtagtcccagttactcaggaggttgaggtgggaagatcacttacttgagcccaggaggtcaaggctgcagtgagccgtgattgtgtcactgtactccagcatgggtgacagagtgagaccgggtctctagggggaaaaaaattaataagtaaaaatgaattcacattttttgaatactactttagggttcttgcaagcagaatttttaaaaattgtatctacttacacattaaatactacatgagactattccttttgggaaaaagactggtgttctgttccagcctttcacatggaaattaggacaggtggctggcttgcttctgataaacttctgccatgtgaaggaaggaaggcacaatctctcagttagaagtggaaggaatgtgtgtggtgtaccagttaaatcctcaggtttcacttccccaggaatggcagggcgcagcacaggcacctagtaacgtagatacttgctttggtaaattgggttttatgaaaaaggtgttgcataatgaggaagccagaaactggtttaaacacctttagcgtcatttagaacctcatttacaattttatgtttctcatttgttgttcaataaaatggcgtctaaataaataagactttacactgcaaaagaggaagagacttggcaaagtctgtgattgtgtttttgaatacttaaaaatgtaatcagtatttttaaggtaaaccctaaacatttacttaaatccagtttgttaatgtgagaaattctacagcttgaagagcccttgaaatggccagggaaataaagtaggagtggggaactattatagattaaaagagattttagagacagatgaaatgaatggaccttgtctggctcttgctgagtgaataaaaaccaaaccccaaagaatatatactcatttatataacattcctgaaatgacaacatgatcaagatggagaatagagtagtggttgccaggggttggagtcggagttggggcttggggaagaggttctgtattttgactgtggtggtaaacaaaccaacccacaataaaagtaaatacatacatacgctcaaatgagtagaagtaaaatgggattgtttcaatgtcagttccctatagttgtgattgttgggctatagttttgcaaaatgttaccactggggaaaactgggtgaaggctacacaggatctttctgtattatttcatacaactgcatgtgaaactgcaattatcttagaataaaaagtttcatttttattatttatttatttatttatttatttattttttgagacggagtcttgctctcgcccaggctggagtgcagtggcgtgatctcagctcactgcaggctccacctcccgggttcactctagtctcctgcctcagcctcccaagtagctgggactacaggcgcccgctaccatgcccggctaatttttttgtatttttagtagagacggggtttcactgtgttagccaggatggtctcagtctcctgaccccgtgatccacccacctcggcctcccaaagtgctgggattacagacatgagccaccgtgcctggccaaaagtttcatttttaaatagtactgcaattatagtattttgcaactaatatgattaatataagcaaagcttagattgagatataaaagtagtgtaaatctttaatgtgctctgcatttaagtaataaaagatttgttaacaatgagaacacttaattcaagtgctaattattctgctttatatataaaaatattacctggaaaagtaaataaatcatttacttcttatttgttattttctaaaaatctttccttttcactcctgccattttacaaaggtgtgggctaacaaagccaaaggagaaacggcaagtgaaggaactgaagcaaagaagcgaaaacgtgtggttgatgaaagtgatgaaacagaaaaccaggaagaaaaagcaaaagagaacctgaatttgtctaaaaagcagaaacctttagatttttctacaaatcagaaactatcagcttttgcatttaagcaggagtaaaggaagaaagtgaccctagggaagtaatggatttttttttactcatctttgaatatagactcgagtctttgggaaactcattatatatatattttttaaagagtttgaagcaactgtttgtctttataagataatgtagtaattatattggtgtaggtaacaggacatatgtaaaaactatcatctttgcagattactctgcctccaaatgcagggcctttcagagatgcattgtgattgtaattactgagttgaagctccaaccaatttgaatttgtttcttaaccttgaaaaatcattaaagccaaggtattaaaacctttgtgcattaataccttctaggggtttggttcatttggtttttgtcatgtgcaaggaaggacaatagtcctctttccaagtgtgttagcatagacttctctatatgtttctactagacctaggggatgacgtcttttaataatactggccctaaacatgtaaataatcttgtaggtgagactttttcttttgtgtttcggaaatttcctatgtggctttcagttgtctgtttgtatagcctggatttttttgaggtaaatgaaactttctcatttgt

SEQ ID NO: 5890 - DNA, 1367 bp, Homo sapiens
atggtcttaatattatctttccacgaaatggatatatttctagaaaatatatatttactaccataatttctaccaccacccccattttgctctgcattatacacagtagagaagaactgaagacactgctgtgacagtattgcagtccaaggcatcatgtgctcttggtgggatactctgattatcagcatcaacagtactttactgagcaagactttgaaggcctgagaagagagcaaagttatggaaagtatttaactcttattttatattgaacaaacaaggtttaatcatgtcatacatttttggttttctaagcagagactaatacaaatgcagccacataaaggcagtgtactgggggtgggagggaaggaaacaatcacataaaatcagctgactcaaaattgaggatagttaataggttgaaagggaaaaagtatgttgaaaatttagacataaatgaaccaagaatattccttatctggtgatgattaaagttaggaaaacatacattttttattttttaattagtagctgctatcagagacattatagcacagtggttatgagcacagattccaaagccagattacctaggttcggagacccgcttctctacctactactaatagttgggtcatgttgggccggtgacccaaattctagccttcattcactcatctgtaaaatggatataatgatagtacctactttataggttgttatgagaattgaatgaaatgaaagcccttagtttctgacacatagtaatcttttatataaatgttagttactattctgataatgatgatgctgttggttatttcatcttgctttgtcattaggtttgattctgaatactatacaaactaattttgatttcaagatcttaagtaaaggtttatttatagtacattggaaagcatgtttgtagacatgtattttgtgtttggttcctcaacttgctttgtatatattttataatactaggttgatataaaagtaaatgcagtttcgccatttcagtggcaaaaaccgcgatttcttttgtgccaacctaatgcttaaggatataatctgtgtatattgtatttcagattcatagcaacctaataacaaggatttacaaaagggtttttacttccctacttttttttggctgaaggaaggtttttgtattgacttggtttaacttacaaatcagaactttgaaaccaagaaacattatccttatttctctgctatataatagtaaacctgtttttttccagtgttctttttttttttttccagagaattgggactgaatagtatgaaagtgaaaatggaaataaattaattattaatcatcatcatatcaataa

SEQ ID NO: 5891 - DNA, 272 bp, Homo sapiens
tgggcgctgtggctcacgcctgtaatcccagcactttgggagtctgaggcgggtggatcacgaggtcaagagatcaagaccatcctggccaacatggtgaaaccccatctctactaaaaatacaaaaattagctgggcatggtggcatgcgcctgtagtcccagctacttgggagactgaggcaggagaatcgcttgaacccgggaggcggaggttgcagtgagccgagatcacgccactgcactccagcctggcgacagagcgagactcca

SEQ ID NO: 5892 - DNA, 1628 bp, Homo sapiens
gaaaaaaaattttggctgggcacggtggctcacggctgtaatcccagcactttgggaggccgaggccggtggatcacctgaggtcaggagttcaagaccagcctggccaacatgacgaaaccccgtctctactaaaaatacaaaaattagctgggctaatttcacatctgtgaacattttatcgccttcatcataaatatgaggcacagtcctccattaaaaatttttttttttctttgaggcaaagtctccttctgttgcccaggctggagtgcaatggtggctccctgcaacctccgcctcctgggttgaagcgattctcctgcctcagcctcccaagtacctaggataacaggcacccaccaccacgccctgctaattttttgtatttttagtagagacagggtttcaccatgttagccaggctggtcttgaattcctgacctcaggtgatccacccaccgcagccccccaaagtgctagggttacagacatgggccaccgtgcctggcctccccattttttttttttgagacggagttccgctcttgttgcccaagctggagtgcaatggcgcgatctcggctcactgcaacctctgcttcccgggttcaagtgattctcctgcctcagcctcctgagtagctgggattacaggcttgtgcccccacgcctggctaatttttgcatttttagtagagacggggtttcactgtgttagccaggatggtctcgatctcctgacctcgtgatctgcccacctcggcctcccaaagtgctgggattacaggcatgagacaccatgcccggcctccccattttttttaattagaaaatccaaaaacaattttttgtcagcttgagtacacaaacttttaggactataaatggaatggttgaatatcttcttatagcacttagttattaatttactcatatcaagtatttttcaatgtatggatttagaaacactttttcatctcattttattaaacatcagttttcagagcacagttatgtttacttccatttaaaaggtttatgagggtctgggtacggtggctaacgcctacaatcccagaacttttggaggccgaggtgggtttatcacctgaggtcaggagttcaagaatagcctggccaacatggggaaaccccgtctctactgaaaatacaaaaattagccaggtgtggttgtgtaggcctgtaaacccaggtactcaggaagctgaggcaggaaaatcacttgagcctgggagatgaagtttgcagtgagccaagatcacgccactgcactccagcctgggtgacagggtgagactctgtgtcaaaaaaaaaaaaaaaaaaaaaaaaggctgggcgctgtggctcacgcctgtaatcccagcactttgggagtctgaggcgggtggatcacgaggtcaagagatcaagaccatcctggccaacatggtgaaaccccatctctactaaaaatacaaaaattagctgggcatggtggcatgcgcctgtagtcccagctacttgggagactgaggcaggagaatcgcttgaacccgggaggcggaggttgcagtgagccgagatcacgccactgcactccagcctggcgacagagcgagactcca

SEQ ID NO: 5893 - DNA, 1366 bp, Homo sapiens
atggtcttaatattatctttccacgaaatggatatatttctagaaaatatatatttactaccataatttctaccaccacccccattttgctctgcattatacacagtagagaagaactgaagacactgctgtgacagtattgcagtccaaggcatcatgtgctcttggtgggatactctgattatcagcatcaacagtactttactgagcaagactttgaaggcctgagaagagagcaaagttatggaaagtatttaactcttattttatattgaacaaacaaggtttaatcatgtcatacatttttggttttctaagcagagactaatacaaatgcagccacataaaggcagtgtactgggggtgggagggaaggaaacaatcacataaaatcagctgactcaaaattgaggatagttaataggttgaaagggaaaaagtatgttgaaaatttagacataaatgaaccaagaatattccttatctggtgatgattaaagttaggaaaacatacattttttattttttaattagtagctgctatcagagacattatagcacagtggttatgagcacagattccaaagccagattacctaggttcggagacccgcttctctacctactactaatagttgggtcatgttgggccggtgacccaaattctagccttcattcactcatctgtaaaatggatataatgatagtacctactttataggttgttatgagaattgaatgaaatgaaagcccttagtttctgacacatagtaatcttttatataaatgttagttactattctgataatgatgatgctgttggttatttcatcttgctttgtcattaggtttgattctgaatactatacaaactaattttgatttcaagatcttaagtaaaggtttatttatagtacattggaaagcatgtttgtagacatgtattttgtgtttggttcctcaacttgctttgtatatattttataatactaggttgatataaaagtaaatgcagtttcgccatttcagtggcaaaaaccgcgatttcttttgtgccaacctaatgcttaaggatataatctgtgtatattgtatttcagattcatagcaacctaataacaaggatttacaaaagggtttttacttccctacttttttttggctgaaggaaggtttttgtattgacttggtttaacttacaaatcagaactttgaaaccaagaaacattatccttatttctctgctatataatagtaaacctgtttttttccagtgttcttttttttttttccagagaattgggactgaatagtatgaaagtgaaaatggaaataaattaattattaatcatcatcatatcaataa

SEQ ID NO: 5894 - DNA, 9321 bp, Homo sapiens
gctcccggagccctgcctgttccctgtccatccaggccagcagctgaaggagcctcacctgcctcccttctctgagtagcacggatttgaggtaagaaatcccccagaacccccattcccagtgcagcctgtggcagagatcggtccagtgtctcctccgactgccttagtgcccgctaaacgtttggggaggggagagctcggtgccaaactgctctcgtgtggggcaagtgctgagttaggctccttgggggactttacctcactgggccctgcttcctgggttctgtccttgcccttcagcttccaaacagggaagagcaggtgactactgagaggtgaggatggtggctctgggctaggtggccctgggaaaggtgggggatccccagtgcctggaggcagacccttctgaggatggtcacacgccttgtgcagcatcttggccaccccacagggctgaaggagaaggaacctggctgggagcttagttcatgtctgggttttccctccatgtccaggagaagcagcgaagatgtccagcgagcctccccctccttatcctgggggccccacagccccacttctggaagagaaaagtggagccccgcccaccccaggtagggggtcactgttcctgaggctccatattgcagccccctgccgccatggcatggttgggactctctaagtggtgatgcccactccagggttacccctgggccccatctgtgtcccaaaacagtggcctctggtcgagctcatcgtgcagaggctccagctcagtctcctctttctgcctctctctgtccaggccgttcctccccagctgtgatgcagccccctccaggcatgccactgccccctgcggacattggccccccaccctatgagccgccgggtcacccaatgccccagcctggcttcatcccaccacacatgagtgcagatggcacctacatgcctccgggtgagtggggaagggatctgaggggagcatggggaactcctggctgctgtctggcctgcgctggctgtcctcagtacaggtgggcatctgctgtagggcagggactccaacacgcccaaccagcccttgcctagggctcaggctgtgtgtggacagggactgtggacgtgggaaggtgggactgctcttattcaggctggtcaggaagggctggtccttggcacaccaggacctgacatgggtggggaggggcgccttgtgtgcaggagaggggtgggtgacccgcaaggctttccctctcttggtcatgggcttgaggctgagtgccctgtccttgcatgctggagacagacagaggagcagagggaccgggccatgtgcctggctctctgccacatctgtcatgggccccaaggggtggggaccaggaagggctgggagaatgtggccccacttgacttagggccccagctgtaaggcctcccactggcccgttaggagggcggtaggaggtctgaggcgtagccttgcacgctgggcgctgtggaccgtggggctttgcgccaatctctttgtctggtgcaggtggcaggccagtgacctctcgcctccatcttctgtgccattccaggtttctaccctcctccaggcccccacccacccatgggctactaccccccagggccctacacgccagggccctaccctggccctgggggccacacagccacagtcctggtcccttcaggagctgccaccacggtgacagtgctgcagggagagatctttgagggagcgcctgtgcagacggtgtgtccccactgccagcaggccatcaccaccaagatctcctacgagattggcttgatgaatttcgtgctgggtttcttctgttgcttcatggggtaggtggtgtgggcactggtagggtgggggctgcaccagggtcaactggctgcctctgcctcctccgcagcaggcctcagcctgttcttccctgtctctgattcagatgtgatctgggctgctgcctgatcccctgcctcatcaatgacttcaaggatgtgacgcacacatgccccagctgcaaagcctacatctacacgtacaagcgcctgtgctaacggagctgggactcgggactcccccgcctgtcagtctggccccctgtgctttgctccctgtgctcagtggtcactttcccgctcccacttggggctgggagccgtgccaccatcccctagaagtcctgtcctcttcaccctgccctacctgagccgctgactcttctggcaaaaattctgttgggatttaaggccaagggtcagtgggtggcagggggctgacaatgagcttgtgtgttgttggtctgcttggtgtgtgtgatcgggaagataagctgggaggggtctcctgctggggtcctgatgcctctgtttccaaacaaggtacaggttcagtccagactctttccccctgggaccaacagcagccagagcagttagccagttagtccccaggcctgtggccacaggcgtttctgacctgctgggccgagaatgggtaagttgtctggagtcaggtgggcccacgtaggacagggtcacaaagcctgggtttgtttctgggtactttgcgcctctggggtgctagaggtggggcatggtggctggaagtaaaactgccaactctggccctcagaactctcaggtatagaagcccaggatgtctaataccctgtcccagtgcccgagagctgcctggtgtcaggtagagaggacactgtacctgggtgaatgatcagaccctggtagctaagaaggaacttgtccctttgagtcagtgtgcagaccccctttcaggccatgcctctgtgaaccctgtattgctggggccggaaggagcccctgagcctagccccttcccgtctgccctgtgtcctcactgcgtgtgggtatgacctctgcctggtggctggtgtatcccaactgggcaagagatggcagagggtcccccttgtgggtgcgcttggatgtgcagagccttctccatggattttcttccctgtaagtgccgggcccctcaccccagctgacaggctgttgctgtgcctgctcacacctgctcctgcaggcacactgggctagggacgaggaaggagcagccacaagtggtagaactgccttggtggacaccagcctcgccctgtctttatttcctgaatggtttgtgaacttgctcacctggaccactgtatcctgccactgtccttcctggtctcgcactgccactgcatggcctcctgtcactgtgaatcgtggcccagtctcagtttgtagtttctcattaaattggccctttcactcccccgccctgggcctctgctctcttgcctggcttccttcttttttgagggaaagagggtggggctgcaggcagtctactggcaggacgggaggctgagtcctcagggtctcacaccctcagtgctgatgccatgccaactgcctgggacaacaccaacacgtaaggacctaattaaaccaaaccagagtcgggtgtagaccagccctgggatttccagctgtgactgggccagggcacacgttggtctcggcagtggctgtaaggtcaccttccttcctctgatgctggtttcaaccatctatatatggcatccacgcatgggatctgcaagctggagccctcctacccgcaggcttgagcacagcatcatccagccctggggaggcgcacccttaagcaacacagactgggctgaggctgacaggcagaagactaacagagcgcagtctgcacacgcaggttctgggcgacctctggccctggccatctctgcactaactcatctgaattatgaaggtggcagtcttggtcagtagtttaaagagtttccctactttttaaccctttttgaaataaaacttttacaggtagtagattcctattaataaaattatttaagttcatgtttctcttttagagaatgaattgtttaaatacaaatatgtgcttttttaaaacccttatttttaaatatatatatatattttaaaaaaaccttttaagtaggaaacctctaaggtatttctgagctaaaaaatagcagtgctggatacactttaaagatctttgcaagacggttagagtgactttgctttggagactagaggtgctggagagtagacccagagcaggaggtggctgctgggagccatgatggacgatgtccactccccacacagacataacatgcccttgcttctgagggactctcctatggggaggtggcttgacccacccggtgccaggaggcagggaaggaggtagcttgcaaagcccactttattgagtgctggagcatttacacagcgcggaggaggagataagctggggctgagcaaaccgcacccaaggggttagagggattctgggtgagagggatgagctcccaaggcctctgaggcttccacccacacccaccctcactcccagggtccaagagaggcccagaagttgtacagcagcatccagcaaggccccctcgcacagcttggacttacaggccactcacctccaacaggggagatagtcacccatgtactgcaaaaacagggactaccggaagcagcctagggcccagaagtgtggaagcctggagtagagctgggtcgggggccaggcttgctgcactgtgccgactgctcccagggtgacggcctgtgcccagtgcggaatatggcccatagagaggatgctgtcaggcagaggctctagcatctggcttttattggttgcctttcttaaacccagcattttttaaaaagtcacctgaggtggtagtttagtcagggctggagaaaggggtaggccagtggtcagtcgggaggagggtaccggtgtggcatgatgggtgcttcacatgtagtaccaggccaagagtccagcagctagggccacaccagcggccaggatgaactggaggctgggcttcctcagcacagccatagctgttcggaagggacagctgctgccctccagggcacctgtgtggcagcaccaataggagacatggcatcagtggagtctcctgctacacctgccccaggaggggagctcaggacacacagacctacctttgtcttgttcagcagcgtagaaagggcatttacgcatgtctcctttcccatcgtgtacagggaacccatcctccaaggtctctctggccagtgtggagccggcctggtccagttcattgaatatctgcaggagcagaggatcgactgagccatctttgggctgcccatactttttttttttttttaaatgtcttttgagatgaggtctctgttgcccaggctagagtgcagtgttatgaacatggctaactcactgcagcctcaaactcctaggctcaagtggtcctcccaccttatcctcctacgtgtgtgtaccaccatacctggctaatttttaaattttgtggggagatggtgtctcaccttggttgcccaggctggtcttcaactcctggggtcaagtaatgcccctgcctcagcctcccaaagtgctgggattacaggcatgagctactgcgcctggctacactctccttttagaggacgccctccagagagagtgagctggagcaggtgagcttgctcaggtgtgccaactacacagcaagcagcactggtgggcggcagctgcactgcctgatggtcttccctccctagcaagagctctggggaggtgtggatattggtaccccaagaaggctgccaaatgctgggtctcccctgggaactgaccagagatgtagccttctctgaggtggctcaagccactgaaactaccacagcacagacaggagggcatgagtacatccccatttctaggtgctggttatttttttatcaagaagcaacagaaaacctggaacatgggagaatgagactgtggcagggcatactcatcctgagtgccctgggaggcctcagtggaagctgacaggacctggggacagagtaagcttccccaggttcagcctcatctaaaggctacttgtaaacagagcttatttactctccttggtggcactggctctctattaacttataaagcagggcttctcagagcaaaacttgaaaagaaaattaaccattcttcaagaccagcatcctgcaatgagggaggaagccagctccattcttccagacccctctatgtgcgagaggactcacccttcccaaaacactacccactggcatctatcacaccaggcctccatgctgggaaccacccactgggcccacaagctctggtggccaatctggtggccaccttcctctcggcaccctgcagctcatctgtcctaatgccatgtgtgccttcatgggccactatggatctgctaccactgtcaaagtttccctcttcagccctagcagctggcagcccccaatagtacctgcatgttatactcaaaagccttgttggcctcctccacgatcctctctttggtcttcatgttcaggtccagggcgttcatcctggcccggtagagctgcttgaactgctgggcattgtccacattctcaaacaggtagaactgggtcccttcccctgtgctggggagtttcagtgctcgctgggccaccttcttcagcacctggccccccgagagatcccccatgtagcgggtgtatgcatgggccaccagtagctccggctcgttctgccctatgtagtggatccgctccacgtacttctgggcagccttggggcactgcacctgctcctcccagttttcaccaaagaaatactccatgtccttggtcagcgcctccttccggtgcagctccatggggaagtacaaaggggcaaaggctggatggtccttgttgcgctccatttcctcctcgagggctgagtatgtgaagtaaagtgccgtggtggccagctgtggaggtgacaggaggaggccagctatgcctgagcacaccacatccgagcagctggatgcagaggctcaagtgacaacccccaaccccaaagacccaatcctatggtccatttttatgtagtgaattatttaacacacaaggaagcttttgtttcttaaaggaatggcatggtgaagtctttggaacacgcatacttttgcttccttcacaccactatgttattctatctaagccatgagaaccaattttttttttttttggcggggtaaagagtctcgctctgtcacccaggctggagtacagtgggacgatctcggctcactgtaacctccgcctcccaggttcaagtgactctcccacctcagcctcccaagtagctgggagtacaggcacgcgccaccacacccggctaatttttgtattcttagtagagacagggtttcaccatgttggccaggctggtctcaaactcctggcctcaagtgatccacctgcctcggcctcccaaagtgctgggattacagacatgagccactgtacccagccgagagccagagcttaacgtcaagaaggaatggagtgtggagaaaagcccagcttttccctcagagtggctccaggggcacttttctcatgggaccaaggcccccaccccaaccccatatgacagtctggaacccaatgcggggcacaaaccttaaacagctccttcttaatgttgcctttcaagaagtccttgacaaactgggtgttttctgcccggtcgtgtgcttccttggtcccttccttcaggagctccgagaggtcagccattctgtggagagatgggaggtgtttgtgtgtcaattagcccttcccagctttccagaaaggaccatagagagaagattgagtccacaccccaaggtgaccacctgttgtactggaggctggggcttctcagacacttcactccaacacaaatagcagcaacttgtcagggaacacaggacaagcagacatgacattctgctccaaggactcaggacacaagggataactgtggcctgctccttgagagtagtacccacgtccatgtgtctgtgttgggaaccacccaaatgagcaatgctttgcttctgtggccacctagtggtcgaagagacacacatctgtattcccttcagtatttgctggcttctctaagaacagcctgccttggaacgtgtcttctggaattcacacacctcagtaaggctgtgaccatgggtctcctcagatggccctactgccttcctcccaccttggacccacagcttctttgagactatatgtgactaggaccaagcacggaaggatgcaaaggagacaaccgagaggctagggccaggacgctgggtttgtgctgcttaacgaaattacacagttgtaaaggtgtgtggatggatggacaaggtagaaaacatgtgatcctaaagatggtggtacttgggcaggggcttacatgtgtccacacaatccatctacaagagtgagaaaaatttggccttatcatggtctggcttctgctgtcttctttaggagattagctcgttatcatccatgtgctgagaatcaatttattattagcaattatttcaagggataaaaaaaaaacttggccaatgacagggctatgagaggctaatgatgcagaacagggcctggaagctcaggtttagcatgagctgtccctatacagagtaaggaaaggctgccctgcagtcttttatgtggtaaaagactgaacagagccagctttgcctgcgtttaccctttctcagcccagatgaggaaacgcacaagtttttaaaaagaaaaaaggataactaccatcaaatcctatcagcactcccaggagcacctgccctgcctccttggatgagacaatggaccagtggggagagttctaagcagccgaagctgtatgcggtccctgcagggccaagcaggcacccaggggtccagagctcatggcccatggccactccccagtgctgccaacagacaaaaccaggtgtgctgagcacgacaggtgctgggcccacctgattcagtgcagccagcccccatcgctcacctcatttggttctccttttctagggccccagagttctttttttctgactcgtctaccccctctgaggtttccacttccgctgacattgctgctgggtgtggttcttgctgctctcgctcctctggtcctgcagagacacaaggagctggtgatgtggcacccacggcagtcacttccccaaatacctgtcggttctgctttcctcagagcgaatgtaaccaaggtgacacccacacaccccaggattgttttctttaaaataaagc

SEQ ID NO: 5895 - DNA, 1236 bp, Homo sapiens
taaaaataagttttattgacataatttacgtaccattcaattcacccatttaaagtgtacaattcagtggtttttagttattcacagaatcgttcaactgttgctacaatcggtttcagagcatcttcgttaccccagaaggagattccatgttccccatttcccctctcccccagacctaaacagctactaatgtactttccgtttctatgggtttgcctattggggacatttcatataagtgaaatcatacagtatgtggccttttgtgtctggcttctctcaccaagcatgttttcagagttcatgctgtagggtgtcagtgcttccttcctttttatagccgaatcgtcttccattgtctgggcagcctacggttttgtttatccactttgttgatggacatttgggttgtttccactttttggctattatgattcatgctgctgtgaacatttgtgtacaaatttctgtgtagacaggttttcatttcttttgggcagataactaggggtggaattgctgggtcatctggtaactctaggtttaaccttttgaggaactgccagactgttcctcaaaaggggaacaggggctggcagttcttcaaaaggtttgcaggggctgtcccctaccagcagtgtatgagggttccagtttttctacataatgcctattactgtctttttaaattttagccatcctagtagataggaaatggtctccttgtggttttggttttcatttcccttatgaaaagacgctcagtagtttttcatgtgcttttggccatttgtcttttgagaagtctttgttcaaatccttttaaaaattgggttgtctttctgttattgagttgagttctttgtatttcttaatacaagtcctttatcagatctatgaattataaaatgtgatggtatcctttgaagcacaagagtttttcattctgatgacatccactttaagttttctttcttttgttgctttgcttttggtgtcatatctaagaaaccactgcctaatcgaaggtcataaagattgatgcctgcattttcttctaacagctttttgatctctttcagttttcaaacttccatggtactttatagttgaacccaagagcttggacttggttcctctggccctgcccctgatttgttaaactttatattcaaacttatgtgccctccatcccctgcaggtgctgggctgtctgggaaacactcctttccc

SEQ ID NO: 5896 - DNA, 771 bp, Homo sapiens
tgctaatcaccctatggaaagaataataaagcatggaatgaacaagcaaatagcaagagctcttcaaagaaagttgtcattaacactttacagagaatagaggtaggctcccccaggaaaagtttgcataaatagccctggagcagctgagaaagaggaaatgaatgacattcaattaactcctaatttgctgttgcagtttctcctgaactgagttcactccagaatttaccaagggatcaggctgcttaagaactaattacaatgaattctccatgagcctgctgacagtctgtcctttctatgtaagtcctggggttgttgccagccaaaaaaccttaggcaaagttgtcttcttttagtaaaggttttccagcctccctttaatttttaccaagaaaagcacagcatatcaaggcgttagacagctttattatttctcttaatgtcaagttatcaaaccccttagaagcctggagagagaggcaggtcatggtggctcacacctgcaatcccagcattttgggaggcctaaatgggcagatgactcgaggccaggagttcaagaccagcctggccaacatgttgaaaccctgtctctactaaacatacaaaaattagctgggcctggtggcgcatgcccataatcccagctactcaggaggctgaggcaggagaatcacttgaacctgagaggtggaggttgagtgagccgagttcatgcagcctgggtgacagaataaggctccatctcaaaaaataataataaaa

SEQ ID NO: 5897 - DNA, 771 bp, Homo sapiens
tgctaatcaccctatggaaagaataataaagcatggaatgaacaagcaaatagcaagagctcttcaaagaaagttgtcattaacactttacagagaatagaggtaggctcccccaggaaaagtttgcataaatagccctggagcagctgagaaagaggaaatgaatgacattcaattaactcctaatttgctgttgcagtttctcctgaactgagttcactccagaatttaccaagggatcaggctgcttaagaactaattacaatgaattctccatgagcctgctgacagtctgtcctttctatgtaagtcctggggttgttgccagccaaaaaaccttaggcaaagttgtcttcggagagtatagggggtccagcctccctttaattgtatccaagaaaagcacagcatatcaaggcgttagacagctttattatttctcttaatgtcaagttatcaaaccccttagaagcctggagagagaggcaggtcatggtggctcacacctgcaatcccagcattttgggaggcctaaatgggcagatgactcgaggccaggagttcaagaccagcctggccaacatgttgaaaccctgtctctactaaacatacaaaaattagctgggcctggtggcgcatgcccataatcccagctactcaggaggctgaggcaggagaatcacttgaacctgagaggtggaggttgagtgagccgagttcatgcagcctgggtgacagaataaggctccatctcaaaaaataataataaaa

SEQ ID NO: 5898 - DNA, 771 bp, Homo sapiens; identical to SEQ ID NO: 5896

SEQ ID NO: 5899 - DNA, 1489 bp, Homo sapiens
gaacataatttaagtatatagttcagtgaattttggtaaatgtatataccatgtgatgactacaccaataaaaatagtgtgtgtccatcaccccagaaagttcccttgtgcataccccacttgtagtcaattttcctattcctgccccctgctgtaggcaactaatgaaatgctttttatcactatagattaattttgctgcttcttgaactgtatatgtatagaattttacagtatgtactcttgtgtctgatgacttttgcccagtttaatgttttgagatgcatgcatatatcagttttactttttttaattgctgattattattatgtgtgaatatacaagtttatccattcacctattgatgaatattggagttgcttccagttttaggctactgtgaaaaagctgctctgaacattcatgtgcaagtgtttttgtggatatgttttattctcttgggtaaatatctaggaatagaattttgggtcatatggtaagtatgtgtttataagaaactgatgttattttttaaattggctatataatttttcagttggctttatatttctactaggagtgttccagaggctcctcatccttgccaacgcttggtattttcagtctttttagccattctactggagcagtagtattttattgtggttttaattagcacttccctgataactaataatattgacccatttcccatgtttctttttattatatgctttattttgtgaaatgtgtctatgagttttttatatattctaggtacaggtactttacaaatatttcccatttcttaataatgataccttggaagatcagatggttttaatttttaggaagtctgatgtatacatttttctaggtcactaattttgtgccctatgaaaactttatgtaccccatagtcaagtacattttttcctatgattttttaaattttataattttagccaaatagttatagtttttatgtttaggtctgtgattcattttgagttaaattttatggtttaaggtagaggtttgaggttcatgtttttttcctccgttttagttgttctgtagcagcatttattgcaaagatattctttctcaatggaattatactggcaatattgaaaatctgttatctggactctattctgttccattgatctatatgcattttctttgtatcattaccaccttgtcttgactactttagctttgtagtaattctcaaaatcaggtagtgagtccttcagctttgttctttttcaaaattgttttggcttatatctttcttatataaattttagaatcagatcatcagtttctgcaaactgagattgtgttgaatctgtagatcaattttgtgtcttaacatcccccagcaaagttagaaagccaggcagtaatatcagagggcacaagcccagattgaagctggaagacatagtgctccagaaaggtccttccaaaaaaaagaaaagaa

SEQ ID NO: 5900 - DNA, 151 bp, Homo sapiens
cccaaagatgaggcagcccccaggttagtttatttcatcagttcagggatctagtttctttctgttctgttccgttctatgttggctgccatcttggttgcaaggagatccaggcaacacatcttcagacaagatcctaggctagaagatg

SEQ ID NO: 5901 - DNA, 1130 bp, Homo sapiens
tgagcactgtgccttgtgtcagtagtcagtggtgttcctttagtccttgttatgttaataaaaaagctttggtttttgcaagactttgtttttagagattctggaaaggaacatattaaccaaaaagaagagctgacttcaattttacttgtcttgaaaataactgactactaaagggatgtcagggaacattagtgaaaatggagaacttaaggagttaaagttttagctgtttttttcaaaggatattgtccttcaaaatctttaccttgcatttttgttactgtgatttaagatggttgtaattatcattgattgatgatacctatcaaaaggcaaccctaaccaaccatttctgctggattctgaatgccgagaaagaaaaactgagaaatttgtgaactattacaagtcgtctgtaaaatgagataataatatcaacttcacaaggtaatttaggctttcgtgaaaactagagtgtgaaaatgcttagtaatgtgctgggcacactgcaggtgctctacaaataactactgataactactttttttcatgagtaattgtacattttctttcttccttcctttcttccttccttccttccttccttccttccttccttcctttcttttcttttcttttcttttctttcttttctttctttctttttttgttttcttttgttttgagacaagatcttgctctgttgcccaagctggagtgaagtggtgtgatcttggatcactgcaacctctgcctcttgggctcaagtgatcctccctccttatcctcctgagtagctgggacaacaggcgcacatcgtcacacccagctaatttttgtatttttgtagagatggggcttcacttggtgttgaattcctgggctcaagcgatccacccacttcgacctcccagcgtgctgtgattacaagagtaattgtaaatttaaaatgaatttctttcccatcccaaaccagtatcaaaatgcaaatatagtaaattactttttaaaagagagatgtttaatggcagttgttggtagtcttttgagtctttaagtgggtatattatagaaaaacaacatatctctgcttggagggaagatttaactaaaaacaagaaaaagaa

SEQ ID NO: 5902 - DNA, 1111 bp, Homo sapiens
cagtagtcagtggtgttcctttagtccttgttatgttaataaaaaagctttggtttttgcaagactttgtttttagagattctggaaaggaacatattaaccaaaaagaagagctgacttcaattttacttgtcttgaaaataactgactactaaagggatgtcagggaacattagtgaaaatggagaacttaaggagttaaagttttagctgtttttttcaaaggatattgtccttcaaaatctttaccttgcatttttgttactgtgatttaagatggttgtaattatcattgattgatgatacctatcaaaaggcaaccctaaccaaccatttctgctggattctgaatgccgagaaagaaaaactgagaaatttgtgaactattacaagtcgtctgtaaaatgagataataatatcaacttcacaaggtaatttaggctttcgtgaaaactagagtgtgaaaatgcttagtaatgtgctgggcacactgcaggtgctctacaaataactactgataactactttttttcatgagtaattgtacattttctttcttccttcctttcttccttccttccttacttccttccttacttgcttgctttcttttctttgcttttcttttctttcttttctttctttctttttttgttttcttttgttttgagacaagatcttgctctgttgcccaagctggagtgaagtggtgtgatcttggatcactgcaacctctgcctcttgggctcaagtgatcctccctccttatcctcctgagtagctgggacaacaggcgcacatcgtcacacccagctaatttttgtatttttgtagagatggggcttcacttggtgttgaattcctgggctcaagcgatccacccacttcgacctcccagcgtgctgtgattacaagagtaattgtaaatttaaaatgaatttctttcccatcccaaaccagtatcaaaatgcaaatatagtaaattactttttaaaagagagatgtttaatggcagttgttggtagtcttttgagtctttaagtgggtatattatagaaaaacaacatatctctgcttggagggaagatttaactaaaaacaagaaaaagaa

SEQ ID NO: 5903 - DNA, 541 bp, Homo sapiens
ttacatgttatcaataaaagtagcattttaacaattatcctttccacattatttgataaatgctattggttttgtctgttatttttataaatatataatttgctttaattacttaaatgttccttgagccttagaacttaaatcctgatgagggttttactttttaaaatactgaagtttattatttatgcatgttttacagaaaaatgagtggcttttaaaagatcaaaattaaaggcttaaacatggaatctctaggacatataaaatatgagtagaactgtgtatttataagatgttaatgtaagacttcaggccttgtaatatcttaaaggaaccacttcactgtaagggagcagtttgtctttctacctttccaattgtattgagattttgcccagtatgtctttttacttaaacaccttggtgaaagctatccagcatcctgttttaaatctcctttgttgcacttaccataattactttcagatctgtttccattctcagaaactgaaactgtaagctcatgtgagtggggaat

SEQ ID NO: 5904 - DNA, 6511 bp, Homo sapiens
cccgaacccccgggcctggggagctggaggaggtgccaagcgggcggaccaccgaggaggacctgggaggggaagtgttagggtaaacgttgggatcgggtttgtagttacctataaagtgattttagaaacacctgcgtggtggcagttgttgacgttcttgttcatcttttcagtcaccctccttccgtcccccattttttccttccatttgtttttcgtgttttacagtaaaggcatgacttcctggcaccacagggaaaatcgggtgcaagcccagaaactatttccccaccaccacttgttgaaaaactgatttgaaggcatctccggggttgaacaaacggaaagtgccaggatttgatgcgtctctggtttcgctctggagaccattccctgctaagtatcaagacgaaaaaaactggaaactaatccggtaaacatttaaacttgaaaacttatgatgagttttcttttgatctagcaaacgatatgctttttctcttttgttggctaattcctgcactttttaatttcttcatttgttgaaaatgttttcttctattgaaaacacttttgttcttcgggtatgtaaactcgagcatcctctactgggtggaaatttgcctctgcagtaacacaaacagacttcttgaaattacgaaaacattggaaagtataggcctttcacattagcacaaatgattgagcattttatgctataaagaattacatgcttattgtttttgaaatccaaatatttaaagatacaagactttttacatagaaagtaagacttaacgcattacggggcacaaatatttaatatctaccacaactaggttagaaccattaaccatatttggtatagttacctcatatttaccacaactaggttatatttggtatatttaccacaactaggttagaaccattaatcataattggtactgatttgtgagggagtgtaaaacacataccatttacttaaagtataaacgtgtaatggtaagtactagataggaatcataactgtcttctctgccgttgcaaacctgtagcctaacacaatatttggcaaatgagagctgtgcacttaaaaaaaaaaaaaaagtggaaaaaataaaatttattaaaacctagactttatcgtacttttcagaatttctgtggaatgtttaatcttctggatccatgactgtctgatacgttggcaatttaaagtccttttgaaagagagttcatgttacccagctattctctagtatgtattcatggaatactccatcgtttctgattacacttatgagacataattcttcagagcacacttagaattatttctctaacatatttatgcagacagaattccatcttgaattttatcaaattcactttaacttcttaagtcttggttattgtaagagcccaaaggtatggccccagggaacaattaagacttgatgatttgtcacctaccaaaatatgttcattatgtaaaggtttcaatgcccataaggctgtcatttggtatttagtgcagtgctcataaaagtgtgttattaggataaattgagaaattaattaagctgcttctagattaaataaatataaatatttggacaaatattgaagatacgtactttttccatcaaattttaattgaggttctgctgtatactagactctatgttcttgattttgttcttactagttaagtgaagtaagtattaacaaatgtaattattaattttaatgggaaaaggaaacaagtattagagaagtaagactttgcatatcttaacaccttttggaaaacggaggtatacatgcattacaaaataactttgaactgtatattttggctttacaatttaatgtcattgttgcttttagttgtatttggtctggtttttttttgtggtttttcctcagaacaattttggaaactatattcatcttcatatagaattatggcagtttataggcccacctgtttgaaaaaactttatccacagttgtgttcctaaaatcagttgtcccagaattgtgacaggaaagaagctcttttgaacttgaatgcatatctaagttagatgagattaatacaatttatatcctgaatgtaatttatatcctaaatgttgaactgtgattaggtttccctaaataatggtgacatctgggatagtttgagttctttctttatagtctaatttacttgaatttcgtaaaaatcaaggaatggacctgattgcgactggttagtaacttgttctagttttgccttcccttatatatttcaggtaagttaagattaatagacacacagtctactaatttgaattaagttttttgaagtatttgaagtgtttatatactgccttttattgttcattacttccagaatgaactgttgttataatactcatctttgtttcttttgtcttgaaagaaccatatttatttagagtcagaatggagcgatttgtagtaacagcaccacctgctcgaaaccgttctaagactgctttgtatgtgactcccctggatcgagtcactgagtttggaggtgagctgcatgaagatggaggaaaactcttctgcacttcttgcaatgtggttctgaatcatgttcgcaagtctgccattagtgaccacctcaagtcaaagactcataccaagaggaaggcagaatttgaagagcagaatgtgagaaagaagcagaggcccctaactgcatctcttcagtgcaacagtactgcgcaaacagagaaagtcagtgttatccaggactttgtgaaaatgtgcctggaagccaacatcccacttgagaaggctgatcacccagcagtccgtgctttcctatctcgccatgtgaagaatggaggctccatacctaagtcagaccagctacggagggcatatcttcctgatggatatgagaatgagaatcaactcctcaactcacaagattgttgactaggaggttaccaccattgtgatcaagataaatgtggagtattaaagttatgtgttgattgtgtggttcatttttgtatttatttcatttaaaatcatgtgacgcagaatagttttgcaatgtgtatatagttgcaggcaaaaaaaaaaccacctcactgcaaaacttattgttaattttagtcaccaatggtataaagcaaaacctaggtttagagtgtgctaggatacctgaaacctgatggttatctttaaaattaatggtttttctcctgaaatgtttgtgcatggaagaactgccctgcttttttaccctgttgccatgtatgattattccttgtgagattacttaattacttggattgaagactagcctattgaagctgctgccaggcaacaccacttaacagtaacttaaaggaattattttctttagaggatcctcttcaaaaaggaagggagatagtggaaaactgttcttatatcttcagatccctagcagaaatgactgtttatttcaaactatgttttacttgtatatgatgtagtcaccttaactatctttcaattccatacttcccccgcccccattttaaaggcttattgttgtattttgtagcagcttcaagtgaccaaaagactaaaatctttcaacgtcaatgccaaaagccaaggggaattttgcagtgacaggattttagtctcttactatgaatactaatttcgaaccatagctttcattttaagcatcatcttgaatttctaaacttttttctatgtcttggtgttaaaagatttcaagattggcatttttacttaaacagacattttatggttgagttttctctttattatagagaattagtaatttttttttggctgacagatcagataaaattactttctattcattaatttttctctacaactttatgagtttatttaggtgaatagtctagactagaaacaagtttactttatctgctttgcctctggtggtacaaggtttttaacatggatggtaaacaattgtctagaaattctggcaggttttttgtattggagatctggcagtatcctgcataactttgggtgaggaaattgttctcttaaagatcagccatgttcaggaaatgatctctgtttgaacctcactatcctgtaaggttatccaagtagcttagcccagctaagttctatcagagacccaaattatattttttaaaaatttaacagctggaaacttggactagagctttaataaaaaatcttaaattctttgaaattcaagttaaaaatacttatatatttctattacaaagcagtgacaaatgatgccctgtgtgacttggagttatctttgacttttaccacaaatcttcatttataaaagaaaaagccaaagtgaaaaaaagttagattgtgtatttttcagtaacagctttccatgtcttaagatttttttacagacttaagtttctaattcaggttgtcaaactggccatttgacttcagagatttgttttcattaaaaaataagcctgccgccaaaataaatcacttatcaaaatgtgaactgttttcctcatgttcagttatgttaaagtagtatgataaatgcatgcctagagtagtgctctcgttgatgaagcacatgtatgaggagaccagcagcaaaacataaccatatgtgttttgcgtttacttcctctagaaaagaatttgcaggcaaccatgtttaatttgaactatctaagatggtagattttagaagctaggaataattgagttttatagcactattttcagaatacgaaaagatacacaatcattctgttttttgaaattccatgtgattcaaactgctccctattatttgggtattaatttgcactaatagcaaaatgtaatggcagatcagctttgagagtggtcctaagcagtaaactggatgatgttgcattagaaaaacatcaataattcatatttaagttttagtagttactactgatttgataatcacttaaattttatatatcttaatgtattttttcagactcctaattaattcccacattcactgtaactaggggcatagtccattctgttaggattatatcctctccttagaaatgttttccatcctgttgtggggatttggtattaatgtttcttcattgattatggaacttttgttccctgaagctagttaactgtgtctaaagttaaataaatacagcagaatgattgttttagcctgctcgaactgatacaaatccctgaaaccatgattggcatatgttagataacaaatgaggatgtctaagaggcatatgctgctttggaggtgtagtgaacgtgtgtacagaagttttcaatcttaactatatagtgttagtgtgatgctatactattggaaaaatagcagcttttttctattttataagttgtatgcataaacataagatttgtaatgtttcatttataaactgccttcttcaacacatgttaatagtgttttctcaaagtattgatagtatgtcttccagaatttcacaatatgcttacagtaaatatttcctagcttgttgaaatgttcaattctttgttggctttcttcttgattctgtgggggtgtataacaagcctgaaggacattgtaatcatttcttacaaggtgaaaattaagaaagattgtgtatgagagcctatatagttgttttatccattatcatctttgattaagactttaaaaaaatgctatttccagttaatgcatttggccctattgaattttcagggaccagaaaacattaaaaagttctgcatcttataatggtaaccaattaagcttgagattgttctgaaagtatcaattgctttaaaactgttgtaagtacagttggcaagatctccaagctgaaacttccacgttaaaacttttgcctgtaagaatttgcacatgaatgttaatggaaaacacaaaactaaagatggcccaaaacaaaagccacaaacagttcatcatttggtgcttagtctttgtaagggctctctgtggtttgacttaccccagctaccgttaaatgaggacaaatcaccttaaaacatgttcatttgattcataacaaggaaaattgggtctatgattttttgccaatcttagcctaaaagaaattgctttagcttctggtcagcactgattaaaatgtgaatagtgaagtggctatcctaaactggtttatctccacccacactatcatagatttcttaggtaaatacaattcttatctagtggtattctacttgtattcagaatactgtattaaaattttactatttcatttttgtattctgtgcttattttttttgctcacgcatgtatgcttagtataaatgtgtcacttctaaagttttgtctctgacttttagaaataaatttcagaaaaattgtttcaaaagattttgaaagcacattttgttttgtgagtcaatgacaaatatatttcctgattacaaaacagcagaa

SEQ ID NO: 5905 - DNA, 7424 bp, Homo sapiens
aaaaaatatccaaagtagggttagtacaggaaatttgggccattcacgagtaactccatattgagtgtgtgccaggcacagtcctaggcagtggggtccaggggacctcgctctcattgaagcgaggctggggaggggctggagctgggagtcacggagagatcagggaccagcgcgtcatgcatgggaagagggaagaaaaggagctgggaggtccctttaaaaggctgggcctggtggacggaacttcggtgcgacgctaaagtgtgcgcccgggaggatgagtacgctacacccggaagtgtcttcagggagaggaagccggcggcctcactgctatgggccgcaacaagaagaagaagcgagatggtgacgaccggcggccgaggctcgttcttagcttcgacgaggagaagaggcggtgagtggcaaagccggaccggactcccctcgagctgttcttcgcggccaaggccaggtctggggccgagcacgctcccgccgggggctcttccggtcccgccccctggcgtggctagagaacccctctcggccttccagcccgcgttcccgcttctcccttctcggccgccaccttctcccttcttgacctccccacctcgcctagtgtctgtgcgccgccagatagccggaagctcgggtctcagagcagtggcttcgaccaccctagcccagcccagtccatcggtccggcacacagcaggcgcccagccgtggttgataaatgatgagccaatgaaatgagagtggcttaagttcattcattcgctccctagacatttattgggctcctttggtgtgccaggtcccgtatcaggaagcagaacctctgagcctcagcgtctggccagataaataaatggcacatggtagcgggtcagcgaaaagcccagtgctggaccgtgggacaaaatgggaacagagcagctagcactgtggagatgagaaggggctgagattagaccgagggaaggaggtagggaaatgctgggcatcatcaggaaactcctagcgtgcatcaacaggccctacaggcgagtttagggtcaggtgtcctggggacatgggtgttggtccagtgcagggtttccgaaggtctggatggtggtggccctgaaaaccctgttgagagagtaatgaggtttgtaggtgtggaaggggttacctcatgtactgtgtgtggcccccccccccacccgccccacagcctggccctgttgcctgaacctgagatccctggagagtattgagtggaaagaggcagtatctcccttattttcctaaatgtatcctttctctaaccttgggcaagtaacctagactctgtgactcaacgttcccatctgtaaaatggagattgatacccaccgcacaggttattgtgagggttttttgtttgtttttgagatggagtctgtgtcgtccaggctggagtgcagtggcatgatctcggctcactgcaacctccgcctcccaggttcaagcaattctccccgctcagcctcccaagtagctgggactgcaggcatgcgccaccaagcccagctaatttttgtgtttttagtagacacggagtttcaccatgtttgccaggctggtcttgaactcctggcgtcatgtgatcttcccacctcgaccttccaaagtactgggattacaggcgtgagccaccatgcctggccattgttgtgaaggttaaatgagctaatacttacacttttttggaatggtgcctagcacatagtgagcgcggcattagccatttttctcctagagcgagcccttctctccttgtataatgactctcctgtctctgccggcttccttcctgtagggagtacctgacaggcttccacaagcggaaggtcgagcgaaagaaggcagccattgaggagattaagcagcggctgaaagaggagcagaggaagcttcgggaggaggtacgcagggggaaggtgggagggaggtctttgattcttagggcacttgcagccttggatttccctaatagaggcagctgctggcatggggcgatgtgtgtgtgggcaggactggggaatagtttatacaggtggagactctgtgggcccgggtctgggagtgatggaagatggagtctcctcctgatcttgcagtatggatcatggtctccctcaccctgggggtgattaataccccagcctgaggttggactgagaggccatactcactgtgttccctgcctgtgtggtttcagcgccaccaggaatacttgaagatgctggcagagagagaagaggctctgggtaagtggcatgcttggcctgacctggagaacagctgatgggcctggtttatacccttggtgggtggaagggatagaagctgacctccttggccctagggatcttggggggtaccctggggccaggggtggtcctaagcacctctaagtgcaagtggaacagagaccaggagaaggagtcccaaaccccatggttaaccaagcctgagaagagagcccagtttttaaggatggaaaggactaggggtggaggggagggacagcagtagctgtcacagagggtttgtctgacatggggaccagctagagcatgaaggaaacgggatcattcacaacattcatccacagaccaggctctacagccagtgaccttgtggatgcgctccacgtccacagagtagagggggcactgcactccagggcgggagggaggctggagcctggtcactcgttcccgtgactgagaccaggtctgtgtccacccccacagaggaggcagatgagctggaccggttggtgacagcaaagacggagtcggtgcagtatgaccaccccaaccacacagtcaccgtgaccaccatcagtgacctggacctctcgggggcccggctgctcgggctgaccccacctgaggtgggtcccagtctcagccctgggaggaaggggcgtgggggcagaccagcttgtcagggttgctcagtgctggcccatgtcatgggtatcccactgccagccctgggaagaaggggcgtgggggcagactggcttgtcggggttgctcagtgctggcccatgttgtgggtaccccactgctggggctccttccctttggacccttcattccctgcttccggggtgctgcaaagaccagccccactgctgagcggctgaggagcttgggcaggctccttcaccttgcctgcttccctttctccatcagtgaactgggggttgctgatggtggcacctgccttgtgggattggtatgagggtgaaagtggttaatccatgtgagtcacctggcacagtgcccagccctgtcataagtgcttcacaaaaggtagccgtttgttgtgatcgttccctttgtgcgattcgcagccctggcacgtctgtgtgcactaagtgggttttcaacctgtgggttgtgaatcatgagtaggttgcaatcagcataaaaaaaaaatataattgaaaatatccgaaagtgtcatgttaaatattgtttcatgagacagctgtttccactggagttgtatctgggtgtgcctaaggatttatggacatatatgcacacaattacgatataaaacacatttccttgtgtgggttactgtgttcttaagtcctggagccactcccctatcacatccatactgatctcagggccaggcatggtggctcacgcctgtaatcccggcattttgggaggccaaggcgggcgttatcacctggggtcaggagtttgagaccagcctggccaacatggtgaaaccccgtctctattaaaagtaaaaaaattagccagggggccaggcgcagtggctcatgcctgtaatcccagcactttgggaggccgaggcgggcgaatcacctgaggttgggagttcgagaccagactgaccaacgtggagaaaccctgtctctactaaaaatacaaaattagctgggtgtggtgggacatgcctgtaatcccagctactcgggaggctgaagcaggagaatagcttgaacctgggaggtggaggttgtggtgagccgagatcgtgccattgcactccagcctgggcaaaaagagcaaaactccgtctcaaaaaaaacttagccaggcatggtggcgtgcacctgtaatcccagctactcgggaggctgaggcaggagaattgcttgaactcaggaggcgcaggttgcagtgagccacgattgtgccactgcactccagcctgggtgacagagcgagactccatctcaaaaaacaaaacaaaacaaaaccatactgatctcacaccggtctttcattttatgctcactattctgcaagttctgatacaaagacaagtcttgtccccgttttgctaggattttcattcctgaatgtttaagtatgtcctggaagcttctaggggcaggaaagggtttggaaacagaccttcccctgtgtaatccttgctttagggcagatagacttcttccatcagaagccttctctagtcccaacccaggcctgtgatgcagcagggcgcgccaccacttgccagagccatggtggctcggggtgcccagcccaggtccccccagctactgctccatgtaagtcattgtcttgtgcctctttagggaggggctggagacaggtctgaggaggaggcgtcatccacggagaaaccaaccaaagccttgcccaggaagtccagagaccccctgctctctcagcggtgagtcttggcctgctgcctccccggtcccacccctcctggctggcagtagtgacctggcccttagggtggtgtggagcaggtgtagggcccggagcagccctctgcctgtccagtgatcctctgcctctcctcattgccccgtcctgtcccacccacccctgatagtgtctgacctccagtgcttttcgtgcctgggtgaagggcctgtgtctctgagctgagttgctggcaggcactctggaggtagagcaggccaactctggcatgaacttggcggtcctggcattcgcaacctgtcctgacatcccctccgtgagccaggtggtgagtcaccccacaatgcaatcttaaactgaggctttctgccctcccctaggatctcctccctcacagcatcactacatgcacacagccgcaaaaaggtcaagaggaaacatccccgacgggcccaggactccaaaaagcccccaagggcccctcgtaccagcaaggcccagcgccgccgtctcacaggcaaagcacggcacagcggggagtgagaccgagaacgaagcggtgccccagtctaggctgcggggacctgtccttgctcagcttggctgtccctgtagcccagcctgcacctaggtaatgactgcacagctcaaggttgggaagccaggacctctctggcctggggccagctgcctttgcctggggtcagctgcctttgcctggggtttgaattcccgaaggagcaggcagctgagagcaggcctcccccaggaagagccttcagagccacgtgggggcatcttcccaaatgtgcaccccacctggcactcatcagatttgtgcgcttgtgatttgtttgtccttgataccacgcacaagggcaggtttttggggtggtggaaatggccagggcccatgggtctgtctccagcagttagccctgtggctgcaataaagtacagttctccctgtgttaagatcctaaccagggttaaggatcagtgtgtccgttgctagaatccagagcccacctgctgctctgaaaagcaggctcctgaggccagtgggggagcagtgccccccatgcccttcaccgaggagcctctgtgcctgtcccttgtcctcggccccaggagtctcctcaactgacactgaagtggtggaagcagttgagtgccaggtcatcccccatcaccacactggggcagcgtccccaggcttccagcagctcccaggtgggtcccaacgtggaaggattaattaattctttctaaagcagttgcagccgggcttggtggctcacgcctgtaatcccagcactttgggaggcccaggcgggcagatcacttaaggtcgggagctcgagaccagcctggccaacatggtgaaaccctgtctctactaaaaatgcaaaaattagccaggtgtggtggcacacgcgtgtaatcccagctacttgggaggctgaggtggaagaatcacttgaaccctggaggcggaggctgcagtgagccgagatcacgccattgcactccagcctgggcaacgttgtgaccttgtctcaaaaaaaaactaaaaaataaagcagttgcatcttgactcgtacaaaagtagcccccaccagagtagaccctgcgggtgccagctagaactccacaaggggccatgtcttcacactccttccagatggatgagttgatggaaaccctgtcccttccttgtcccagcttgtcagtcctgggcaggagagaatttcaggttgtgccttggttagaggagctgtgttgggtcctaaacactaggaccacaaaggggagtgaactgtgttcccagggcttgctgacgcccgtggactatggagtcaggatgacaggacagtgcggtgaggggcatctgcgacaggactgcgggctctacccgccctgatgtgggagctcctggagtgggggtgagcagtgagccagggtctgcagggctgtcctctctccacagccaacagccaggccttacagtggggcaggcttagtgactgtgcctcagttatgctgtacctgggagtgggcaggccctctcccatgtcaccatcaaaacccactgatgaaggctggtgggagtctgagggctgcacccgggtatggtgagttcccctcagggattgtgctgagcgccttggcctggcttcttggctccgcccacctgctctccctgccaccaagttgtcttccccgggtggcatgtgccacttggctgcctcgtgcctgggcacagtggtgcctattatgggccctccaggtggctctggtgctcagcctgctgtgagcaggaacagctgagtcccaggggttcttgcacacagcagggctcgggtttgaatccaggctctgctgcttggtcgctgcatgagcttctgctgtgctgacctctctggtttgtctcgtcatgtgtaaggtgacaccagatacctacctcttagggctgccccgagactaaaataagaccatgtgcatgaaccacttaccaaagtgcctgttgctctccaggtgtgcctaccgcatgttgccgctgctgtttctgctgggacgtctgactccagttccttctcccctctccagtgacaaggtcatttacaacttacatttacaatttatagtgtttaccagtattaaattctcagccactcctttcca

SEQ ID NO: 5906 - DNA, 273 bp, Homo sapiens
gcctgtaatcccagcactttgggaggccgaggtgggtggatcacctgaggtcaggagtttgagaccagcctgaccaacacggagaaaccccatctctactaaaaatacaaaattagccgggcatggtggcacatgcctataatcccagctactagggaggctaaggaaggagaatcgcttgaacctgggaggcggaggttgcagtgagccgagatcgtgccattgcactccagcctgggcaacaagagtgaaactccgtctcaaaaaaaaaaa

SEQ ID NO: 5907 - DNA, 302 bp, Homo sapiens
ccaggcgcagtggctcacacctgtaatcccagcattttgggaggccaaggcgggcagatcacgaggtcaggagatcaagaccgtcctggctaacacggtgaaaccccgtctctactaaaaatacaaaaaattagttgggcgtggtggcgggcacctgtagtcccagctacttgggaggctgaggcaggagaatggcatgaacccgggaggcggagcttgcagtgagcagagatcgcgccactgcactccagcctgggcaactgagcgagaatctgtctcaaaaaaaaaaaaaaaaaaaaaat

SEQ ID NO: 5908 - DNA, 283 bp, Homo sapiens; identical to SEQ ID NO: 5410

SEQ ID NO: 5909 - DNA, 184 bp, Homo sapiens; identical to SEQ ID NO: 5421

SEQ ID NO: 5910 - DNA, 147 bp, Homo sapiens; identical to SEQ ID NO: 5241

SEQ ID NO: 5911 - DNA, 235 bp, Homo sapiens; identical to SEQ ID NO: 5438
  SITE (230): n equals a,t,g, or c

SEQ ID NO: 5912 - DNA, 143 bp, Homo sapiens; identical to SEQ ID NO: 5446

SEQ ID NO: 5913 - DNA, 183 bp, Homo sapiens; identical to SEQ ID NO: 5243

SEQ ID NO: 5914 - DNA, 196 bp, Homo sapiens; identical to SEQ ID NO: 5463

SEQ ID NO: 5915 - DNA, 162 bp, Homo sapiens; identical to SEQ ID NO: 5244

SEQ ID NO: 5916 - DNA, 100 bp, Homo sapiens
ctgaggcaggagaatggcgtgaacccgagaggcggagcttgcagtgagccgagatcgcgccactgcactccagcctgggcgacagagcgagactcccctt

SEQ ID NO: 5917 - DNA, 193 bp, Homo sapiens; identical to SEQ ID NO: 5245

SEQ ID NO: 5918 - DNA, 153 bp, Homo sapiens; identical to SEQ ID NO: 5246

SEQ ID NO: 5919 - DNA, 211 bp, Homo sapiens
ctggctaacacagtgaaaccccgtctctactaaaaatacaaaaaaattagccaggcgtggtggcgggcgcctgtagtcccagctactcgggaggctgaggcaggagaatggcatgaactcaggaggtggagcttgcagtgagccaagatcgcgccactgcactccagcctgggcgacagagtgagactctgtctcaaaaaaaaaaaaagaa

SEQ ID NO: 5920 - DNA, 280 bp, Homo sapiens; identical to SEQ ID NO: 5522

SEQ ID NO: 5921 - DNA, 193 bp, Homo sapiens; identical to SEQ ID NO: 5539

SEQ ID NO: 5922 - DNA, 175 bp, Homo sapiens; identical to SEQ ID NO: 5554

SEQ ID NO: 5923 - DNA, 279 bp, Homo sapiens
cactttgggaggccgaggcgggcggatcacgaggtcaggagatcgagaccattctggctaacacggtgaaaccccgtctctactaaaaatacaaaaaattagccgggcgtggtagcgggcgcctgtagtcccagctactcgggaggctgaggcaggagaatggcgtgaacccgggaggcggagcttgcagtgagccgagatcgcgccactgcactccagcctgggcgacagagcgagactccgtctcaaaaaaaaaaaaaaaaaaaaaaaaaaaaaaga

SEQ ID NO: 5924 - DNA, 300 bp, Homo sapiens; identical to SEQ ID NO: 5574

SEQ ID NO: 5925 - DNA, 150 bp, Homo sapiens; identical to SEQ ID NO: 5248

SEQ ID NO: 5926 - DNA, 142 bp, Homo sapiens; identical to SEQ ID NO: 5249

SEQ ID NO: 5927 - DNA, 122 bp, Homo sapiens; identical to SEQ ID NO: 5588

SEQ ID NO: 5928 - DNA, 268 bp, Homo sapiens; identical to SEQ ID NO: 5616

SEQ ID NO: 5929 - DNA, 368 bp, Homo sapiens; identical to SEQ ID NO: 5252

SEQ ID NO: 5930 - DNA, 4704 bp, Homo sapiens; identical to SEQ ID NO: 5253

SEQ ID NO: 5931 - DNA, 1090 bp, Homo sapiens; identical to SEQ ID NO: 5631

SEQ ID NO: 5932 - DNA, 7332 bp, Homo sapiens
ccaaggactgtagcaggacaagccacagacaaaacctctcagacacggagctgtagaagaaagggctttattcagctgggagcattggcaagctactgccttaaaatccgagctccccgagtgcacaatttctgtcgcttttaagagctcacaacactaaaatttcacatgaaagggtcgtgattgatttgagcaagcaaggggtacgtgacaggggctgcatgcaccgatggtcagggagaaacagaacagggcagggagtttcacaatgttcttctatagaatgtctggaatctatgaataacatcggtttctaagtcatgagttgatttttaactactaggtttaggccaggcaggcccaggtccagttttgggcctggcgctgggctgcctgtctttgatttcacttccttttttttttaaaaaaaaaaaaaaaaacaggtactgagtataaaacaatatgagagggtctctctcttccctcgctttaactttcggagggctgaaattctttctagccttggttaatacagcaattcattccattctagctattgttatttctcttactataattttactattagtacttacgctattctattattttcttaattttccacttaattaggataacaaaccgaggccgggctcccatcctcctcaagcacacgaggggggcctggcccagcagggagcttcgcctggtttctgagggaattcccggcgggcctttccaaaacatgcccgttcccttccgctaacttcaggggccaagaattgaactttcaccctcctcaagccggtggcgctgcctcgctggcgttcccagcgcgcagccaaccggatgccagccggcggcattaccactgccagcatggggcgcccgcggacctccgactgaggcagctgccgggagccggaagtgtcccgggcgccgggactgcgagggggccgggagttccccaagaccggaagtgtcccgaggccgggagcccgcgggaccccggagcgcgcggggccggaagaggcgggcggccagtggaggtccgcagagtttgggcgccaggcgagacggcagggcttaaagttccgggtgaggcgtgggtcccacaaccgcttggaatttgcctcccggctccgctctggaagctaagaaggggcacgagagccggagacgggaacctgagagcagggaagccagtagccggccggaggagcgcgcggccgctccagtcggaaggagccgttgcagccctgcccggcgtgtggcggggtcagcgaggcccctgcggtgcttcgcccgcgccttccgctccgcactcacccgccctctgggcctcccacaggtcggcgccgccagcggcgggtaccggcccgcagagggagggcgggctgtgaactggcagcacatcgcgttcccgcggggcccccattctgcccaggcagggagcggctgggatgggactgaggtcggtccgcgagcgcggtgccccagagacccggcttctggaagttgccgcggcctgctcttggggcccagaagtagggcggggaggcgcggggtctggagtctgcaggacctggctgcgaatccaaccagctgatttcaaacttttctgtgatcttctgcaagttaactaagtctcagttcctcgtttgcgaaatgtacttaataggcaccccagggtgaactaaatttgtccgcacagactgcagcattgcgcttgggaggcgccttagggggtaggagtcactaatatcactgagttttgacagaaatgaaggtgcattggcaaaggtgtgccccatggccgggcaggttaggaggagggcctggtaatattttttcttaaattgtaaacagccatctggatgagcaatgcattatcaaattatgattcagagaggactatcgctgactactcttttttttgggcaaacctccgcttcaggagcttctggcttgattcctaagtggaaggtagagacctaggccctctgagtcacaactccatctctctgggtgaggactgagctccaggactgctgagtggaggcagaacaattgggatagggaaaagagaggccaaactagatcagaggctggcgtgggcttcagaatctacagactggcacagttaatgcctccgggcccctattgctgcttcaagtttgaccaatcagaagtatctttagcttaagggcggcgtgttggccaatgagactttattgtgaaataaaatgccctcagtttcatttaactgagccaccatagaagagtagagaaatcgagttggccagatgagggagaggccattaagaggtattttagggattgaatgggctgggcacccagaggacagtggcatttggggtggtaatgagaaggaacattaggggcctccgcctccttccgttcctcctgtgctgagtcagtcagcacagaggctgcaggaggtatctctggttggctttggctgcctgtagggggcaccagctttggggaggtcagagggctctctcctgagctgctgtcctgcccacaatcacacctgcctgatgcctgtgaatggccgtctgagtctcttgggccttggtcacttctggcctgccctgcaccgaccagtaactgtgcctgatgactggaggtatgggaattcaccggactttattgttctttgtaggaatcaaagatcaactcccactgaggacaaatggacctgtaattccgggtgtgacgagagaacgagatttaccttcctgaattaaaaaacaggtcattaagcttgggccctgactcttctttgtgagaaggtacagagatggaaaccttacaatccgagactaaaacgagggtccttccctcatggctgacagcccaggtggctacaaagaatgtggcaccaatgaaggcccccaagaggatgagaatggcagcagtgccagtggcagcagcaaggtgcgacagctctggtcagaagactcctgcgaatctggcaagtggagcaggggcctccatgacctgggccaggtcttccagcctaggcagaacagcaagatgggcgggtgtttcagtctgatcatctcttgagcttttagaaggtggaggggctgtgggcgggaggcaaagcgggttaaccctcgaggacaggcacccacttctgcctctgcactggtgagtgccctgccctcagcacacacagagtgggttctccatgtcagccagtctctgatgccagttgtccagaatgccagtctcttcctttacaacaaacatggtaacatcagatgggcaagatcagtggaagggtctgttctgagtggtgcctgcccctgtggacagacctttagggatggacagatgagcagcagctgcagggccagcaagagctaaggagctggggagtgagttagttgaatgacggtaattgccgggggggggcggggggggggtggtgagtctccaggctgcactgtgaagtgggcggggccccagcactcggtgtttccctctctggctcctcctcctctaaggtttcctgactgacagccttcccttgtgactgctgccgtctttccctaagtctggtcctgctttcaggttcctctcagtacagcctcagcccgaggttcccttcctcttgcatccatgtgtgtgtttcagaggcggccatccttccctacttccagatccttgtagggcagttggtggagggtgggaggcaccccggtgttgcctccatgaagccctgtgccagtcactgggctgcaaggctgaggaaattgtgtccgtgtcagaaagctcctcagctcagaggtgctggtacctcctgcgtggtaggaaggcagggggaagaggccctgcttctcctgttctctttgcccttatgagacttgagagtctgtgtcatctgtgccttgcatgtctttttttcagactccctgcgacaaggactgtgtactgcatgaatgaggctgagatagttgatgttgctctgggaatcctgattgaggtaaagtcagacaagcctcttactcatgaccagaaactctgcatgggcagaggctagacccttggtcaccgtcagtaagagagacgccctctgccgtaggctacctcttcttcctcctgccacttcccttgctcttatctcggccatgctgcccaggcctctccccatgtgggtgtgcgctcgtggggtgtctttgaggctagaagcctgggagggcatgcgtgtgttagggagggcgtgtgtgtgttagggagagcgtgactgtgcactggtgtgtatgtggatgggacatgaagcgtttacctgtttgtgttcttggaaaggttcccagttgggtagatgacttcttagccattgcccctctcctgagcagaggatgctgagcttcctagcttcctgcagtaataattgcagtgcctcagagttgcacagcattctacagtttaccaggtgccttgaaagcatgcgttatgtcattttagccttgcaataaccctgtggtgtgggacttttcctagtgctaaggcatgggcccacacccaggttttgtatcctgggttctgtcaccggcctttctagacatgtttcttccatttctttttcctttcccctcagctaatcctcatgcctttgcttgcttctctcccgagtgggttctggtttcttcaagagctgtgaagagggggtcaggggaaggagtggggtgaagagagggtgggtgctcaggatatgggtacattgcctggcctggtcacattggctttgtagttgcttctagatacatcctgtgttactgacagatcagcatgttagggaaataaaacacgtatgttgagcctgcgttttcccgtactccacagagccgcaaacaggaaaaggcctgcgagcagccggccctggcgggggctgataacccagagcactcccctccctgctccgtgtcgcctcacacaagttctgggagcagcagtgaggaagaggacagtgggaaacaggcactggctccaggcctcagcccttcccagaggccggggggttccagctctgcctgtagcaggagccctgaggaggaggaggaagaggatgtgctgaaatacgtccgggagatctttttcagctagggcataaactgtgcactgaactgtctgccgagagcagctggaggacagctgagcttccactggtgctgctgggccgcccgcctgtgggaatggggctctctgtgctcctacctttgtgccttcttgggcctggcagattcacctcaggccagaagcccctggacactccgggccttggggctgccgttctgagtgtgcggaaggcaggactcaaaatgagatcccatttgactccctctgtatgtactgtgccctctcctggctcttgaggctctggagtcccaattgtctgtgttagtcagtgaccaggttccagggaaaatgatgtcatgtggtggtccaacttactggaaccaaagagacagtactttgcaaagaaaaggatcactgccaggtgcactggaattgctacagtttagtccgcatgatctctcctgaaggaggaagcctgtttcaaaaatagtttccatcatgagtctatcaatgagctcccacctctccagccagcctagaaagcaaacgagctgcccacagttctctgccctgtctgggaggttgaggccacagtgtatagactggtaagccagacaggcctcctcccgcaagctgctaccttgctttcacctgtaccttggtccccgggcagctagctataaagcaagagggacaggagcccagaagagacactgaggacaagagatcacaccagagtacatgtctctgcctctgttttcagtgtggctttggacaggaatatatgaataaatcactgccatacaggttttccaatacacaagtgctagaaaatacacacaattccccaatgcgtaagttgtgctaatgtctttccaagttctgggttgggaagtggagggtggcagcgtttgtttgtgtgcagccgtccagtcctgttcacagcgaggatttggagtcctccagggtctcatcatgggagtgatttgtcagcggacgcctctgccctgtctggcttcaggtccagggaagctttgaagcagtcaagccttgtctttgtaccccatgtgtcctgtctttgttgagtcactcagagatcactcctggacctctggggttggagttccagtgatggcttatggcggcccactcactatggtgggctgagtggaagctccttaaccatgtccccagagacactgaggtgctcgctcttttaatgtcctcgtttgttgccgtaagttctttgctaggtttcattttggcatttggcaaatcagcctggaagtctggccccatgacagcaatcactccctccccaccctcctgaagctagaggaagatttgctcagatccattaattaaagcaggaattggtgtgacaatgagctgcatggtttagggagtctttgggagccttggaagtcctgaaggacagacaatcttgtactaagaagtcacaggtgccctggctgcccttgctgcccctcggcctctttgacacaggggccccacctcctctgtagtgggttccatcgctggagctggagatcagcgttagctgtaaaatgagatggctgagcagatgtgccacctctgaccatggttggaactgaacccttgcaatcacgtaagcctttagcagctctcaagcttgctctcagccctctcagccctcagagggaacacagccatggctataagcaagaggatgagtaaggcctgggcgctgcccagagctagaaacccaggccccgggagggagagcctgacccacttccacacataggagaggaagaggcccaggccgcctgccagcagcacagaggacacagccaggaagcccactgccagccgccacgctctctcatcactgttgcactgggctaggaggagaggctggggggcaaagagggtgaggaccagggacccgtacacgccaagcctggccaggcccaggccaacccgaggcacccccagggcttccagctcagggaactggtgacactgtagggtgctggtgtcctcattccacaggcagaagttatagaagccgattctcaggttgggcaggtcagtgaggttgccagcctcccagagaagagcgtaaaacatcaggcagatgaccacaatcacgaggactatgatgctcatgaacagcagctggtcgcgccaccgaggccttgggccggccatctctactgccctctgccgggggac

SEQ ID NO: 5933 - DNA, 7334 bp, Homo sapiens
ccaaggactgtagcaggacaagccacagacaaaacctctcagacacggagctgtagaagaaagggctttattcagctgggagcattggcaagctactgccttaaaatccgagctccccgagtgcacaatttctgtcgcttttaagagctcacaacactaaaatttcacatgaaagggtcgtgattgatttgagcaagcaaggggtacgtgacaggggctgcatgcaccgatggtcagagagaaacagaacagggcagggagtttcacaatgttcttctatagaatgtctggaatctatgaataacatcggtttctaagtcatgagttgatttttaactactaggtttaggccaggcaggcccaggtccagttttgggcctggcgctgggctgcctgtctttgatttcacttcctttttttaaaaaaaaaaaaaaaaaacaggtactgagtataaaacaatatgagagggtctctctcttccctcgctttaactttcggagggctgaaattctttctagccttggttaatacagcaattcattccattctagctattgttatttctcttactataattttactattagtacttacgctattctattattttcttaattttccacttaattaggataacaaaccgaggccgggctcccatcctcctcaagcacacgaggggggcctggcccagcagggagcttcgcctggtttctgagggaattcccggcgggcctttccaaaacatgcccgttcccttccgctaacttcaggggccaagaattgaactttcaccctcctcaagccggtggcgctgcctcgctggcgttcccagcgcgcagccaaccggatgccagccggcggcattagcactgccagcatggggcgcccgcggacctccgactgaggcagctgccgggagccggaagtgtcccgggcgccgggactgcgagggggccgggagttccccaagaccggaagtgtcccgaggccgggagcccgcgggaccctggagcgcgcggggccggaagaggcgggcggccagtggaggtccgcagagtttgggcgccaggcgagacggcagggcttaaagttccgggtgaggcgtgggtcccacaaccgcttggaatttgcctcccggctccgctctggaagctaagaaggggcacgagagccggagacgggaacctgagagcagggaagccagtagccggccggaggagcgcgcggccgctccagtcggaaggagccgttgcagccctgcccggcgtgtggcggggtcagcgaggcccctgcggtgcttcgcccgcgccttccgctccgcactcacccgccctctgggcctcccacaggtcggcgccgccagcggcgggtaccggcccgcagagggagggcgggctgtgaactggcagcacatcgcgttcccgcggggcccccattctgcccaggcagggagcggctgggatgggactgaggtcggtccgcgagcgcggtgccccagagacccggcttctggaagttgctgcggcctgctcttggggcccagaagtagggcggggaggcgcggggtctggagtctgcaggacctggctgcgaatccaaccagctgatttcaaacttttctgtgatcttctgcaagttaactaagtctcagttcctcgtttgcgaaatgtacttaataggcaccccagggtgaactaaatttgtccgcacagactgcagcattgcgcttgggaggcgccttagggggtaggagtcactaatatcactgagttttgacagaaatgaaggtgcattggcaaaggtgtgccccatggccgggcaggttaggaggagggcctggtaatattttttcttaaattgtaaacagccatctggatgagcaatgcattatcaaattatgattcagagaggactatcgctgactactcttttttttgggcaaacctccgcttcaggagcttctggcttgattcctaagtggaaggtagagacctaggccctctgagtcacaactccatctctctgggtgaggactgagctccaggactgctgagtggaggcagaacaattgggatagggaaaagagaggccaaactagatcagaggctggcgtgggcttcagaatctacagactggcacagttaatgcctccgggcccctattgctgcttcaagtttgaccaatcagaagtatctttagcttaagggcggcgtgttggccaatgagactttattgtgaaataaaatgccctcagtttcatttaactgagccaccatagaagagtagagaaatcgagttggccagatgagggagaggccattaagaggtattttagggattgaatgggctgggcacccagaggacagtggcatttggggtggtaatgagaaggaacattaggggcctccgcctccttccgttcctcctgtgctgagtcagtcagcacagaggctgcaggaggtatctctggttggctttggctgcctgtagggggcaccagctttggggaggtcagagggctctctcctgagctgctgtcctgcccacaatcacacctgcctgatgcctgtgaatggccgtctgagtctcttgggccttggtcacttctggcctgccctgcaccgaccagtaactgtgcctgatgactggaggtatgggaattcaccggactttattgttctttgtaggaatcaaagatcaactcccactgaggacaaatggacctgtaattccgggtgtgacgagagaacgagatttaccttcctgaattaaaaaacaggtcattaagcttgggccctgactcttctttgtgagaaggtacagagatggaaaccttacaatccgagactaaaacgagggtccttccctcatggctgacagcccaggtggctacaaagaatgtggcaccaatgaaggcccccaagaggatgagaatggcagcagtgccagtggcagcagcaaggtgcgacagctctggtcagaagactcctgcgaatctggcaagtggagcaggggcctccatgacctgggccaggtcttccagcctaggcagaacagcaagatgggcgggtgtttcagtctgatcatctcttgagcttttagaaggtggaggggctgtgggcgggaggcaaagcgggttaaccctcgaggacaggcacccacttctgcctctgcactggtgagtgccctgccctcagcacacacagagtgggttctccatgtcagccagtctctgatgccagttgtccagaatgccagtctcttcctttacaacaaacatggtaacatcagatgggcaagatcagtggaagggtctgttctgagtggtgcctgcccctgtggacagacctttagggatggacagatgagcagcagctgcagggccagcaagagctaaggagctggggagtgagttagttgaatgacggtaattgccggggggggggggggcgggggggggtggtgagtctccaggctgcactgtgaagtgggcggggccccagcactcggtgtttccctctctggctcctcctcctctaaggtttcctgactgacagccttcccttgtgactgctgccgtctttccctaagtctggtcctgctttcaggttcctctcagtacagcctcagcccgaggttcccttcctcttgcatccatgtgtgtgtttcagaggcggccatccttccctacttccagatccttgtagggcagttggtggagggtgggaggcaccccggtgttgcctccatgaagccctgtgccagtcactgggctgcaaggctgaggaaattgtgtccgtgtcagaaagctcctcagctcagaggtgctggtacctcctgcgtggtaggaaggcagggggaagaggccctgcttctcctgttctctttgcccttatgagacttgagagtctgtgtcatctgtgccttgcatgtctttttttcagactccctgcgacaaggactgtgtactgcatgaatgaggctgagatagttgatgttgctctgggaatcctgattgaggtaaagtcagacaagcctcttactcatgaccagaaactctgcatgggcagaagctagacccttggtcaccgtcagtaagagagacgccctctgccgtaggctacctcttcttcctcctgccacttcccttgctcttatctcggccatgctgcccaggcctctccccatgtgggtgtgcgctcgtggggtgtctttgaggctagaagcctgggagggcatgcgtgtgttagggagggcgtgtgtgtgttagggagagcgtgactgtgcactggtgtgtatgtggatgggacatgaagcgtttacctgtttgtgttcttggaaaggttcccagttgggtagatgacttcttagccattgcccctctcctgagcagaggatgctgagcttcctagcttcctgcagtaataattgcagtgcctcagagttgcacagcattctacagtttaccaggtgccttgaaagcatgcgttatgtcattttagccttgcaataaccctgtggtgtgggacttttcctagtgctaaggcatgggcccacacccaggttttgtatcctgggttctgtcaccggcctttctagacatgtttcttccatttctttttcctttcccctcagctaatcctcatgcctttgcttgcttctctcccgagtgggttctggtttcttcaagagctgtgaagagggggtcaggggaaggagtggggtgaagagagggtgggtgctcaggatatgggtacattgcctggcctggtcacattggctttgtagttgcttctagatacatcctgtgttactgacagatcagcatgttagggaaataaaacacgtatgttgagcctgcgttttcccgtactccacagagccgcaaacaggaaaaggcctgcgagcagccggccctggcgggggctgataacccagagcactcccctccctgctccgtgtcgcctcacacaagttctgggagcagcagtgaggaagaggacagtgggaaacaggcactggctccaggcctcagcccttcccagaggccggggggttccagctctgcctgtagcaggagccctgaggaggaggaggaagaggatgtgctgaaatacgtccgggagatctttttcagctagggcataaactgtgcactgaactgtctgccgagagcagctggaggacagctgagcttccactggtgctgctgggccgcccgcctgtgggaatggggctctctgtgctcctacctttgtgccttcttgggcctggcagattcacctcaggccagaagcccctggacactccgggccttggggctgccgttctgagtgtgcggaaggcaggactcaaaatgagatcccatttgactccctctgtatgtactgtgccctctcctggctcttgaggctctggagtcccaattgtctgtgttagtcagtgaccaggttccagggaaaatgatgtcatgtggtggtccaacttactggaaccaaagagacagtactatgcaaagaaaaggatcactgccaggtgcactggaattgctacagtttagtccgcatgatctctcctgaaggaggaagcctgtttcaaaaatagtttccatcatgagtctatcaatgagctcccacctctccagccagcctagaaagcaaacgagctgcccacagttctctgccctgtctgggaggttgaggccacagtgtatagactggtaagccagacaggcctcctcccgcaagctgctaccttgctttcacctgtaccttggtctccgggcagctagctataaagcaagagggacaggagcccagaagagacactgaggacaagagatcacaccagagtacatgtctctgcctctgttttcagtgtggctttggacaggaatatatgaataaatcactgccatacaggttttccaatacacaagtgctagaaaatacacacaattccccaatgcgtaagttgtgctaatgtctttccaagttctgggttgggaagtggagggtggcagcgtttgtttgtgcgcaaccgtccagtcctgttcacagcgaggatttggagtcctccagggtctcatcatgggagtgatttgtcagcggacgcctctgccctgtctggcttcaggtccagggaagctttgaagcagtcaagccttgtctttgtaccccatgtgtcctgtctttgttgagtcactcagagatcactcctggacctctggggttggagttccagtgatggcttatggcggcccactcactatggtgggctgagtggaagctccttaaccatgtccccagagacactgaggtgctcgctcttttaatgtcctcgtttgttgccgtaagttctttgctaggtttcattttggcatttggcaaatcagcctggaagtctggccccatgacagcaatcactccctccccaccctcctgaagctagaggaagatttgctcagatccattaattaaagcaggaattggtgtgacaatgagctgcatggtttagggagtctttgggagccttggaagtcctgaaggacagacaatcttgtactaagaagtcacaggtgccctggctgcccttgctgcccctcggcctctttgacacaggggccccacctcctctgtagtgggttccatcgctggagctggagatcagcgttagctgtaaaatgagatggctgagcagatgtgccacctctgaccatggttggaactgaacccttgcaatcacgtaagcctttagcagctctcaagcttgctctcagccctctcagccctcagagggaacacagccatggctataagcaagaggatgagtaaggcctgggcgctgcccagagctagaaacccaggccccgggagggagagcctgacccacttccacacataggagaggaagaggcccaggccgcctgccagcagcacagaggacacagccaggaagcccactgccagccgccacactctctcatcactgttgcactgggctaggaggagaggctggggggcaaagagggtgaggaccagggacccgtacacgccaagcctggccaggcccaggccaacccgaggcacccccagggcttccagctcagggaactggtgacactgtagggtgctggtgtcctcattccacaggcagaagttatagaagccgattctcaggttgggcaggtcagtgaggttgccagcctcccagagaagagcgtataacatcaggcagatgaccacaatcacgaggactatgatgctcatgaacagcagctggtcgcgccaccgagaccttgggccggccatctctactgccctctgccgggggac

SEQ ID NO: 5934 - DNA, 5071 bp, Homo sapiens
agctcatgttctccctttggcatttcttacaaactcatggcaagtttccctcctaccctgccctccaccaaggaccagaagtctgaggtaacctcctgccaggacctatttgcaaataagtcattagctgccctctgatttgaggtcaggaggaaaagtctctcccaagcagctttgaaagtgtgaaacatcttaaactgagtgaagtgctctttagccaaaggctttgctccagtccaaatacaacaagccattggaaacattagtgaggggatttctcagatcttttttgaaggtgggttttgactgaggtgaagggcaaggcccacccttaatggagacctgaaggtggaggaagctattggttttcaccacagctgccaagacaaccacctggggagctgtaagaactacccattgctgggccacagatcaatcagagctcaacttatgtgcttcgggctgggcactggtgtgtttctgaagctctgaagctcattcgaaggtgagcctgggtcaaggaccactgacacacccactctgattttacctgcagtgctctgggaactcattactgggtcaagacaagatgtcacctggtgatgaaatcccatcatatactcattactttaaaaactaatacatattttttcctgacaatggtagtatgaattatagaaaacttagacgtttttgtttgtttgtttgtttttgagatggagcctcactctgtcacccaggctggagtgcagtggtgcgatcttggctcactgcaatctctgcctcccggggtcaagcaagtctcctgcctcagcctcccgagtagctgggactacaggcacccgccaccatgcctggctaatttttgtatttttggtagagatgggtttcaccatgttggccaggctggtcttgattgaactcctgacctcaaatgatccacccaccttggcctcccaaagtgctgggattacaggcatgagccaccatgcctggccagaagatattttaaaaataataataaaaaagataaccttttatcccatcatacacataaaaccactgttaatattctaccaatattttcttcctgtactgatgtatttttacataatcatgatgttgaatgtaatgttttttcactagatttagtaaacatttttcaaagctgttaaatattcttcaaaaacatgatcaatggctgtgcaatagttcatgtgggatcatccattacactattactagacaaattgtttccacttttcaccattataagtgaagacgctgtgtgaatcgtgtttggaatctgatttttctcaggtgatctacctataagtgcaatcattggatcaagggtagaaatatcttttagtgatcttgctaaatactgcctaactggcctacagaaaatttgctaatcatagtccctctaattgtatataaaagtgcccactttgttatactcttttaaaaaattcttttcactccgttttaaatcagaagggctttgtccagttggtctctgaaacagtggtctgcacactgtattttacatatgtgtattttccagtatgggataagtttcggctgatatggtttggctgtgtccctacccaaatctcatcttgaattatagctcccataatccccacattgtgggagggacccagtgggaggtaattggatcatgggggtgggtttcccccatactgtactcatggtagtgagtctcatgatatctgatggttttataaagggcatttcccctgcacatgttctcttgcctgctgccatgtaagatgtgcttttgctcttcctttgcctttcaccatgattgtgaggcctccctaaccatgtggaactatgagtccattaaacctctttttcttttcaaattactgggtatctcttcatagcagtatgaaaatggactaatacaacagcattcaccaggaagtgactaggaacacagagcttcaagctttgtgaggcacaaggtactggggccatgataccaaatggcctcctggaagccccagcagggagtcccaggtggtgttcagcagcaaaatgagtcgtggccctgggaagggacctgaaggctacacagccctgatgatcagtttctgaggggacccctctgggggaacagctccctcctctttcccagagctgactggaaggtctgtctcattctacacactgcatttgttacagaaagggaccaagtggggaaaataaagaacatggaacaggctgagagagagggcagctccattcaaaggacctaggtgtatgccaaaaatgagaatgaagattgaccagcgacttctttggcagagacctgggcaggctggctgatggagagctggggcctgtgaatacagtaagggtggggtccacactgccaccgcctcccctcagatgccgcttctctggactcagcagcactgggcagtctgcccagttctgcccgtggcttctgctccagagaagcccagtggggacagtcagagtggaggagtgaggggctgtcccagcagaagccctggctgctgccttgggtggcactgtcaaaggctctggaggtcccagagggccaagggtctgaagactcgggtttgaatgtagttgagagattcttggagcaatgatgcttgttacggaaggaattattgggaattgaaaaggtggcattagtctgggatgataaggagttttaaccatttgagtccatggtatgggaaaaattgccgacgggaacatattttgtatggttttgcttatttagtaaatgtttgtaaaagcctatatctgtgcttttaatgggtttgggtattttagggtgtggaatagatttccaggacttccctgatttataccatcatgctgtggaaaagaaggtttgacctcctccattgttcaggaccaactgggaagggacttggggatgcctttgtttaaacactccctctcacttttcccatttgaattctgttacactggggttccaaaaaaaattattaaacgttttgctttgaaaacagctgcctttttaaaaattaatgtggctcctcggggagattgcatcagccaccttgcggcagctcctgccagacgccaggagcctttgttttgacttcctcattttctctcaactgaccttttaatgtagagcaaaacaaaacgagccaagaagcccaggaccaggcatgtggagaaggtggtggcctctcacctttttatattcagtcccagctcttatgaggctcgccatcatctggtgcgacttggaacttgaacttggaattctctggtgaggcccagcttcccctcttgccttgtgcagtccagcacctgctcagctgctcaggctgtgtatgaatacattcccatctgcccatcctcagccaccccccagctcctagagtcctactctactttctgcttctctaaatctgatccatgcagcaagagcattcctgggctccttcagcccacactctggtttagctataaattaggatttattctccactctagtgtcatgtctctgaggaacagtcttcagttttgttattttgatacacagtaggggctcttttttttgttttttttttttaaatgagcgaatgaaaatgctacataggctccctgagttctttcatgtacgaatcctggttacacatcttaggacagcagagctgcctgagggagggttgtgtttaatgtcgtatgcatgctcagcacagtgctggcatggcccatccatgctttctgttgaactatggacagaattcaggaacttgtgtatggagagggtggaagtcagtcctcgcttctttccctaaacattttgcagtgacagcatatggatcttgggttggaaaccccatgacactcttctctacttccccatgggccttccctggtttttgtttttcttttcttaaacaatcctggtaatgacacttccaccacaatgagcttttaaatgtcctttaatgataagccagtgtttccttcagagggcaaaggggagactgctgagtcactgtggccatttttagataaaccttttcctgtttataataacacatgctgattgtaggaaactagaaaatacatgaaagtgcagagaaaagactaaaagtcatctatacttcaggtcgtagaaataaccactctgaacagcacacttctttttacactattgttttacactgttgggattacataaatatatatgtttgtatcccactttgtgaacatcattctatgtgaactagaaatggttcctaaacattaagggctgcatatagctgtatcatagtttatagtttatacatagatgctttgtaacattattttataatgctatgaatgctatggtgaatatttttgtgaatcaacttatgtttccaccagcagtttcagagagtgcctgtctcatcccatcctccccagtattgcatattcttgagtcttttattctttgataatgacaaatgatgaatcattgatagtttttcttcataataagtaaagtttaacattttcaagtgtttgttgaccatctgtatttcttcttttgtgaagtgctgtcagttcttttgctattttaaaaataattttgagtttcagtttttgtttgttggtctgtatgaaccctttaaaaataaaggctgttagccttttgccatcttagttgtgacagtaaagtataatgctttgctgcactaggtcctctggaacaagatgcagatttagattccaggtcagcatgtaacttgaccactgtcactcaagagttacagcctgagcagggccttaggagggagatgatttctgcttaaaggcgatacaaattcctagttagggaaatagaaggaaagtattctcaggagattaatttaaggcagcttttttgttggtttaagcacctctaacattttcatactaataagggagaatgggatggcggctgaaagagacacaaatattgtatcatttaattctaaattatgtatttgtcaggttcttattgaaagagtaaattttcgaaaggatc

SEQ ID NO: 5935 - DNA, 512 bp, Homo sapiens
ttttttccagacaaaataccacgctcacaccacacataccacaagacaaagaacaggtaaagagggcacacacacttttaccgtttataccaaaccaaaatcacgaaattcaaaatccgagtaccaaaaaattcaagccaagtcaaaaccaaaaccaaagtatccagcaattcaagtcaagtcaaaaccagaacaagagtgcccatgcaggcatgctgtgggtgatcaggccacgtttccactcagatggagtggggcaagttccaaagactagtcttaccaagtcaagccaagtcaaaaccagaacaaaagtgccaatacaggcacaccgtgggtgatcaggccacgcttccactcacgtggagtggggcaagttccaaagactagtcttaccaagtcaagccaagtcaaaaccagaacaaagatgtcaatacaggcacaccgtgggtgatcaggccatgcttccactcacatggagtggggcaagttccaaaaactagtcttgacaagct

SEQ ID NO: 5936 - DNA, 5072 bp, Homo sapiens
agctcatgttctccctttggcatttcttacaaactcatggcaagtttccctcctaccctgccctccaccaaggaccagaagtctgaggtaacctcctgccaggacctatttgcaaataagtcattagctgccctctgatttgaggtcaggaggaaaagtctctcccaagcagctttgaaagtgtgaaacatcttaaactgagtgaagtgctctttagccaaaggctttgctccagtccaaatacaacaagccattggaaacattagtgaggggatttctcagatcttttttgaaggtgggttttgactgaggtgaagggcaaggcccacccttaatggagacctgaaggtggaggaagctattggttttcaccacagctgccaagacaaccacctggggagctgtaagaactacccattgctgggccacagatcaatcagagctcaacttatgtgcttcgggctgggcactggtgtgtttctgaagctctgaagctcattcgaaggtgagcctgggtcaaggaccactgacacacccactctgattttacctgcagtgctctgggaactcattactgggtcaagacaagatgtcacctggtgatgaaatcccatcatatactcattactttaaaaactaatacatattttttcctgacaatggtagtatgaattatagaaaacttagacgtttttgtttgtttgtttgtttttgagatggagcctcactctgtcacccaggctggagtgcagtggtgcgatcttggctcactgcaatctctgcctcccggggtcaagcaagtctcctgcctcagcctcccgagtagctgggactacaggcacccgccaccatgcctggctaatttttgtatttttggtagagatgggtttcaccatgttggccaggctggtcttgattgaactcctgacctcaaatgatccacccaccttggcctcccaaagtgctgggattacaggcatgagccaccatgcctggccagaagatattttaaaaataataataaaaaagataaccttttatcccatcatacacataaaaccactgttaatattctaccaatattttcttcctgtactgatgtatttttacataatcatgatgttgaatgtaatgttttttcactagatttagtaaacatttttcaaagctgttaaatattcttcaaaaacatgatcaatggctgtgcaatagttcatgtgggatcatccattacactattactagacaaattgtttccacttttcaccattataagtgaagacgctgtgtgaatcgtgtttggaatctgatttttctcaggtgatctacctataagtgcaatcattggatcaagggtagaaatatcttttagtgatcttgctaaatactgcctaactggcctacagaaaatttgctaatcatagtccctctaattgtatataaaagtgcccactttgttatactcttttaaaaaattcttttcactccgttttaaatcagaagggctttgtccagttggtctctgaaacagtggtctgcacactgtattttacatatgtgtattttccagtatgggataaggttcggctgatatggtttggctgtgtccctacccaaatctcatcttgaattatagctcccataatccccacattgtgggagggacccagtgggaggtaattggatcatgggggtgggtttcccccatactgtactcatggtagtgagtctcatgatatctgatggttttataaagggcatttcccctgcacatgttctcttgcctgctgccatgtaagatgtgcttttgctcttcctttgcctttcaccatgattgtgaggcctccctaaccatgtggaactatgagtccattaaacctctttttcttttcaaattactgggtatctcttcatagcagtatgaaaatggactaatacaacagcattcaccaggaagtgactaggaacacagagcttcaagctttgtgaggcacaaggtactggggccatgataccaaatggcctcctggaagccccagcagggagtcccaggtggtgttcagcagcaaaatgagtcgtggccctgggaagggacctgaaggctacacagccctgatgatcagtttctgaggggacccctctgggggaacagctccctcctctttcccagagctgactggaaggtctgtctcattctacacactgcatttgttacagaaagggaccaagtggggaaaataaagaacatggaacaggctgagagagagggcagctccattcaaaggacctaggtgtatgccaaaaatgagaatgaagattgaccagcgacttctttggcagagacctgggcaggctggctgatggagagctggggcctgtgaatacagtaagggtggggtccacactgccaccgcctcccctcagatgccgcttctctggactcagcagcactgggcagtctgcccagttctgcccgtggcttctgctccagagaagcccagtggggacagtcagagtggaggagtgaggggctgtcccagcagaagccctggctgctgccttgggtggcactgtcaaaggctctggaggtcccagagggccaagggtctgaagactcgggtttgaatgtagttgagagattcttggagcaatgatgcttgttacggaaggaattattgggaattgaaaaggtggcattagtctgggatgataaggagttttaaccatttgagtccatggtatgggaaaaattgccgacgggaacatattttgtatggttttgcttatttagtaaatgtttgtaaaagcctatatctgtgcttttaatgggtttgggtattttagggtgtggaatagatttccaggacttccctgatttataccatcatgctgtggaaaagaaggtttgacctcctccattgttcaggaccaactgggaagggacttggggatgcctttgtttaaacactccctctcacttttcccatttgaattctgttacactggggttccaaaaaaaattattaaacgttttgctttgaaaacagctgcctttttaaaaattaatgtggctcctcggggagattgcatcagccaccttgcggcagctcctgccagacgccaggagcctttgttttgacttcctcattttctctcaactgaccttttaatgtagagcaaaacaaaacgagccaagaagcccaggaccaggcatgtggagaaggtggtggcctctcacctttttatattcagtcccagctcttatgaggctcgccatcatctggtgcgacttggaacttgaacttggaattctctggtgaggcccagcttcccctcttgccttgtgcagtccagcacctgctcagctgctcaggctgtgtatgaatacattcccatctgcccatcctcagccaccccccagctcctagagtcctactctactttctgcttctctaaatctgatccatgcagcaagagcattcctgggctccttcagcccacactctggtttagctataaattaggatttattctccactctagtgtcatgtctctgaggaacagtcttcagttttgttattttgatacacagtaggggctcttttttttgtttttttttttttaaatgagcgaatgaaaatgctacataggctccctgagttctttcatgtacgaatcctggttacacatcttaggacagcagagctgcctgagggagggttgtgtttaatgtcgtatgcatgctcagcacagtgctggcatggcccatccatgctttctgttgaactatggacagaattcaggaacttgtgtatggagagggtggaagtcagtcctcgcttctttccctaaacattttgcagtgacagcatatggatctttggttggaaaccccatgacactcttctctacttccccatgggccttccctggtttttgtttttcttttcttaaacaatcctggtaatgacacttccaccacaatgagcttttaaatgtcctttaatgataagccagtgtttccttcagagggcaaaggggagactgctgagtcactgtggccatttttagataaaccttttcctgtttataataacacatgctgattgtaggaaactagaaaatacatgaaagtgcagagaaaagactaaaagtcatctatacttcaggtcgtagaaataaccactctgaacagcacacttctttttacactattgttttacactgttgggattacataaatatatatgtttgtatcccactttgtgaacatcattctatgtgaactagaaatggttcctaaacattaagggctgcatatagctgtatcatagtttatagtttatacatagatgctttgtaacattattttataatgctatgaatgctatggtgaatatttttgtgaatcaacttatgtttccaccagcagtttcagagagtgcctgtctcatcccatcctccccagtattgcatattcttgagtcttttattctttgataatgacaaatgatgaatcattgatagtttttcttcataataagtaaagtttaacattttcaagtgtttgttgaccatctgtatttcttcttttgtgaagtgctgtcagttcttttgctattttaaaaataattttgagtttcagtttttgtttgttggtctgtatgaaccctttaaaaataaaggctgttagccttttgccatcttagttgtgacagtaaagtataatgctttgctgcactaggtcctctggaacaagatgcagatttagattccaggtcagcatgtaacttgaccactgtcactcaagagttacagcctgagcagggccttaggagggagatgatttctgcttaaaggcgatacaaattcctagttagggaaatagaaggaaagtattctcaggagattaatttaaggcagcttttttgttggtttaagcacctctaacattttcatactaataagggagaatgggatggcggctgaaagagacacaaatattgtatcatttaattctaaattatgtatttgtcaggttcttattgaaagagtaaattttcgaaaggatc

SEQ ID NO: 5937 - DNA, 512 bp, Homo sapiens
ttttttccagacaaaataccacgctcacaccacacataccacaagacaaagaacaggtaaagagggcacacacacttttaccgtttataccaaaccaaaatcacgaaattcaaaatccgagtaccaaaaaattcaagccaagtcaaaaccaaaaccaaagtatccagcaattcaagtcaagtcaaaaccagaacaagagtgcccatgcaggcatgctgtgggtgatcaggccacgtttccactcagatggagtggggcaagttccaaagactagtcttaccaagtcaagccaagtcaaaaccagaacaaaagtgccaatacaggcacaccgtgggtgatcaggccacgcttccactcacgtggagtggggcaagttccaaagactagtcttaccaagtcaagccaagtcaaaaccagaacaaagatgtcaatacaggcacaccgtgggtgatcaggccatgcttccactcacatggagtggggcaagttccaaagactagtcttgacaagct

SEQ ID NO: 5938 - DNA, 9717 bp, Homo sapiens
aagttatataccttgaaagtccctgccatgacacttattagaccagattttttgatatgttgttaagtcatcctgaccctgtttatgtacaaactcaatctttgtgtggttgatggtctacatgagatatgtcaagtgtttgtcaatggatttggtccatagtaaatgttcactaagaggaagaggcagtatttaggaacatatattctatgttaaacagcctaggttgaaatgttgacttctcttatttgctatgcgatcccgtgcaagttcctgaattttgctgtgccttggttttgttatataactcctggaagtgtgacgatggccacatgagttcatacatgaaaacctcttagaaaatgcttgggacacattaaaaactcagtaactgttagctactattaccttcaaaatataaccaagtgacaaaaggggagtacaactaatcctcagaaaatcagattaatattctggctttgcgacctgtacaaagtacttaatttcccagtttagtgcctttgtctgtgaaatgatacgtaacttttatggctattatgatgataaagtaagaaatgcatgccaagtgcctaacataaaatcaatgctaagaaatggtagctattattagtaataatgataaagaattttgcaaaaatttccctttaaatcctaggcgttggtcatattgaattacttgtagtttctcaaacatgttctcttgttttcatgtgtacctgctgtcttgctttgctactccactgtattcttcacttgattgcctcctactagttcttcaagatgcaggtgtttccttccctggaaaacatttcctaaagtcaggggacgtgttttctgttttcctctattattgtacttcttatactctctaattttctattgacctattttcttccaatataagacactttcttcttgtgtgattttcagataagctactaaagtcttggtttcctcatctgtgaaacagggatgtaaaaattaaatgagatgcacttggcacttaggccaatgtctagcaccttccccaatcccaagaacataataggcagtcaacaggtgtttacttatgaaatgaaaataatgatttacaaattttattcaatctaaaaaaaaaatcagaatgtgtagaccatacataggagagagggcatccccccaaaatctgatgttaagtgaataaaatcaatgtcatgaagcagaatggtggttgccagaggctggggaaaagagggaatagacagttattgtttaatgaatacagtttcaattgtataagatgaaaataattctgaagatggatggtggtgatggttgtacaacttatgaacatatgtaatatactgaactgtacacttaaaatagttatgacaaattttattgtatatattgcaccacattgaaaaaaaatcaacatcatgaatgagattaaaacaaaggtcattttaagagaatatttctcaggccaggaaagacctggttatagcctaattagtagtgatattaacagtaggggactagtcagcatggaaacacacacaaaaaacagagtcacgttgccaggggagatgatcaatctggggactagataattccagtcactttaaaataattttgttacaaagcaggggtggtttatcaacttcaccacggcctaaaagaaatatgctcatgcataaacctctgaacaggtgatttggtgtgcagagtgctttggctttgctgtttagagagaagaacactggaaaacaggtgggtgtaggtgttgtcaatgaaaagaaagattatcctttgtaaattaatgagatggtatcctgatttatgcatatgtcccttctgttctgagtctgtttattaggagtaagtttccctttctctgatcaactcaagattgactttataggtatgaaaaatccaaagcaaaaccctcagcaatcatgacctaccaataaatgaaatgacagtttaggaatccttctgatcccccaaaaccacaacagggcaaagttcattggtaaacagcaaaaaaaattacatgaacactataaacattttttagatattttgtctttttttcaaaggaataatagtaacaaaaaaacaagagagctcataaaaagtattctgagtataaggaacataatcttaatattccatactactcatttttcaaagaatatatccaagactttgaaagtggaatcagaaatggaaaaaggaccaaaaagaaaaaaaaagatagtgaagagaatccagaaataatttggtggcaggtttttattttattcatttatttttgagacagagtcttgctgtgttgcccaggctggtgtgcagtggcaagatctcagctcactgcaacctctgcctcccaggctcaagcgattctcgtgcctcagcctcctgagtagctgagattataggtgtgcgccaccatgcctggctgattttatatttttagtagagacagggttttgccatattggccaggctggtcttgaactcctagactcaagtgatttgcccatcttggcctcccaaagtgctgggaattataggtgttagccaccgcgcccagccctgaagcaggcttttagataagattgcatgtccatgaaaattttgagggaagaaaaaaacttccaccctgttgcaaagattaaggcagtgaaaggaatctgaaaaacactggatctattatgaccaagcttgtctgctcttaatgcattccaaactcctagttccactttgcatttcaatgtagaaatataacagtgttggtaacaaagtaacatctgacattccatgataattcttggggaaaggaagtctcttttgtgaaatatagatggagtcaaatgccttaggagaagttttggtcaaaacgtggtcctctacatgagctctagaagaaatcattcggctccttctactgctgtcgtggaaacaggtttcacatagtatggcccttcactcaggtaagttctgagcctcaaataatttgggttcccaaagatttctgcaattgtcttggaattggcaagtgctttcactagttcatatttggcatcctttgaagctttgtcatgctccacagaccggtccaccacatattctacaaaacctggactgttaaacataagtttctgagcccagggttggtttgcaatggcctgaaatggaaggcagaaagaatacaattcccctgagtggaagttgtttgttaatgggatggcacaatatttacaaagaaatctggcaacatgaactttaaaaatgttaccttttgtctaagtaaattccttcctgagaatctaacttaataaaataatcttaaatatgaaaaatctttgtatacaaaaatgttcataatagtgtgaaagttacaatataaatatctaataatgggagaatggttaagtaaattatggtatatagcaataaaaataaacattaacaataatgtttacaaaaaataggaaatgatacaggtaaacctgttatataaaaaaagcagattcaaattataaacaatgcatgattacaacagtggaaaaataaaaactaaagtagaaaagactaacctcaagatactcatatagtgcacaaacattttcaagaatgttcattgtggtatcatttgtaagatactatctaaatcttcatttataggagaatgatatattgtggctattcaatgaaataccaactttctaactgcctcttttaacatagacaaattttaaaaaaacgtaacattgaagagaaaaaaaaaaaaagcaaaaactgcaattacttttgcaccaacctaatggaatgatacaaacagcatgataccacttacaaagtttatgaatatctaaaatactgtgttttatttaaggatacacacaatatgtagtagaaatatgaaatcatttatgggccctgactttgtgatagtgattttatctaagaacagaggaaggggaataggactgggcagaggtagcaagatacaactatatttgaaatatttcaccaaaaataaacacacactaatacaaaaactaaaaggaaatacaccaaaaggtagaactttctgtgattttaaaaaattctacttctaagtcttttccaaattttaagattaagtttttcaaaacctattacgttttaatgaaaaagaagtaacaagtttatggcctagttttttcctctcaaaatgtgttccacagacaagtagcatcagcaacacctgcgagcttgttagactttcaggatcccaggctctgccccacaactactgaattagaatctacattttaataagattcctaagattaatgtttgagaaactttggcctgcttcacaaccaagcatgaaagtaggcagaaataaaaatagttatcccaaccagtaaatagaaaattatttctacaatggaaccagctaagcacaggataaggtagaagagcaaaaccaaaataaactaataatgaaaatactaagcaggatccaaaatggccatctcatacaatgaccatttacaagggtgaagcagtcttaaagaaatgtttctggctaggcgcggtggctcacgcctgtaatcccagcactctgggaggccgaggcgggcggatcacaaggtcaggagatcgagaccatcctggctaacacagtgaaaccccgtctctactagaaatacaaaaagaaattagtcgggcatggtggtgggcgcccgtaggctagctgctcgggaggctgaggcaggagaatggcgtgaacccgggaggtggtgcttgcagtgagccaagatcacgccactgcattccagcctgggcgacagagcgagactctgtctcaaaaaaaaaaatgtttctgaagattataggaatacctgtatccttcaagacccagatcctgtatcgcatcctcaggaagccttccctcttttgtccctgccattttccttattccctcccagtctaggccatgtatgctgtctgagatcccattattgatatgattactaaagcgattactatcttgctatgctggggctacaaagataaatcagatatgcttcctgctctcagccaactctacttaataggtaagacaagtcgataaataaacatttgcaaaataatataacaaatagaacacaaaggtataatccttaccacagctgtaattatataagtaactgtacaattatatttactgcctggctccttcaatagacaggaaactacatgaaaggaaggtctttatatattttcttcactgttgtatgcccttcactgagcaaaaacggaaactcaacaaatatttgctgaataaataaatgcaacatatgagaaccaacattgtttaactcaaccttgtcaatctgggcaaagtgtgctgaagacaaggagttagtccttgacgagtgagtaagaggttaagaagcaaagttaaggaagagtgttagatacggagaccccagcaaaggtccagagacacaaaacaaacagtttggtaccactggagcattaggtgccagaagccttattttctgcacgggaaataaggattaggaagaccagggctaggttaatagaggatggcagataaaaagtctggaattaactgtgtgatcccatagcatcctgttcaaacctcaaacagcacctaatatcttttactgaaacaatctgtttacacatctgtctccttacttagtctctaaggtagcagaaggtagaaactatactatgcacttgtgcatccccagagatggcacaggctctggctcactgttaagtactcaagtgttgagctggcagggtcccagaaggacctatggaagtgaatacctaccgtaaacacttttaaggcagcacagtgtagttcagggaagggctgactactaatgccacggaagagctccagtggatcccgagataaagaagaaaaccaggattctgtcatcctcagaaggtcatcagtctgctgctcaggctacaggaaagaaaaggaaaatctcatcaaaagttaactgatctggagaaaagcacttatttagaagtcagacacctgagtgctgatggcactctgtcattaatttgttgtgtgaaactggctaagtctggaggactctttctcaaatccagcccagacctttcccagttttctttgaatgtggttgattaagcagtctctagagtctcttcagttctaacactctatgattccattttaaattaaaaatgtcactagtcatataatgagggttatcttcttgtatttacttcatcacatttatcatgttgattcatacagatttattctcccaaacatatcccactgtccttcattatttccctacctacttactggtaagtacagaagagatgaaattgcatccaaacatctaatttttagctccactggggcattctttgattgatgtcctattctcataagcaagcgttcaaagcgagttcctttgaaggataacagtgagattcttctttattatggtaaaatatacacaacataaaatttaccattttaaccatttttagtgtatagttcagtgctattaagtacattcacactgttgggcaaccatcataaccatccatctctagaactttttcatcaacccaaactgaaactctgtatccatcaaacaataattccctttcttctctaccctcatcccctgccaaccactattctacctcctgtgaactggactcttttaggcatctcatctaagtggaatcatacaatatctgtccttatgtgtttggcttacttcacttagcataatgttatcagtggcgcaggcttcctccatgctgtagcatgtgccagaatctcattctttttaaaggctgagtaatattcaattgtatgtatataccacattttgtttattgattcatctatcaatgaacattgggttgcttgcacctttttttggttattgtgaataacgctgctatgaacatgactgtacaaacatttgtttgagtctctgctttcaattttttttggtatatacctgaaagtggagctgctggatgaaggaaatataaaatgtacaagggttacaatttctccacatcctaacacttattattttatgggtttttttttaaagtaatagccatcctaatggatatgaagtgaaaaatgagatttttttaaagtatgctctcatacactatgacctctaccaacctaaaccaatacaaaaataagcatgtagtcagagaaccagtgacaggcctagaacacataattacacgcaacacagcatatataaggcaaagttataaaactggaatcaaaggacctggacttgagtagcagctgccataatttgtatgaccttagaaattttcttaactcctctaagtttcatctaccttatctggaaaatgaaaatgacaatgtatgttctttgcaggactgtaaaacgattgtcataggtaaaagcacttagaaaacgacatataacaaaaatattagctgtgatacacaacagcgtattaattttctttttttctttttctattttctaatttttatttttttgagatggagtcttgctgtgtcacccaggctggagtgcaatggcgcaatctcgactcacggcccaggttcaagcgattctcctgcctcaacctcccgagtagctgggattacaggcgcctgccatcacacctagctaatttttgtatttttagtagagaccatgttggccaggctggtctcgaactcttgacctcaggtaatctacccaccttggcctcccaaagtgttgggattacaggcatgagccacctcgcctggcctctttttaaattttttttttgagatggggtctcactctgtcacctaggctgcagtgcaactgagtgatcaaggctcactacagccttcacctcctgggctcaaatgattctcccacctcagcctcccgagtggctgggactataggcatgcaccaccacagctggctaattttttttgttgttgttgttgacgaagctggtcttgaattcctgggctcaaacgatcctcccgccttggcctcctgaagtgctgggattacaggtgagataattttcaacatatgtgtctcaagaattttaataattgggctgcatattattttgtgtgtaaaatttgttgtgctgttgatcctcatggatgttccataaaagtatctttctttctttctttttttttttttttacagagtctcgcactgtcgcccaggctggagtgcagtggtgtgatctcggctcactgcaacctttacctcctgtgttcatgccattctcctgcctcagcctcccgagtagctgggactgcaggcatgcaccaccacgcttggctgatttttgtacttttagtagagacagggtttcaccatgttggccaggctggtctcgagctcctgacctcaagtgatccacctgctttggcctcccaaaatgctgggattacaggcatgagccaccatacctggcctctttttttttttttttttttgagatagaatttcactctgtcacccaggctggagtgtagtggcatgatctcagctcactgcaacctccacctgccaggttcaagagattctccttcctcagcttctcaagtagctgggactacagttgtgcagtaccatgcctggttaatttttgtattcttgagtagagataggattttgccatgttgcccagcctggtcttgaactcctgagctcaggcaacccacccaccttagcctcccaaagtgctggattacaggcatgaaccattgtatctcttaacatgccaaaagtatctcttaacatgaaatcttataacaaacttttattttcctttctcaaaatttcataaatattcacaacaaccctgagaagcagttgttatgccatttttataaatgaagaaaatgaggcctagaaaagtgaagtgagtaaatgaagttcaaaaagcaaagtcagggctggatacaatggtgtggacctgtagacccagccaatcaagaggatgaggcaggaggattgcttgagcccgggagttcggggccagcctgggtaacagagagacactctcaatctcttaaaaaaaaaaaaaaaaaaaaaaagaatagaaaacccaaggacatgaatccagacctttctgactctagcccgtggtctttgtaccatgaaatctagtcaaagaagacatcatagaggggaaacaggaaacaatgtttggttgaaatcgattggtagaaacctaaaccaatgaaaacctaaaccagtgaaaagtcaaaaaaaaaaaaaaaaaggttttccgtaataattattagattttcagacatgagtacaaggtcatggttaacaagactgccacccataaaatagtttctacaatgtagttaacccaccagcaaatgaacttacatattgaacccctgtcaaagattaagatatccctgaacagggccaagtcataccaacctgttttctgtaaaacctgttttccttcaacattggatcccaagattccaactgtgtctacagctacaccaatcatagtggggtcctgactttctatcatttcaaagactttttccacaaagataggataacgctcacagatctgttgaggactatccatgacagccaggtttccaaaaaacttcacgaatcc

SEQ ID NO: 5939 - DNA, 6490 bp, Homo sapiens
aagttatataccttgaaagtccctgccatgacacttattagaccagattttttgatatgttgttaagtcatcctgacccctgttatgtacaaactcaatctttgtgtggttgatggtctacatgagatatgtcaagtgtttgtcaatggatttggtccatagtaaatgttcactaagaggaagaggcagtatttaggaacatatattctatgttaaccagctagggttgaaatgttgacttctcttatttgctatgcgatcccgtgcaagttcctgaattttgctgtgccttggttttgttatataactcctgaaagtgtgacgatggcacatgagtttcatacatgaaacctcttagaaaatgcttgggacacataaaaactcagtactgtttagctactattacttccaagatataaccgagtgacaaaaggggagtacaactaatcctcagaaaatcagattaatattctggctttgcgacctgtacaaaagtacttaatttcccagtttagtgcctttgtctgtgaaatgatacgtaacttttatggctattatgatgataaagtaagaaatgcatgccaagtgcctaacataaaatcaatgctaagaaatggtagctattattagtaataatgataaagaattttgcaaaaatttccctttaaatcctaggcgttggtcatattgaattacttgtagtttctcaaacatgttctcttgttttcatgtgtacctgctgtcttgctttgctactccactgtattcttcacttgattgcctcctactagttcttcaagatgcaggtgtttccttccctggaaaacatttcctaaagtcaggggacgtgttttctgttttcctctattattgtacttcttatactctctaattttctattgacctattttcttccaatataagacactttcttcttgtgtgattttcagataagctactaaagtcttggtttcctcatctgtgaaacagggatgtaaaaattaaatgagatgcacttggcacttaggccaatgtctagcaccttccccaatcccaagaacataataggcagtcaacaggtgtttacttatgaaatgaaaataatgatttacaaattttattcaatctaaaaaaaaaatcagaatgtgtagaccatacataggagagagggcatccccccaaaatctgatgttaagtgaataaaatcaatgtcatgaagcagaatggtggttgccagcaggctgggaaaagagggaatagacagttattgtttaatgaatacagtttcaattgtataagatgaaaatattctgaagatggatggtggtgatggttgtacaacttatgaacatatgtaatatactgaactgtacacttaaaatagttatgacaaattttattgtatatattgcaccacattgaaaaaaaatcaacatcatgaatgagattaaaacaaaggtcattttaagagaatatttctcaggccaggaaagacctggttatagcctaattagtagtgatattaacagtaggggactagtcagcatggaaacacacacaaaaaacagagtcacgttgccaggggagatgatcaatctggggactagataattccagtcactttaaaataattttgttacaaagcaggggtggtttatcaacttcaccacggcctaaaagaaatatgctcatgcataaacctctgaacaggtgatttggtgtgcagagtgctttggctttgctgtttagagagaagaacactggaaaacaggtgggtgtaggtgttgtcaatgaaaagaaagattatcctttgtaaattaatgagatggtatcctgatttatgcatatgtcccttctgttctgagtctgtttattaggagtaagtttccctttctctgatcaactcaagattgactttataggtatgaaaaatccaaagcaaaaccctcagcaatcatgacctaccaataaatgaaatgacagtttaggaatccttctgatcccccaaaaccacaacagggcaaagttcattggtaaacagcaaaaaaaattacatgaacactataaacattttttagatattttgtctttttttcaaaggaataatagtaacaaaaaaacaagagagctcataaaaagtattctgagtataaggaacataatcttaatattccatactactcatttttcaaagaatatatccaagactttgaaagtggaatcagaaatggaaaaaggaccaaaaagaaaaaaaaagatagtgaagagaatccagaaataatttggtggcaggtttttattttattcatttatttttgagacagagtcttgctgtgttgcccaggctggtgtgcagtggcaagatctcagctcactgcaacctctgcctcccaggctcaagcgattctcgtgcctcagcctcctgagtagctgagattataggtgtgcgccaccatgcctggctgattttatatttttagtagagacagggttttgccatattggccaggctggtcttgaactcctagactcaagtgatttgcccatcttggcctcccaaagtgctgggaattataggtgttagccaccgcgcccagccctgaagcaggcttttagataagattgcatgtccatgaaaattttgagggaagaaaaaaacttccaccctgttgcaaagattaaggcagtgaaaggaatctgaaaaacactggatctattatgaccaagcttgtctgctcttaatgcattccaaactcctagttccactttgcatttcaatgtagaaatataacagtgttggtaacaaagtaacatctgacattccatgataattcttggggaaaggaagtctcttttgtgaaatatagatggagtcaaatgccttaggagaagttttggtcaaaacgtggtcctctacatgagctctagaagaaatcattcggctccttctactgctgtcgtggaaacaggtttcacatagtatggcccttcactcaggtaagttctgagcctcaaataatttgggttcccaaagatttctgcaattgtcttggaattggcaagtgctttcactagttcatatttggcatcctttgaagctttgtcatgctccacagaccggtccaccacatattctacaaaacctggactgttaaacataagtttctgagcccagggttggtttgcaatggcctgaaatggaaggcagaaagaatacaattcccctgagtggaagttgtttgttaatgggatggcacaatatttacaaagaaatctggcaacatgaactttaaaaatgttaccttttgtctaagtaaattccttcctgagaatctaacttaataaaataatcttaaatatgaaaaatctttgtatacaaaaatgttcataatagtgtgaaagttacaatataaatatctaataatgggagaatggttaagtaaattatggtatatagcaataaaaataaacattaacaataatgtttacaaaaaataggaaatgatacaggtaaacctgttatataaaaaaagcagattcaaattataaacaatgcatgattacaacagtggaaaaataaaaactaaagtagaaaagactaacctcaagatactcatatagtgcacaaacattttcaagaatgttcattgtggtatcatttgtaagatactatctaaatcttcatttataggagaatgatatattgtggctattcaatgaaataccaactttctaactgcctcttttaacatagacaaattttaaaaaaacgtaacattgaagagaaaaaaaaaaaaagcaaaaactgcaattacttttgcaccaacctaatggaatgatacaaacagcatgataccacttacaaagtttatgaatatctaaaatactgtgttttatttaaggatacacacaatatgtagtagaaatatgaaatcatttatgggccctgactttgtgatagtgattttatctaagaacagaggaaggggaataggactgggcagaggtagcaagatacaactatatttgaaatatttcaccaaaaataaacacacactaatacaaaaactaaaaggaaatacaccaaaaggtagaactttctgtgattttaaaaaattctacttctaagtcttttccaaattttaagattaagtttttcaaaacctattacgttttaatgaaaaagaagtaacaagtttatggcctagttttttcctctcaaaatgtgttccacagacaagtagcatcagcaacacctgcgagcttgttagactttcaggatcacaggctctgcgccacaactactgaattagaatctacattttaataagattcctaagattaatgtttgagaaactgtggcctgcttcacaaccaagcatgaaagtaggcagaaataaaaatagttatcccaaccagtaaatagaaaattatttctacaatggaaccagctaagcacaggataaggtagaagagcaaaaccaaaataaactaataatgaaaatactaagcaggatccaaaatggccatctcatacaatgaccatttacaagggtgaagcagtcttaaagaaatgtttctggctaggcgcggtggctcacgcctgtaatcccagcactctgggaggccgaggcgggcggatcacaaggtcaggagatcgagaccatcctggctaacacagtgaaaccccgtctctactagaaatacaaaaagaaattagtcgggcatggtggtgggcgcccgtaggctagctgctcgggaggctgaggcaggagaatggcgtgaacccgggaggtggtgcttgcagtgagccaagatcacgccactgcattccagcctgggcgacagagcgagactctgtctcaaaaaaaaaaatgtttctgaagattataggaatacctgtatccttcaagacccagatcctgtatcgcatcctcaggaagccttccctcttttgtccctgccattttccttattccctcccagtctaggccatgtatgctgtctgagatcccattattgatatgattactaaagcgattactatcttgctatgctggggctacaaagataaatcagatatgcttcctgctctcagccaactctacttaataggtaagacaagtcgataaataaacatttgcaaaataatataacaaatagaacacaaaggtataatccttaccacagctgtaattatataagtaactgtacaattatatttactgcctggctccttcaatagacaggaaactacatgaaaggaaggtctttatatattttcttcactgttgtatgcccttcactgagcaaaaacggaaactcaacaaatatttgctgaataaataaatgcaacatatgagaaccaacattgtttaactcaaccttgtcaatctgggcaaagtgtgctgaagacaaggagttagtccttgacgagtgagtaagaggttaagaagcaaagttaaggaagagtgttagatacggagaccccagcaaaggtccagagacacaaaacaaacagtttggtaccactggagcattaggtgccagaagccttattttctgcacgggaaataaggattaggaagaccagggctaggttaatagaggatggcagataaaaagtctggaattaactgtgtgatcccatagcatcctgttcaaacctcaaacagcacctaatatcttttactgaaacaatctgtttacacatctgtctccttacttagtctctaaggtagcagaaggtagaaactatactatgcacttgtgcatccccagagatggcacaggctctggctcactgttaagtactcaagtgttgagctggcagggtcccagaaggacctatggaagtgaatacctaccgtaaacacttttaaggcagcacagtgtagttcagggaagggctgactactaatgccacggaagagctccagtggatcccgagataaagaagaaaaccaggattctgtcatcctcagaaggtcatcagtctgctgctcaggctacaggaaagaaaaggaaaatctcatcaaaagttaactgatctggagaaaagcacttatttagaagtcagacacctgagtgctgatggcactctgtcattaatttgttgtgtgaaactggctaagtctggaggactctttctcaaatccagcccagacctttcccagttttctttgaatgtggttgattaagcagtctctagagtctcttcagttctaacactctatgattccattttaaattaaaaatgtcactagtcatataatgagggttatcttcttgtatttacttcatcacatttatcatgttgattcatacagatttattctcccaaacatatcccactgtccttcattatttccctacctacttactggtaagtacagaagagatgaaattgcatccaaacatctaatttttagctccactggggcattctttgattgatgtcctattctcataagcaagcgttcaaagcgag

SEQ ID NO: 5940 - DNA, 353 bp, Homo sapiens
tacattgtggaaaaaaagtgtgtgtgtgtgtgtgtgtgtgtgtgtgtgtgtgcttacatatctataaccaagaaaaatgtaaccaagtcttattttgctttataattagtggacttttaaaaatcattctatggtactgttatgactcagtgatggcagcagtgactcagtgatggtggtgaatgctcagaattaaaaggaaaaccttaaataggggaatttttgtaataaaatgttattcttggctgggcgcggcagctcatgcctgtaatcccagcactttgggaggctgaggcaggcatatcacctgaggttgggcattcgagaccagcctggccaacgcggtaaaaccc

SEQ ID NO: 5941 - DNA, 339 bp, Homo sapiens
aaaaatgagatttttttaaagtatgctctcatacactatgacctctaccaacctaaaccaatacaaaaataagcatgtagtcagagaaccagtgacaggcctagaacacataattacacgcaacacagcatatataaggcaaagttataaaactggaatctaaggacctggacttgagtagcagctgccataatttgtatgaccttagaaattttcttaactcctctaagtttcatctaccttatctggaaaatgaaaatgtcaatgtatgttctttgcaggactgtggaccattgtcataggattaagcacctagttatcgacatataacaaaattat

SEQ ID NO: 5942 - DNA, 353 bp, Homo sapiens; identical to SEQ ID NO: 5940

SEQ ID NO: 5943 - DNA, 9717 bp, Homo sapiens; identical to SEQ ID NO: 5938

SEQ ID NO: 5944 - DNA, 6490 bp, Homo sapiens; identical to SEQ ID NO: 5939

SEQ ID NO: 5945 - DNA, 353 bp, Homo sapiens; identical to SEQ ID NO: 5940

SEQ ID NO: 5946 - DNA, 339 bp, Homo sapiens; identical to SEQ ID NO: 5941

SEQ ID NO: 5947 - DNA, 353 bp, Homo sapiens; identical to SEQ ID NO: 5940

SEQ ID NO: 5948 - DNA, 699 bp, Homo sapiens
aaacaagctcattgttaattcatgcagttttaatttatgcataggagaattatgcaggataattacctgcagttgaaggaaaatgaatagcgtcagatgtggttaattcacgcatggtttacccttctatctctctatcagaaaagatttaaagtggtaaccaatctgaatgatatgcaaaattgcattggtttgctaagtagaagtattttttttatttgcatcacaaatagagttctcagatttggactgactagatttgaatataatttccagaacaatagctgtgattcactgacttaactcatatgttatctcttccagaagtgcccatttttcaaatcagtgcaaaagaagctatcttcatgggccccatgttagcctgagtatagtttcctttatgaggataattcaatgagaatgataattatttcctatatcaagatttgtgggagatttacggtaatgatcacactacttgttcccacattgtccctgaaccttcatgatccagtggcttccaaaaactgaaacaaacagctggaacaaattatggggcaatgaatggacatcagtggaaatttccttgtgacttttgtcaagcaatagatagctgctaaggcctctttgaactcacacctagtaattgagagaaggctaagaggtggttcaagtttactgaaaaaaaaaaaaaaaaaa

SEQ ID NO: 5949 - DNA, 915 bp, Homo sapiens
caccacacccagctaatttttgtattttttgtagagatggggtttcaccatgttggccaggctggtctcgaactcctgggctcaagcatctccctgcatcggtctcccaaagtgctgggattacaggtgggagccaccacgcctggccaagcttctcatacaatgaaacatccaatctaaataaacatgttttatattattataaaagtaatagctatcactaaatagcatttctaatgtgccaggcacatgtactaattcattgagtgctcacaacaccctgaggtaattactccattttatagatgagagaatggaggctctgaaaaattactaagaggcagagcttggttttaaacctaggccgtctggcatcagagtctgggctgtgctgcggctgtggatgtaaatacacagactccaaattcagagccacagttcccacagcaactgccagtttgtagcatgttcaaaaagcccgagttctcccacataacttagctgagttgtggctgccagatcttttggcttagcaactcgaaacagagactgtccacgtaggctgaggttctcagttgataccaaggcgttgatgagactcttcaggcttctattataatcaagaagaagatttttcacatcctccatctgaaaggttcattattccagctgggtaagctgtgtgtctgcaaagatgccctatcatcaggaaatgaaatgggcactttttctccaagtaagcaatgcatgctgataaataacgccatatcagtggcgtgccttctccttcctcttgcaaacgattgacgcctcagagatctgaacaaccccacaaaaggggaggaaaatggagaaaaaacaaacttgagagaaaaaaggaatcattccttttcttttgtgaggacttttgtctga

SEQ ID NO: 5950 - DNA, 1956 bp, Homo sapiens
cactgggagctgcagaccagagctgttcctatttggccatcttgccagcaatcagaccagagttttaaatggactacaaaataggtcaaactctatttcagaactagaggctaggaataatgtccaaacttggttatgaaagttttttttttttttggtctggtaggataagagggtttttactcatcttaagtttgaattaaactttgtaacaaagttattgtttttttaaacaatgcatgtatcaaattatctgtctcattagataactaggtagacttttccaagatggtttcaaaatcaaatatatattcaaagatcttccagtgtaaagcaataggaatgaaacaagccatgagaaagcagaatattttgagtatattctcatgcctttctttaaaggagaagcgcctatctaaacagttacagaaacccaaattcaaagtagattaaacaagaagtaaatttgtaaactcttttaactgggagacaggaagtagggagggctccaggcacaatatcattagcagttcaatgtgaacgaagacccatgtcctttccaagcctccctctgccatcagcattgccctccttcccagggtcacagatggctatcaatggcaaaactggggttccgcgttctcttctcctcatctggcaagagaaaatgggaaatctctatcccaagcttggattaaaaattattttcatttttgtgttccagcaaacttgggtcctatgcccagccatggaccaaaaataggcttaatgtgaatgttatgtgctgattggattaaaataagttctgactctgaatctgggaatgtggtcaccttcctcagagacaagttgagaggttggcttatctgaataaaagcagagaatatgagatgctggagaggtgttcattaaggagaacattccctgaggtgaattaacggttagaattatctatctctgtatttatctatccacccatctatcatcatcatcacctcatctccctcctttctctctctctaaatatatacatgcgggtatgttgagtgtgtatatatttatttttttgtgtgtttatatggtgtgtgtgtgtgtgtattccaggcagatgtgtgcatatatacccaaactttcctgatgaccttgaaattaaatgggtcatgtgaagctaaagattatagaaccccttgattcctttataaacagtatttctaagataagatcaacactaatctttcaaattagttgactgtgtatagaacaacttgtttatttaaagtcatctagtctaatgcaatcaaggagtaaattataaataaccagttagcataaatggaaagaaaatagttccttttctttgaattcatttcatgtttaatttttcttgcgcacatatagaaatgaatagaaatattcccatttcaatatgcaaattcagccactatatagtttgtttctttttggtagctaataataataaatttttaagtaagatctgattttgaaatatgaaaagaagtttatcctttcctgttttaataccacctgatacccgtttaacttactgtgtttgattcttggggacatttatgttcaaggttctgtcaaagcaatctattattcttgtttttacctgatggatcatggagaaaaataatggattcagttatgagaaacagtaatagatttttttaactgccataaatttctctccctgtattaaataaaaggatcaggaaaagataagttgaattttcctacaatgagccagctcttcttaaatttacctcccataaattgtagcaaagcacttttcatataatgttttatttatgtaattcagttatttggagatggtggtgagggatgtgagtacatcatttcatgttgtatttcaaatctcttttgacagaaaccctaagaatttgcaataaagaaaattcaatgttccattaa

SEQ ID NO: 5951 - DNA, 1957 bp, Homo sapiens
cactgggagctgcagaccagagctgttcctatttggccatcttgccagcaatcagaccagagttttaaatggactacaaaataggtcaaactctatttcagaactagaggctaggaataatgtccaaacttggttatgaaagtttttttttttttttggtctggtaggataagagggtttttactcatcttaagtttgaattaaactttgtaacaaagttattgtttttttaaacaatgcatgtatcaaattatctgtctcattagataactaggtagacttttccaagatggtttcaaaatcaaatatatattcaaagatcttccagtgtaaagcaataggaatgaaacaagccatgagaaagcagaatattttgagtatattctcatgcctttctttaaaggagaagcgcctatctaaacagttacagaaacccaaattcaaagtagattaaacaagaagtaaatttgtaaactcttttaactgggagacaggaagtagggagggctccaggcacaatatcattagcagttcaatgtgaacgaagacccatgtcctttccaagcctccctctgccatcagcattgccctccttcccagggtcacagatggctatcaatggcaaaactggggttccgcgttctcttctcctcatctggcaagagaaaatgggaaatctctatcccaagcttggattaaaaattattttcatttttgtgttccagcaaacttgggtcctatgcccagccatggaccaaaaataggcttaatgtgaatgttatgtgctgattggattaaaataagttctgactctgaatctgggaatgtggtcaccttcctcagagacaagttgagaggttggcttatctgaataaaagcagagaatatgagatgctggagaggtgttcattaaggagaacattccctgaggtgaattaacggttagaattatctatctctgtatttatctatccacccatctatcatcatcatcacctcatctccctcctttctctctctctaaatatatacatgcgggtatgttgagtgtgtatatatttatttttttgtgtgtttatatggtgtgtgtgtgtgtgtattccaggcagatgtgtgcatatatacccaaactttcctgatgaccttgaaattaaatgggtcatgtgaagctaaagattatagaaccccttgattcctttataaacagtatttctaagataagatcaacactaatctttcaaattagttgactgtgtatagaacaacttgtttatttaaagtcatctagtctaatgcaatcaaggagtaaattataaataaccagttagcataaatggaaagaaaatagttccttttctttgaattcatttcatgtttaatttttcttgcgcacatatagaaatgaatagaaatattcccatttcaatgtgcaaattcagccactatatagtttgtttctttttggtagctaataataataaatttttaagtaagatctgattttgaaatatgaaaagaagtttatcctttcctgttttaataccacctgatacccgtttaacttactgtgtttgattcttggggacatttatgttcaaggttctgtcaaagcaatctattattcttgtttttacctgatggatcatggagaaaaataatggattcagttatgagaaacagtaatagatttttttaactgccataaatttctctccctgtattaaataaaaggatcaggaaaagataagttgaattttcctacaatgagccagctcttcttaaatttacctcccataaattgtagcaaagcacttttcatataatgttttatttatgtaattcagttatttggagatggtggtgagggatgtgagtacatcatttcatgttgtatttcaaatctcttttgacagaaaccctaagaatttgcaataaagaaaattcaatgttccattaa

SEQ ID NO: 5952 - DNA, 546 bp, Homo sapiens
gatgatctttacaatttggtatgtttttgcagtggctggtattgattgttcctctctatgtttagtgcttccttcaggagctcttttagggcaggcctggtggtaacaaaatctctcagcatttgcttgtctgtaaaggattttatttctccttcgcttatgaaactgagtttggttggatatgaaattctgggttgaaaattcttttctttaagaatgttgaatattggcccctactctattctggcttgtaaggtgtctgcagagagatcctctgttagtctgatgggcttccctttgtggctaacctgacctttctctctggctgcccttaacattttttccttcatttcaaccttggtgaatatgacgattatatgtcttggggttgctctgctcgaggagtatctttgtggcgttctctgtatttccttaatttgaatgttgacctgtcttgctaggttggggatgttctcctggataatatcctgaggagtgttttccaacttggttccattctccccgtcactttcaggtacaccaatc

SEQ ID NO: 5953 - DNA, 1215 bp, Homo sapiens
cccccccacactcagtaaagaattttccaacccaaaatatcattagtcctgaggttgagaaaccctgtcctagcctaactgtgtacctctatagctatgttttatagttttagaatattaaaacctcagatatttatgtgggtaggtacttaaatggccaaaaactttaactatgaaatgttactgtgtagtatattgaatataggaagtgatgaagattataggtattttattcccatgtttccatctataaatagccttctcagattcagaaaacaatacagagaacatcagaaattttctaaaatgggtcactttgaaaagaattctttttctcactattaatgctttagaagcaagacgcaattttaaagctttagttccttttctttcagtcattgtcttagtttgggtacaaaaatgtcatttcagtaatgtactgaaatcttataagtgaatagttgaagctagtaaaaatgataccagtataaaaatggtacttgtagtccatgagcttgaacccaatgactgattgtttgacttttaaaataagtaatagcagccatttgggagtagggggtaggtggggaagatgtactccgtatcaaataataatgatgttgaaataatgatagtaggtatgtattatggattggagaagcacttattacactatctaacctaatatgtagaacaattcttgagagttgtatctgtcgttatttctgaatgtgaagctcagagaagtgacacagagtaaatggctgatcttctatattgtagtatattttgtccttccctcttccctgaggaacaaagcacgtatctttagtctctttgatatttattctgagaccaagggcttgcttgacctgatgattttccttcagctctctgaaggtgctttttccacaatccaagtgattctgatacacactaaagttgagaatcactgcactagatcactttgtgttttctgattttcaaggttgatacgtagctttaatacagctcttctgttgacagttattactttaattttgcatttgttccttgtaagaatggctggaaactgtgtgttgacatttgaggatgggtatgcaaggaaaaaatatacttctgtttacttactctgactttgaaatagtgttatttttctatatctgaaataaatgcttctaccatagaaataaatttgcctatactatctgagaa

SEQ ID NO: 5954 - DNA, 2687 bp, Homo sapiens
agatgaaaagattggattccgaaatgatgcaaattttgactggcaaaatgtggcagatttcagggatgcaggtggatccttaactgaggtcaaggtggaagaggaagaaagggatccgcagagtcctgaagtaagtattagcctctgtaccctcttttaatcttttcaattctgatgtgggagattattgttcaggaactgttaacacattccaagattttcaagcttatttaaaaatagtacataacaagtcattctgcttttctctttacatcgttaatacttttcttcccacctaaatataattacctaggttatatgtattacagacatcaagtaattcagtgtaaatgatattcaaaattcaaattaagtatttttccccaaacgacgcagaaagcttttaagaaatatttagacaaattgccacaaagtagaagtcaatactgaaaattgcttttctctttgctcttagtttgaaattgaggaggaggaagaaatgttgtcatccgtcataccagattccaggagagaaaatgaacttcccgatttcccccacattgatgagttttttacccttaactcaacaccatctagatctgcatatgatgagcctcatttgctcgtaaatattgagaaacagaaactagagttggaaaaacgacgactggatatcgaggccgaaaggctgcaggtagaaaaggaacgcctacaaatcgagaaagagaggctgcggcatttagacatggaacatgagcggcttcagctagagaaggagcggctgcagattgaaagagaaaagttgaggttacagatagtcaattcagagaaaccgtccttggaaaatgaacttggtcaaggagaaaaatccatgcttcaaccacaggacatagaaacagagaagttaaaacttgagcgagaacgcttgcaactggaaaaggataggctgcagtttttgaagtttgaatctgagaagctgcagattgaaaaggaacgcttacaggtagagaaagacagacttcgaattcagaaagaaggacacttgcagtgatttttccaggcttccatttagcaaatgtttgaaaactctagatttttctcatatcaggtgatataatgatggttgctggattagctgtggtttcttgtctaatgtcagtgttcagtaggaaaaagttatatgtggataactgtatgcctaagtagtatataaaagctgtgccctagcgtaaacagtatagcagaaacttactgtgctggactctttaccttataatattacatagagtcttgtattgtctgtgtacccagagtttacaattatgtccatataaaattctagcccagaagttctcatctggggtagattttggccttcagaagaccaatttggtgatgtctggagacatgttgggttgtcaaaactggggtggggaaaaggttgctactgtgcaatgcatacctcctcaacacccccccacactcagtaaagaattttccaacccaaaatatcattagtcctgaggttgagaaaccctgtcctagcctaactgtgtacctctatagctatgttttatagttttagaatattaaaacctcagatatttatgtgggtaggtacttaaatggccaaaaactttaactatgaaatgttactgtgtagtatattgaatataggaagtgatgaagattataggtattttattcccatgtttccatctataaatagccttctcagattcagaaaacaatacagagaacatcagaaattttctaaaatgggtcactttgaaaagaattctttttctcactattaatgctttagaagcaagacgcaattttaaagctttagttccttttctttcagtcattgtcttagtttgggtacaaaaatgtcatttcagtaatgtactgaaatcttataagtgaatagttgaagctagtaaaaatgataccagtataaaaatggtacttgtagtccatgagcttgaacccaatgactgattgtttgacttttaaaataagtaatagcagccatttgggagtagggggtaggtggggaagatgtactccgtatcaaataataatgatgttgaaataatgatagtaggtatgtattatggattggagaagcacttattacactatctaacctaatatgtagaacaattcttgagagttgtatctgtcgttatttctgaatgtgaagctcagagaagtgacacagagtaaatggctgatcttctatattgtagtatattttgtccttccctcttccctgaggaacaaagcacgtatctttagtctctttgatatttattctgagaccaagggcttgcttgacctgatgattttccttcagctctctgaaggtgctttttccacaatccaagtgattctgatacacactaaagttgagaatcactgcactagatcactttgtgttttctgattttcaaggttgatacatagctttaatacagctcttctgttgacagttattactttaattttgcatttgttccttgtaagaatggctggaaactgtgtgttgacatttgaggatgggtatgcaaggaaaaaatatacttctgtttacttactctgactttgaaatagtgttatttttctatatctgaaataaatgcttctaccatagaaataaatttgcctatactatctgagaa

SEQ ID NO: 5955 - DNA, 498 bp, Homo sapiens
tgtcgttatttctgaatgtgaagctcagagaagtgacacagagtaatggctgatcttctatatgtagtatatttgtccttccctcttccctgaggaacaaagcacgtatctttagtctctttgatatttattctgagaccaagggcttgcttgacctgatgattttccttcagctctctgaaggtgctttttccacaatccaagtgattctgatacacactaaagttgagaatcactgcactagatcactttgtgttttctgattttcaaggttgatacgtagctttaatacagctcttctgttgacagttattactttaattttgcatttgttccttgtaagaatggctggaaactgtgtgttgacatttgaggatgggtatgcaaggaaaaaatatacttctgtttacttactctgactttgaaatagtgttatttttctatatctgaaataaatgcttctaccatagaaataaatttgcctatactatctgagaa

SEQ ID NO: 5956 - DNA, 310 bp, Homo sapiens
acatctcttaccataaaaactgcattgaaattgaaaatgaagcagttgaaaagaaaaaggaaaagcaattttagtgttcaagaaactcagacccttttgaaagaaattacgaaaaggaaagaagtcattttttccaagcagctcaatacaacaattaatgtgatgaagcgaatggcttgggaagagattgcacagtgtgtgaatgctgtaggagaaggagaacagaggacagggacagaggtgaaaagaaggtaccttgactggcgagcacttatgaagagaaagaggatgaaggccaacattaagctgg

SEQ ID NO: 5957 - DNA, 82 bp, Homo sapiens
tttgttttgagacagagtcttactctgtcacccaggctggagtgcagtggcgcgatctcagctcactgcaagctccacctcc

SEQ ID NO: 5958 - DNA, 956 bp, Homo sapiens
gtacttcaaaacccccgaggcctagatctgctatttctctcccaaggagggttatgcgcagctctaggagagagttgttgtttctatgccaatcagtctggggtcataaaggatactctccaaaaagttcgagaaaatctagatagacgctaacaggaattggaaaataacacccctggtaccaaaacatgtttaactggaatctatggctaactactctaatcactggattggcgggaccccttctcctcctcttgttaggtttagtcttcgggccttgtatattaaattggtttcttaaatttataaagcagttcatagcttctgtcaaacttacgtatcttaaaacccaatataactcccttgttgtgactgaagaatcaatgatttgattacccaaaacatgagtggggaatgtgatacctaccctgttttaacctgccccaagtttacgtgtacagtgggtcagaagggtgacttctgacccttctgctcagagtgactctctcttagctgagatagctggacactctccattttagcttcttcacttgcagtccccttatccccctcccttaagggaataactagtgcaagctgactccaagcacatccaggaatgcacttactgataagatattgaggcaagctgtaccagcagctcctggggacgtgctcggcggatggtacccaagcccctgcatttatctctttgtgatagtttaagcccctgcacctggaactgtatttttctgtaactatctctgtaaccattaatttttttaactttttgcctgttctgcttctgtaaaaattgcttcaagtaggctccccctcccctatttagaccatggtttaaaaagaaatctatcccgttcttcgaggccaagagaattttgagctctagccatctctcggtcgccggcaataaaaggactcctgaattagcctcagaa

SEQ ID NO: 5959 - DNA, 954 bp, Homo sapiens
gtacttcaaaacccccgaggcctagatctgctatttctctcccaaggagggttatgcgcctctaggagagagttgttgtttctatgccaatcagtctggggtcataaaggatactctccaaaaagttcgagaaaatctagatagacgctaacaggaattggaaaataacacccctggtaccaaaacatgtttaactggaatctatggctaactactctaatcactggattggcgggaccccttctcctcctcttgttaggtttagtcttcgggccttgtatattaaattggtttcttaaatttataaagcagttcatagcttctgtcaaacttacgtatcttaaaacccaatataactcccttgttgtgactgaagaatcaatgatttgattacccaaaacatgagtggggaatgtgatacctaccctgttttaacctgccccaagtttacgtgtacagtgggtcagaagggtgacttctgacccttctgctcagagtgactctctcttagctgagatagctggacactctccattttagcttcttcacttgcagtccccttatccccctcccttaagggaataactagtgcaagctgactccaagcacatccaggaatgcacttactgataagatattgaggcaagctgtaccagcagctcctggggacgtgctcggcggatggtacccaagcccctgcatttatctctttgtgatagtttaagcccctgcacctggaactgtatttttctgtaactatctctgtaaccattaatttttttaactttttgcctgttctgcttctgtaaaaattgcttcaagtaggctccccctcccctatttagaccatggtttaaaaagaaatctatcccgttcttcgaggccaagagaattttgagctctagccatctctcggtcgccggcaataaaaggactcctgaattagcctcagaa

SEQ ID NO: 5960 - DNA, 182 bp, Homo sapiens
gtcgaattagcaccaggtataacttatctgcttctccctttcaggctacctgtaatcagtctctacttacttccttaaacacctcagtctcctaccaggcacccaacaatacctggctggcctacacttcaggctcactcattgcatcaatgggactgaacctggacctctcctgtgcgtgt

SEQ ID NO: 5961 - DNA, 182 bp, Homo sapiens; identical to SEQ ID NO: 5960

SEQ ID NO: 5962 - DNA, 1869 bp, Homo sapiens
gaaagctgaaaggtgctggaagcctcctgcactttgggaatatacagtcaggaacaattgtcaggagttctgtagttgattctgtaggttgggattgccataaggttggttagaaaaaagatgtgcgaaagctttcctgagggtttttgcccttgctttcacatgtcccataattgaaattaagaactgctggcaactggttagtgaccagtgttgaaatgggaaaatattactggcttatgcttttgcttatagatattgaaatttaataaaatttaaccatagttacatatgattctatgaaattaggtaggctcttcaagaaaaatgtgagcaatgtaaggcagggtatttttgggaggggggtgctttattgtataggcaagctctcgaacagtgtctgataattagtagtgtctgacaatatttgctgaatgagtgaactcatggtaacataactccagtatggcagattgattcttggtgctttttttccagtggcaaacttttatagaaattggagagtttcgtaaagacttttaaaaagttgtcagaattacctattatgtcctttcctagataatcaatttggaaacaattgctggtaccttaagcccgatgtatgcctcctattatagtgttgaaaatgttcttttgacaaatgcatcaatgaccaggcacatgagaacagtgcacagctgtagaaaaacaacaatgaaggtcttcgacacaggagagagtctgcactgcatcacagctgatccgaaagttaaattcaatgaaaaggcaaatattttggtcaggagaggaattcttcctagggagtattagcacagtgtatttttagttgtgtggctatttatagctgcccaatggcttgcgtctgagtctttatttggtttttaggacatgctaaggattgagggtcgtgggccttaattgtatagaagacgcagttgcgtttggttgcctggaggcttctctgtgaagcctggtgggacacctgctggccagtttggcccttcttagtgaaggtgatagagacaagggcagaaggtcattgtatttataggatatttgaagcttatcttgtttactttgttaataatacttgagtcatttttctaaacattctttgcataacagcaaagattaaaaagataagtaatgtaatatattaggccctagttgtcattcacctgttcttgtagagctgatacttttttcttgatcaaattttaggtttaatcatatttagcttagaagagtggtctgtcttaagagtattctgattatttaggaacatctagatgaaacttctttgccttagtccatcgtttctcctttaaattcctaaaggcaggaatgagtgtttcttaaaaccaacatgtataaagcaacattttaggcaaactgggatgaggaaaaacatcttgaagggggcttcataatggtgttggagcctgttaaaaatgtggaatggaaagccgatcatgaaaacagatagtactgacttttggcaaaatgagtctttatgaaaacataccttaatgattatctgacaaatgcaagtgctttttgaggttaacagaattataaacaggagactgcagacactaaggtcactactgagcagcacgataattcgtgtggtgtgttctttttaaagattaacaatcttaagtcttttgtatgttatgttgctaagttatttgggggaaagtgttaaaataagtgctcttactttctttctccactgcttttgcacaaaaactttactgttcaaagaatattgtccattcagtttactttttatttttaagatgaagtatcccccaaactggtcatgccaggaaaaaaaaaaaaaaa

SEQ ID NO: 5963 - DNA, 221 bp, Homo sapiens
cagcatgctttcttccgtcagagtgctggagagggagctgttagttatcttggacctggaaagggcccagaaaataggtgatttattcctggttgactttcagagttaacaacacattgaagtgtgaactctgttcgctgtatgtgtgtcttgcatgctactagatgagatggtgacagaagcaagacatagaaaaaataggttatttattaaactcaaac

SEQ ID NO: 5964 - DNA, 27382 bp, Homo sapiens
ggtccactgtatagtttatagaattagttttttagtggagttgatgatgcctttccagttactaaaaaatcttcatttagcattcagtcgtagtacctgggaatcatggaggtggggagtgaatgaattgccatgtgggaggaagtgagagtaagtggaaagtggcttttccaggctgacatttgatgccattgggatctctgatttttttcctctctccctcccctccccctgaggaaacaatgcccttttgataataatttgctctctgcctgcctgacaagtactcagctgagatttctcagccaacaagacagtacaaacacttgcggtaccaagcaccactttctcaaaccctggcctcattgaggtgataacaactgtcctgctcaagggattccccctttccccctcttcctcactccttcccccacctcctcttggtgttatacagggatatcatgtccatttataaggagcctcctccaggaatgttcgttgtacctgatactgttgacatgactaaggtatgtaacttgatgggggtttggggggttttgggaaattgggggccataaggttgcaaaagcctaaaagagattattcagctcacctctccgattacacagatgaagaaatcaagaccccaggagagtaagtggcttgtccaaggtcacatagtgaggtggagcagcactttgaagaggtgtctgttattagtgtaccccataggtactgattggcttggaaaatcccagttcatgtctgttgtcgcagcttgactatttatagggcattctttcactctcaaaaatgctcctgtttggataataaattatatggtcaccctatccattgtactacccagctcttcccccatcccgttactcttgacattaactatgctatggtactataaatcagatgtagggaaggttgggaatagggcaagcttgactgaagtgtttgtggttaaaggactttgctcaggatcctgtccttactggttgcgtttaagtatcccttccaccccaaagactatacctctcttgtcctcctctcagagagaaagcttaatacataatgtcacatttctctggcatagatacctaggtttctctgtcactgaatgctctacccacagaagtgcagttgcacttaaactgatgttagaaagaaatcatatttcctaaacctaatgctgtttaagtgaaacacatagttttcttacagtaaatttcttacagtaaaaattcagattttgtattgttggtgtatctttttttgttgttttgaatagatttcccttcatattttttttttatgtagttagaaatgtttttcctaggacatctcgtcctcagtcaagtaccagtgttaatagcctagtacctggggtcccagagttgatgccatgttgagaccagttgagtttactattccaaatgactgagagccagaatatgacgtagggtcttgccaggagggcaaggtgggaactatagacttaggcattggattgccacgtccctttccttttgctgttcaaatgcttagcagacctaaatgcctaggagcctttgtggaagaagaaatataactgagtcagttcaggttttcctcccttcagggggggaaatcctgttgaagaattatggcttgagggggaagagaatttagtgtcgttttcaggacggctgattttttttttttttttttttttaaacagtattggggaaagttctgggactggtctaatggctctgagtggaccctgagtcttccccattttcagtcatgatgtgctgcctgagccacatcctccacaataggtttgatcctctgcagaggaagcaagcagataccctaggcatccatcacaccccctaaccctgctgtgttactggcactgggctgtggcctccaatccctttcttcgtctcctttcatcatactttcccttcgtgccacataaatgtagggtggggttgcatcatatgcatgtttggcctgggcaaatccaaacatatattcagtcaaaatctgtgtcgatttctcaaaattaaaaacgctagggttatattttatagataagcatattatatttttccacagtggtgttttatccattatatgtaacactgatcagggaggtctgcacaaaaaaaaaaaatgctttaagagagttttaggggatactcaagagtgattttgactagattcagttttcgccttgggctctaactttagaagtaacccctgagtaagatgtcattccactgtaatgagatttcttaaaattccaaacctacgtattagtatgagtgaatacaggatgttccttctgcatggtgaggatatagaacatgtgtaccagattatggactctgcttctggtgtgggtagtaggtggagggtagccaggagggcttggggtgggtcatcacctcacaattttgagatggggttttattttgcagattcatgcattgatcacaggcccatttgacactccttatgaagggggtttcttcctgttcgtgtttcggtgtccgcccgactatcccatccacccacctcgggtcaaactgatgacaacgggcaataacacagtgaggtttaaccccaacttctaccgcaatgggaaagtctgcttgagtattctagggtaagaggagacttttaagtagccaagtcggttgttagcagataattactctaggtcagcctttatcaaccggagtccctcatctgaactacagaacacagaaaatgattgagtgactcttctcaaatctcctcaggatggtatgtgactagtatcattctagatgcagaggggagaagttaatttattacagtggtaacctttgagaagtggttctcttaagagtgtggccctgagcatctgggaacttgtagccgagcagtttctggggccctatcttagacctacaaaagaaactctggggttggggccaaaaatctggtttttttggttgttgttttttgtttgttttgagacggagtcttgctctgtcgccaggctggagtgcagtggcacgatcttggctcactgcaacctctgcctcccagattcaagcgattctcctgcctcagtctcccaagtagctggggctacaggcgtgcaccaccacacctagctaatttttgtatctttagtagagacggagtttcaccatgttggccaggatggtctcgatctcttgacctcatcatccactcaccttggcctcccaaagtgctgggattagaggcatgagccaccgtgcccggcccagaaatctgttttttacaagctctccagatgattgtggtgcatactgcagtttcagaaccactctcttggggtgttaaggccttattttctctcctgaacaggttgagaaaggctgcaggtctgtgccattcaagatttggggtgtcttaatttgagtcttgcaataagttgctttgaaggcagtggcggtggtggtggtggtgatcattatggtttcatttttgttttgttttgtttgtttttgttttgttttgttttgttggtagaggcaggtatctcactatgttgcccaggctggtcttgaattcttgtcctcaagcagtcgtcctcttgtggctcccaaagcactggggttacaggcatgagcctccatgcctgacctgattataatattttaataatgacaaatgtctgagattggaaatcacattagatatgaaatgagtttctagtgcatcttctttctggatgcttctgaggttttgcttcatagagttcccattttagttgcctttgggggctgaaaactcagtgtggacatcttctcgcatattttggattggtgtttttatagtggtctgaacttctctgggacagagaacacgtgcaggttgaagttgagaaagtacccccaaactgattattctgttttcctgctatccaacatgtttccaggtttgtgtgagggaagagcagcatttgaaataaacttagagacatgattcatttttctaggacttgctcagacccagggatatgttctgctgtgattttggcagtgaagaagtcttttaaaggaggttgtccttaaagaagtacttcatctcgttagggtacttaattaattgtctttgctggtaggctaaaacccatgatgataaagaaatttagtcgttgcttctgtatgaaatttgttcgcgaaagcgtgtctcaaagtaggctctccctcattgggtcaatataaaactcttttgagataccagccacaggacagtggggtaaaagtagtagaagtgtgttaggtagaaaaggagaagctgccctgaaattgaaaatttgccataaagaatcacagagtagaaaatttcagccgggtgcggtggctcacacctgtaatcccagcactttgggaggccgaggcgggtggatcacctgaggtcaggagttcgagaccagcctagcctggcgaaaccccgtctctactaaaaatacaaaaattagccaggcatggtggcgcatgcctctagtcccagctactcgggaggctgaggcacaagaattgcttgaacctgggaggcagaggttgcagtgagccaagatcacgccactgcactccagcctgggtgacagagggagactttgtctcaaaaaagaaagaaaagaaaattcttaggtgttcctagttgactgtattagctttatcagccatgttttttttttcctctttacctagaaaacaatgttgggctgacttactgacaaaagaaatttaacgagagttgactctgttgtaaagcttcagagagcagtaggtctagagttcctgggggagcaaagctgaaaagatagaggcacttaagagcagtccccagtgaagttactattaggcattactgacttgggctttcctcaagtacagcagggaaacagaagcaggcagtcaacttgaacaagccagtcctggcttaggttgtgttcggcttccagctccggtgccatctcttcaattaattgagctaaaaataaatgtcattaacatccaagctgtcccctccccctaatacttggttgggtttatgaaagagaggagcaattttggtatttgacgttttccatatattattttcagaccttccactgtctggaagcaccccttattctcttcctgttctttggaagagttgtgtagtcttaagagaatttgacactccttgggggtttgatacagaactggatccccaatagccccaccacatggcctctaaccagatggcttcagtcacctgtgtccctttatgctcaacttccctctcccctcactaactccatcaccacccataaacaagctctttgagatccacggagattaacatttagacaactttggagctaattgcttacctaatttcttttgttttgattgtcgtaactgtttctagtacaaagaaaatcccttcaaagttacatagcttgctattacctgttcttttgccccccccccttgatttgaggattaggcaattgactgatttctggtgaaatcagaacatgagcatgagacagaggctgggaaattccagagtattaatagtgaaagagaaacttatggtgagtcacttatggtggtgttgccgggccccagggtacttgttccctattctttctctgcctcaccctccattccttctgatgtgtttacagtacatggactggacctgcctggagcccagcccagagcatctcctcagtgctcatctctatccagtccctgatgactgagaacccctatcacaatgagcccggctttgaacaggtaaggccagatgggcctggctctggggtgtagactattgtttttgtttgtttggttggttggtttttttgtttttttttttttttgagacagagtcttcctctgtcacctaggctgtagtgcagtggtgcaatctcagcttactgcaacctccgcctcccgggttcaagccattctgtctcagcctcccaagtagctgggactacaggcgtgtaccaccatgcctggctaatttttatatttttagtagagatggggtttcaccatattggccaggctggtctccagctcctgacctggtgatccgcctgcctcggcctcccagagtgctgggattacaggcgtgagccaccgcgcccagccagaatagtgttttaagagatctgcttgggaggttttttttgttttgttttgttttgttttgttttggacctagcacagccccatgtactacatttgttggtatagggaaaaaaagggaattgacacgtgttttttagtaatgaaattttttgccgaccactgtggctcacacctgtaatcccagcactttgggaggctgaggcaggcaggtggatcacctgaggtcaggagtttgagaccagcctggccaacctggtaaaaccccatctctactaaaaattaactggtcagaagtttgagaccagcctggccaacatggtgaaaacctgtctctactaaaaataaaagaaattagctgggtgtgatcacttgaaccctggaggcagaggttgcagtgagctgagatcacgccattacactccagcctgggtaaggagcgaaactcggtccccccacccccaaaaaaataataatggccaggcgcggtggctcacacctgtaatcccagcactttgggaggccgaggcgggcagatcacaaggtcagaagtttgagatcatcctggctaacacagtgaaacccagtctgtactaaaaatacaaaaaattagctgggtgtggtggcaggcgcctgtagtcccagctactcggaggctgagacaggagaatggcgtgaacccaggtggtggagcttacagtgagccaagattgggccattgcattccagcctgagcgacagagcgagacaccgtcttaaaaaaataataataataatgaatttttttatttgtgagagttacaataagtatgtgacttggattcctttatagcatggaagtcaatggactcctttggaaattaattctgacctgctttgggggttgtggcatccagtgggttctatgtgcctatattctcagcatcccctaaagttgctctgtagggactactacccagccagctgttcttctggggttatgaaggactgttacctgcagagtcaaaggagctagtcattaggagtcccgggcaagactttttgagttaacagtgccaacgagaaggtggagaaaactcacatttttccaagagcatgctctgtgctggacactaccaagtttttatatataatttcttgtttaaccttcatactatgtgaggttaaatatggttattcccattttcaagtgaaataatgttgcctcagagaggttaattaactttcacaaagacacacagatcaggataggaccccagacttacattggagcccaacttctcccactcttccgatgtgccttcctgaattactcatgagcacgggaaaaagttccagtgatagtcccaaaagaaaatgattccggataggtgattagaacagcttaattaatttatttattttttgagacagagtttcactattgttacccaggctggagtgtaatggcacaatctcggctcacagcaacttctgcctcccaggttcaagtgattcctctgcctcagcctcccgagtagctgggattacgggcacgcaccaccacacctggctaattttttgtatttttagtagagaaggggtttcaccatcttggccaggctggtttcgaatttcggacctcaggtgatccactcgccttggcctctgaaagtgctgggattacaggcgtgagcaaccatgcctggccaacttaatttatttttaaactattacatatgacaccaactttgattcttcctctatagacctgaacaaaggataataaaatgcctttcaaaaatgaaaaataaaaattttttttgagacagagtctcactccatcactcaggctggagtgcagtggtgtgatctcggctcactgcagcctccacctcccagggtcaagcaattctcctgcctcagcctcctgagtagctgggactacaggcgcacaccaccacgcctggctaatttttgtatttttagtagaggtggcgtttcaccatgttggccagctggtcttgaactcctgaccttaggtgatcagcctgcctcggcctcacaaagtggtaggatcacaggtgtgagccacagagtctggcctcaaaagttaacaaaaattatttcctaacccatcctttctccaaacattcatttcaggaggagagtctaattgaaatagacctcattagcaggagctgatttttaggtcttgtctttttttttttttttttggaggcagactctcactctgtcacccaggctggagtgcagtggtgtgatctcagctcactgcaacctctgcctcccaggttcaagcgattctagtacctcagcctcccaagtagctgggattacaggcacacaccatgacgcctggctaatttttgtatttgtagtagagatggggtttcgccctgttggccaggcttgtcttgaacatatggcctcaagcagtctgcccacgtccgcctcccaaagtgctgggattacaggtgtgagccaccatgcccagccttgtgttttttattttttacttccagaatgacttgcagttgtttttattttatttatttatttattttttatttatttacaggcacacaccaccacacccagctgatttttgtatttttagtagagacggggtttcactgttttggccaggctggtctccacctcctgaccttatgatccacctgcctcggcctcccaaagtgctgggattacaggtgtgagctaccgcgcctggcccatcagctatttttatcagaggccagggctctaattgactggggttggtggtaagaggagaagagcacaggaaaaattaaaggagtagaggccatactccccttctattcacaccatagtgagaccctgtttatattggctttctagaccaaagttgaagtttatctttcgaagcttctgatagatttatttctaattgtactatttctttgagacaaagtcttgctttgtcacccaggctggagtacagtggcacagtcatagctcactgaagcctcgaactcctgggctttagccatcctctcacctcagccttctgagtagctgggacgacaggtgcacaccaccaatgcccagctaatttttgtattttttatagagacgggatctcaccatgttgccaatgctgatcctgaactcctgaactcaagcgatccgcctgcatcggcttcccaaagtgtcgggagtacaggcatgagccatcgggcccagccctacttctgatttataataattggttcaatgatggtgggaccctagagacatataacaggtaaaggggttaaccaggaagcatcctttacttgttgatgcctgaaggttttctacactgagactcttcacttcatttatacctttttgtcccaccatcattctttctgtcttttttttttctccccctaaagagacaagtgtttcccagcctgggcaacgtagtgagaccttgtctctaccgaaaaacttttttaaaaaaatagctgggcattgtgacatgtgccttgagtcccagctacttgggaagctgaggagaggagcatcgcttgagcccaggaattcgaggcagcagtaacctctgatcatgccaccactctccagcctggatgacaaagcaagagcctgcctcttaaaaattttttaaataaaagacaagccgggtgcggtggctcatgcctgtaatcccagcgctttggaaggctgaggcaggtggattacctgaggtcaggcgttcaggaccagcctggccaacgtggtgaaacactgtctctactaaaaaatacaaaaactagctgggcgtggtgacaggcgcctgtaatcccagctacttggaaggcttgagacaggagaatcgcttgaacccaggaggcggaggttgcagtgagctgagatcgtgccattgcactccagcctgggtgacgagcaaaactcaaaaaaacaaataaataataaaaaataaaaactcggggcccaccatggtgacgaatgtctttagtcccagctactcaggaggctgaggtgggaggatcgctagagcccaggagtttgaggattgctggagcccaggaagtcaaggctgcagttagctgtgatggtgccgctgcactccagcctgggcaacagcaaagaccctgtctccaaaaagaaaaactgaaaaaacaggaacttactttgttgtctaggctgaacccaaactcttgggctcaagtgatcctcacaccttggcttcctgagtagctgggactattagtttatgccaccaggcttagcaaccctaccatcattcttatgtttggttatttcccacataatctttacttgatagacctttcacttcacattcaggaaaatatgatggatctagtttgctggtgataggccaaatgacctgtaacctgttggtatatttggagggtggtggaggtgaatggtgtcaaaaataaaggtgtggttgctcttcatggatctgccatacagtgggaaaggtatctttttagtttgtgtgactggctgacataccccatactaatcttgaagtcccttcccattggttttctttttgcttaatttttggaatactctggcatctgttacattataggagagacatccaggagacagcaaaaactataatgaatgtatccggcacgagaccatcagagttgcagtctgtgacatgatggaaggaaagtgtccctgtcctgaacccctacggtatgtgtcaagcgggcttgcttggtattcctttcgggcatttgggtagttggcatctttggggcagagtacagtgttgggtaccagagggagatagagaagaaggaaagatgtggttcctgcttttaaagaacaagtggctgagggttacccaagaggaagttcagagagctactctgttgttggagaatgccatgcctttgggagaggcagtccacacgctcagggagcttccagtttgatgaaggcttggacgtacttttttccagccaaatgtgtagagtacttcataataagactcatttcttagtgctgaagttatttttaagtgccaaaactggatgagcaacgtcagggttaaataaataaacttctaggagaattttgagtaaggtttgggattggggatggctgatgaaaagcaatggaggtggagcaagtcatgagttgaagttgggattcaaatggtgagtattggcttggtggtggctcacgcctgtaatcctagtactttgggaggctgaggcgggaggatcacttgagcccaagagttcgagaccagcctgggcaacacagggagaccccatctctacagaaattttaaaattagccaggtgtgatggcacgctcctgcagtcacagccagtcaggaggctgaggtgggaggattgcttgagcctaagaggttgaggctgcagtgagctgtgatgacaccactgcactccagcctgggtaacacagcaagaccctgcctcaaaaagaaaactaatggtgaatattacagtcacactcataattcctgatgtgtaggggaagtcaaccacgggcagttaggtgttcctttttccaaaaggaactgtaatcccagcactttgggaggccaaggaaggcagatcaccaggtcaggagttcaagaccagcctgaccaacatggtgaaaccacatctttactaaaaatacaaaaattacccgggtgtggtggcacgcacctgtaatcccagctactcaggaggctgaagcatgagaatcacttgaacctgggaggcggaggttgcagtgagccgagattgcgccactgtattccagcctgggcaaaagagcgagactcagtctcaaaaaaataaaaaataaataaaatgaaaagatctttgtagaaaacagatctggacttgggaatggtaggtatttaatttggcattaaggttaggtaaagaggccaggtgtggtggcttgcgcctgtagtcctagcactttgggaggccgacgcaggcagatcagttgaggtcaggagttcctgaccagcctgggcaacatggtgaaaccccgtctctactaaaaacaaaaattagccaggcgtggtggcatatgcctgtaatcccagcttctcaggaggctgaggcaggagaattgcatgaatccgggaggcagaggtcacagtgagctgaggttgcaccactgcactccaacatgggctacagagcaagactccatctgaaaaaaaaaaaaggttaggtaaggaaggggtgacctgtacccctgggtttctcacttacacttttctgcttgttttccagaggggtgatggagaagtcctttctggagtattacgacttctacgaggtggcctgcaaagatcgcctgcaccttcaaggccaaactatgcaggtaatacaacccctgctgctaattgcagaagccctacagctggccatgtaaaagccccccacaagcgtggcatcgacagctgtcatagaatgacacagctaagcctgggttcagtggctcatgcctgtaatcccagcactttgggaggccaaggcgggcggatcacgaggtcgggaaattgagaccatcctggctaacacggtgaaaccccgtctctactaaaaatacaaaaaattagccgggcatcgtggcgtgtacctgtagtcccatctactcaggaggctgaggcaggagaatcacttgaacccaggaggcagaagttgcagtgagctgaaattgtgccactgcacttcagcctggacaacagaccgagactctgtctcaaaaaaaaaaaaaaaaaaaaaaaaaaatagccaggcgcggtggctcacgcctgtaatcccagcactttgggaggctgaggtgggcagatcacctgaggtcgggagtgtgagaccagcctggccaacatgatgaaaccccgcctctactaaaaacacaaaaaattggctcagcgtggtagcatgtgcctataatcccggctacttgggaggctgaggcaggagaatcgcttgaacctgggaggccgaggttgcagtgagctgagtgcactccagtctgggcaacaagagcgaaactcggtctcaaaaaaaaaagctaaaagcaacctatatcatttgagggactgagagccagagaggagactgattttcatgaagtcatagggaactctttactttccttggtcagtagcctcttttttttttttttttaaaggcaggttctcactctgttactcaggctggagtgcagtagctgggtcacagctcactgcaactccaaactcccaagctcaagcagtcctcccacctcagcctcccaagctgggacttacaggtgtgcaccaccacagctagtttttgttttgttttgttttttgagacagagtcttgctctgttgctcaggctagagcaatctcagctcattgcaacttcagcctcccaagtagttgggattacaggcatacgccatcatgcccagctaattttttgtgtttttagtagagacggggtttcaccatgttggccaggctagtcttgaactcctcacctcaagtgatctacctccctcggcctcccaaagtgctgggattacaggccctgttttgttttgtttggttgtagagatagggtcccactctattgcccaggcaactcctgggttcaggtgatcctcctcccttagcctccaaactgggaggctgagattattacaggtgtgagccactgcacccagcccatagtgttttgaagctaagatgcgttcagccctcccagaatcttagggattatatgaatcctctatttaaattctgttcccagccctgagggttgatcacagaaacagtagcttagagaaacaacatacctgtagtgtcacatgttgaaagattcctattcaaagatgataaccattgttcattctttgcctctactgggaaaagtgtgcttttgcttcccataagaactcaaaatttaggcttgttttaaggaaggaggctatcattgaccaaattgtagatagacagccaggtgcggtggcttatgcctataatcccagcactttgggaggcagaggtggacagatctcttgaggccaggagtccaagaccagcctggccaacatggtgaaaccccatctctactaaaaatacaaaaattagccaggcatgatggctcatgcctgtaatctcagctacttgggaagctgagggatgagaaatgcttgaacctgggaggcagaggttgcagtaaactgagattgcactactgcactccagcctgggcaacagaacaagattctgtctcaaaaaaaaaaaaaaaaaaaagacaaaaattatagatagactaatgtaaaccacctggttggtaagagaatgagaattctcctgtcctggagaatcagttcttgggtgtttggatcatcttactggtggtcttgcttagaaatgggatactcgtggggcctggcgcaatggctcatgcctgtgatcccagtactttggtaggccgaggcagacagatcacttgagatcaggagtttgagaccagcctggccaacacagtgaaatcctgcctctactaaaaatacaaaaattagccagatgtagtggtgcgtgcctgtggtcccagctacttaggagactgaggcacaagaattttgcttgaacctgggaggtgaaggttgcagtgacccgagatcacgttgcactctagccttggcgatggagccagactccacctcaaaaaaaaaaaaaaaaagaaagaaaaagaaatgggagacttggataattgactaagatttcttaaggctctctccagctctcgtactatgtctgttcacccaccccaacaccaacagcgtaggaggagatgacttatgccctccagtgctacttataaatggtagttttcccttccttctttcaaggactttccacccacctgtctcatttaagcacaaagggcagggctggctcaggactaagttgtctcctaaaccctttttgagagtatatcaatgacatatgtcctagtttgttccccatcaggaattctaattgctggtatccaacagcattagcaatatcagtgtgtaaaggaaaaacaactggtgatgagggatgggagggagtacagcatctgggcaggaggagcattagaggagctggagccacggatgaaagaaacaagatttgcagaattgacagctccatagtagtaaatgtggagctcagtcttgagggagttaactctcatgaaggagaagtgcaggctgtagtcccagtgacagtgactagcatccactgccatcccactcaggatgagggtaatgtgtgggcagaagtatggaaggagtttttgtgagagaagcaaacaatgtgagagggaaagttgtgtaccttttgggggctgttgcactgctttgctgcctaagtccctatatagtattttaaactcttttttataccatccactcaactagttgtttttgagactttggggacaattaaacctttctgtacaacgtttagggatctttgatctagaacaagaaggactaagatcgaggctgggtggccctggagcaatgcccagaaacctggatgggaatggagtgacgagtccctggggaggagtacaggtgcttatctgaaagtcagaactcttgaattctagacctgcttctgaccttagaaaagcagattaccatttttgagtacagagaataaagagcaacttttaccttctgtggtttttatgaggttaattaaaaacataggcatacttaacaattataattctggtcttgaatttctcattcctatctatctcacccttattgtcccttcttccggatattggtttgcttttgaggaataccaatacattttcactctagcccaagctacacctatttggggcggtaagagtgtcttttttttttttttttttgagaccaagttttactcttgttgcccaggctggagtgtaatggtgcgatctcgatctcagctgactgcaacctccgcctcccgggttcaagtgattctcctgcctcagcctcccgagtagctgggattacaggcatgcgccacgacacccggctaattttgcatttttagtagagacagggtttcaccatgttggtcaggctggtctcaaactcccaacctcaggtgatccgcccgcctcggccgcccaaagtgctgggattacaggtgtgagccaccgcgcctggcccaggtgtcatatttttaagcaaaggttattttgcctgctgtttgggactgcctgtgctgttaggccttcctgctcccatggctcagaagttgagctttcatttcacatgggcccgaagttgctttctctaggatcagccacccagacttgaatcttccatccccttgtctcctttccccacaggacccttttggagagaagcggggccactttgactaccagtccctcttgatgcgcctgggactgatacgtcagaaagtgctggagaggctccataatgagaatgcagaaatggactctgatagcagttcatctgggacagagacagaccttcatgggagcctgagggtttagaccctgctcccatctccccttcccccactcaagagtcccagcagaatcccttccccccaccccagggatggagaggcactgtgtatctccctccagactcgaagtcatcctgcaagatggcaagaaccaagcaagctccgatcccagggtgtgggagtgggggcctgttcccggtctgacctccttggcactggagcatctggggcttcgttcatccattcatcccgtatcaggggccaaggtacctttacaggagcacctagagcgagggcctttggcaaaaacaaaacaaccaacacacctctccacagggccagctccttagggataagtggaagatggaaattgcaattccaagagggagtgtgcccaaatgatttatggggatacctggaagggagcttggggtgggggctgtctgtgacacttaagcagtctgggtggttgtctatttgtctgtcttcagtcttgaagcagggcttcccaatgcccttttcctccctgccttccttcccccattatttcccacaggccagcataattttgtttttcctaatttatagtcactgttctagacagaccaaagagaaggaacagtggtggagtctaggctgctgatcagtaagctttacctagcacctgagcacctttctcccctcccctctttcctcacccttttctagatgtaagacagaaagtaaatgtgactgggacttaaccaaggtcttggtaaagcctgcatggcaccgtaagaagctgaaaatactgtttgttcccgcaatcactgatttgaaaagttcccaacacaggcagctgctgtgtatatgggattagagccactacatagaatagtctcttacagattttcataaatactagtcacaataagggtatttttcttgggggtggagtaagggggagactgatgctagtccttgttgtattttgttgggctgtccttgtgtattttcaccccagcctgtagtcctcctcacttcaaccccagggatttttggggagcaagggtagccaatggcagagggggttggggctgggactctggaggctcctccccttctttctcttccttccgcctcccccgtgcccccagctgctcttgtcactgtctctgatgggtatttgcctggctttgttgcttctctatctgtatttagctgcagtgatcctttagctggttggctcagaaaaaaaaaaatgtgctttaggtgccctgtaatcctgggcatcaagggaatccatccttcccctttttgatatgttctccccgtacttccagatttattgttatggctcccagtgggtattggcgattcttgtgatgcagggcctcagtcagtgtccagccatgcataagggagaggatagtgtgtacctgccctgccctctgctatgaaggtctctgccttgtggatcatgggactccccttggaggatctgtgcaaaggggggctgggcacaaaggagaatgtcctatttgggagggcaggaagcaaaggaactggacagggattggtgggcttggggaacggaagtttatcttggatacccttgaagaggctgggtctcttcacatgaagatcgaaaagggaccctgcttccaatttccctcttccattcctcgagctactccagggcttagaagaatgctcttggtctgtgggtccagtgttgtctgtcatccatttaagtgttcccactttcaagtgacaatcctctccttggccctgccatagggcagagcatgtctggcatagcagcctgacttttatgccctaatcttgagttgaggaaatatatgcacaggagtcaaagagatgtctttatatctgactgtatataaatgaagtttttttgttttttttgttttcctttttggtgcaataaagtttgttttggcagaaggaggaagtgcctgtgggtgtgggagggcttgtgtaaaggacgaatgggatcatcttgtcaaccacacctcacctaggcctggaactgttagggagaaggaaagtgccatgaattgtctggaaaccgaagacttgcataacatggtggaagggcagggctgggtggggagagcaggacaagttttctcattggaaatggggtccatgctctggcagtcagtgacatcttagtttgagtggtttccaaagacagacctattccagagcttggagtgagcatgtcctacaaggataggcagaggaagagatgggcccaggctatatcctgctaaaggaagggtctcagtatggaaaaaccattgagttttcagatttccagtactaaactagcacttttaggatcttagcctttagaccataaggactttgggagccttaaacaactctggcctcttccctcatcaccacttctacttgctataggagattcttgctttctgatgcagaggcttttactcttggctgaccacgtgtgtagaaaaatgtctacacacagtatgtgctgccattctgtactatgcagtgatacatgaaggcatgggctcgggttaataggcctaggcaccagctttagctcggctgaagctggcgcccctggcaaattactttgattgaatcacctgtgatgttgaaggctgcctacttggtgaaatttaagtgagctgtatgtaaaatggcacagggtaggtgttcagtaaatgactccctttcccactactgaggctagagggacctggcaatcactacaggagggtgagaaagctagtagggaatttaagaaaatagaacattccctaactattgtttgattcccctcagattccattgttttctttcctccaatttagccacgattggacattgacttctatttccttcatactcacagctaactctgtcataacctagagcctctacagaggaagccagaagagactgaaagtgaatattatttactggtccattaggaccagctagtttgagataaggaacattttatttaaaaggtttgaattagcataggctgtaatctatgtctcacagctacaaagactagacaggccaggaaacaacccacattctaggcccagctcttccatgaacttgcagatgacctacaaaaatcattttatatgtgcttgccgttctctgtgttaatcagattatgcttactgaacgagcgaggttttcctccaataaaaatgcaacgtgaaggcacttttcaaaaataaaagaatgagggaagaaagaaaaacttggaactttttttctattttttgtataaacaaaattgcccaggtttatttgccacctccgcctcctccctgcctgctgctgtgtgcccttccacatgcagtcaggggagggcttctctggcctcctcagctgtaatctcctgggagtagaggtcagtgaagagagctggcagccagtagtgggcctcccctggggcctgtaagtccagccacgccaacccttccttcagcaggtgttcctggagggaaaagggaagaagagcagtttgagaacagggaggttccatagacaaagggtaggtaagcaacccccacacctattttggcttcagtgaggttttcaaactaaatctactaagtgccttcaaacctttacacaaccaactaaacgagctgtttggccttggcctttgcctgaatttgaaaaatgctacgaagtcatttaacttgtgctgctggggaagaggggtaaagcctagcatagtggaatatagtggaaagaacatagctacagaaatatttgctgtgtggccttcagcaaatcactgcctccattttcccagaaactgttaaacagagatcactgtttagctacctttgaattaagttattccgggtagcaaacatgattgaccatacttatgcaagaatagactcagttcctagagctggaaataatatgctcaaaatgggtggtttctgtccaatatcattaggtaaataattatgttatccccattttacagatgaaaggtttagacagttgaattgtttggataaggaaaaaaggtactgaagccggagttcttacattgctccctcttcacatcattcattcttcagtacgatgaaatttgtatatataaagctagagtatatactatgcaatataatgcttagtggataattagatatgtaattaacgtagttaataattcactgtactaacagtgttacttccagtacaaactacattaatctcctgaccagcaactccaggctcagcatgttcaggagagagagtgtcagttccccaagtagcaggggcagcctggtattgtgtgcatgccagagttaggaacctgccttcctagttctacctttttggtgccatcttcagagaagtgctgggcttccttctagcatggcagcagtagccttcaaggcagaaggccagcaaagcaatgctgaagttcctgcatttgtggaacccacatcctcccaactggggcctgcctgtcttttctggactgttccaaagttgcataccagcacttgccgcgctcgctcggtctcccatttaagactggctttgatctcactgacagtcacgtagccattcttctgaaggaaggaggaatggggattgaatcagttaagagtgcaccttcccttagaacccaggatctgcccaggaacaagagacttacccagacaggaggaaaagctgtcaagcatgagagaacacagaaaatgtttaaaggttccagcggggagagagagaagtgactttcagcatgacagaggtaggttggtgggttcaatcctaaaactggggtaccggccaggcacggcagctcatgcctgtaatcctagcactttttgggaggccgaggtgggtggatcacctgacgtcaggagttcgagaccagcctggccaacatggtgaaaccccatctctactaaaaatacaaaaattagccaggcatggtggcacacgcctgtaatcccagctactcgggaggctgaggcagaagaatcactggaacctgggagatggaggctgcagtgagccggagattgcaccactgcacaccagcctgggtgacagagcgagactccatctcaaaaaacaaaaaagtggggtcccttgtactaacatactgagttagacttctgcaaagcactctagagcatgacaagggaagattctggacaattaattgatgggaagaaatgatgataatcataaactgctaataacctccattatttaaatattcagcccttgccctgcctcattctactcatcctccaatacagaaaagcccctcccttatttagttctgttttacgtcataaaggaaactgggccgggtgcggtggctcacccctgtaatcccagcacttagagaggctaaggtgggtggatcacctgaggtcgggagttcgagaccaaactcaggcctggccaacatggagaaaccccatctctactaaaaatacaaaattagctgggcgtggtggcacacacctgtaatcccagctactcgggaggctgaggcaggagaatcacttgaacccgggaggctgacattgtagtgagctgagatcacgccattgcactctggcctaggcaacgagtgaaactccatctcaaaaataataaaactgaacacatctaaatacctgatggggatttgggggaagatggcatatgcttaaggcatgatgagggatgggggcatggcaaacaagattttttaaaatctgtttttgaagaatccataaagtagtttcaaaagacatcaaagagtctggctacccaaagaaatctagttagttgtctgcatgtctgtctacctgactagactgtaagctccttgagagcaggaattttatcatctttatatgccccacagcctggcccagtgctttgcactgtagctgctcaataaatgtctgctgaacaagcacaggcctgagtagttcatccactggatagtctcagcaaaagacctgcataatggggagcacgagctgagaactgctccagacttgcctcacagactgtcccttgcacacacacacactcgaaggtgcaccagtacctctgccagctgcagcaccacggtgtgatccatattgagctcagctggaacagactgaatgaggtaagtgccgcccacagggatgatgccgaagccagtgccaagtgcctttagtttcttgatggctctgatcaggtcatctctgaggtaaggaagagttgcttaacgacccttggcagaatcagacctaacaacacagtttcagctctgccctgggcaggatactgacagaaaatttagaagactgcacaactgccaggcgcaatggctcatacccataatcgcaacacttttgggatgcccacattgagaagactgcttgagcccaggggttagagaccagcctgggcaacacagcaagaccttatctttactaaaaataaaaaattagcagggcatggtggcaatcgcctataatccttgggaggctgaggcaggaggatcacttgagcccaggagttcaaggctgcagtgagctgtgattgtgcaccactgtactccagcctgggtgacagagcgagaccctgcctctaaaataaaaggctgcacaacactcaactacgtcagtaaaaagacagggtcaaggagcaataagtgatgcttggacaatcatgggagatacacaggagtcaggctgtctgctcagcgaaccactcattccaacatccagacagcggtcaaagatacacctgcagatgcccatcaggaaatgtgaatgagtgagctgaagaggcaatgggggtagtgtcacctgtggcaaactagagaatgcttatctattttaaagggggcaacccagctgactattattgccaagtggcaattcaaacccaatactgccaagttttctgattctaattgaaatcagagaaaaagaaaacctacaaaacagtgtgtagatcacatatccagcccacatacagagtttaaaacctctgccaaagctcaaaaaatgttatcacccaaacagccagggaaagggcacttttaggtagattggaatgcattctccaacccccaaagaatagcaaactgaaatgcttcaaatgctcaccctctcttcatgaaatctgcaatgagtatggctagtaatcttttgttatcactttccttttttttttttttaggagatgaggtcttggctgggcgcggtggctcacgcctgtaatcccagcattttgggaggccgagagttcgagaccagcctagccaacatggtgaaaccccatctccactaaaaatacaagaactagcagggcgccagtggcaggtacctgtaatcccagctactcaggaggctgaggcagaagaatcatttgaacccaggaggcggaggttgcagtgagccgagattgtaccactgcgctccagcctagacaacagagcaagagtccatttcaaaaaacaaaaaaaaaaagtagagatgacgtcttgctctatatcccaggctggagtgcagtggtgcaatcatagctcactgcagcctagaacaatgagtgcatgcctcaacacccaactaattttattttttgtagagacaaggtctcactacactgcccagactggtctcgaactcctgtcctcaagcgatcctcccacctcagcctcccaaagggctaggattacaggtgtaagctattgcacccagcctcgttacttttctttgaatattctaggtcttcaagatctcatagtaggctgactctttggaagttacatcaaaaacagccttttatcttttctcaaactggactcgcacatagaggctggagaactagatcaatttatattccatcatctcactaccacctccttccccagcctttctaggcacctacactactctccttggcctcaaataatctcacgactatatacagccctggccagccgtggtgtctcacacctgtaatcccagcactttgggaagctgaggcaggcagatcacttgaggccaggagttcaaaaccagcctggccaacaacgtgaaaccccatcactactaaaaatacaaaaattagccaggcggccaggcgcggtggcagacacctgtaatcccagcactttgggaggctgaggcgggtggatcacgaggtcaggagatcgagaccatcctggctaacacagtgaaaccccgtctctactaaaaatacaaaaaattagccgggcgtggtggcgggcgcctgtagtcccagctactcgggaggctgaggcaggagaatggcgtgaacccaggaggcagagcttgcagtgagcagagatcacgccactgcactccagcctgggcgacagagtgagactctgtctcaaaaaaaaaaaaaaaaaaattagccgggcatggtggtgcacacctgtaattccagttactggggagactgtggcacgagaattgcttgaacccagaaggcagaggttgcagtgagctaagatcgggtcactgcactccagcctgggtgacagcaagactctttctcaaagaaaaaaaagactatatatagccccaagtttgttaaaaaataatacatgaaaaaatgcttagaaggaactacattaaaatatatagcagttgtaatctcttaattgagaaataatggtttttgtttccttttttaaatctatattttctgttttctaaaaatagccagccatactggcccatgcctataatcccaactacttgggaggctgaggtgggaggattacttgagcccaagagtttgaggctgcagtaagcaatgatcttggtagcagtaagctgtgatcatgccactgtactccagcccgggcaaaagtgagaccctatctcttattttttgtttgttttttgtttttttttttcctgtatgatatggagatcatacagatttctaagctagcctagacatgaggaatagggagaaaagagttccatctgaattttaaagacctctttctgtactccaagggattggaagacaagacctactgactgacatcctgggcgaacttgccccttcccttcaacacctgttgatgtagttcctccaaagttatcagacctgtttggagacagggaacagaaatcagaaaaagagattccccactttaaataagttgacagtcattacaattccagtggcctacaagtagcaaataacattctagttcctaatttttttttaacactctccttatgaaataactgaccataatatgagaaatggattctgagaccttgctaggcctgtcaacagagagctacgaaaatctaaaaacaaaagcagtatcatctttgaaaaactataaatgtcctcttgacatcaaggccgtgtctatttatagttgatgatgatttgtaaatggttttaagttttctttctgtaacttcaatccacaccatttaacgtgcttactaagaaagatggcatcaccagatgacaaattttaaggtcacattttagggaacacagactcagttggcattcccatacgtcggagagacagtgcaggactatagttactaatgagaaaatcactccagacacatcagacatcaggggaaaaggcctacttcctacctctctactattttctgtactgactagggactagaccttcctggccaaagatctttggagaacagagacaatcgttcaggtaattctatttacccttggccatggagacttgccatggattcaactgcatgaaacagctaagatgtctctcaagtccttagaggcctgtagactgcaggatggaaacgataatcttttacggttttctccctctcagagaagtccagagtccagttcacaggacctagccaccctcacctccattccgatgcttcagcgccaggcacacttcgataatttggacacctagttcgtaatagaagtcccccacgcccagcatctcagaccaaaatccttttccagctacaagacagaaaaacaaaatctcggttattgattaatttacatcccttcttttctttcaaacctgcattaaaacatctatcatatgggaagtcttccctgcatggcatgaagttcttctgctccatctgctactcaggaaacaatcggactcacggtaactcctgctgaagaacagggtcagacggctccagagggcaggcaatctaaaagtcatttctggccgggcgcagtggctcacgcctgtaattccaacactttgggacatcgagctaggtggatcgctcgagaccaagagttcaagaccagcctggccaacatggcaaaaccccatctctaataataataataataaattagccaggagtggtggcgtgcgcctgtaatcccagctacttgggaggctgaggcaggagaattgctggaacccaggaggcagaagttgcagtgagccaagatcgcgccaccatactccagcctgggcaataagagcacaactctctctcaaaaaaaaaaaatacagccggggacagtgggtcacgcctgtaattccagcactttgggaagccaaagctggtggatcacaaggtcaagagatagagaccatcctgg

SEQ ID NO: 5965 - DNA, 88 bp, Homo sapiens
gagaatcgcttgaacccgggaggcagaggttgcagtgagccgggattacgccactgcactccagcctggcaacagagtgagactccgt

SEQ ID NO: 5966 - DNA, 1380 bp, Homo sapiens
gaggtcaagtgagggcagcagcaggtgaggtgagggatggaggtgaggccagatcacctggtggtttaaaagccgcagtgaggtgtttagacctaattttaaaaacaatgaaaagcacttgatttagtttagccatccatatgtggcttgtattagctcaattagactcctgccttttcgcaaggacagcagtctctctgtatcccatacacaagagaatgatgtgttttctctttttaaatgagatctgtttagctagttgtatggagaatgaactctgctggtcaattgtggaaacagagacttagttaagtagaccttcctgagcttaccccttgcagccttccctgagatggcaaacaggagggctgcaccaatcctataccgtcagcaaaggtctggatcgctttgcaaggattagaaagcctgcacatgtggggcctcagaccatctgtccccatgtctacagaaaagttccaactgctgaatggttttgaaatgcatggttatttcctgggcccaatccagtccttcataatttggccaaacctttatgcagagggctatgaggcatttttcctccagattctgagggtcaaagcagtcccaatggttcaagatacactgcagagtagtataagctgggggcagtaaggagaactggttgtccattttgaaagacagggagtagaggcatccctcattcagggtgtgatggggaaagcaagcaagtgtccttccttcactttccacctgttgtccctgagccttggtgaccttggcaggtactggccataggtaacaatacccacgaagcagggaaaacctggagaataggaattaaccacccttagctgtgcctccctttctccctgctgccagcaacctttgagttccctgggcctgtttataccgtgaagcatggcctccttccgtggggtggggttcagtcagcaggaattggtcctgcgcatttacattttgcctgttgcttggctttgagcccctcagacctggtctgtctttctagggcctcagcctaaagcttggaattgagtttggaactgaaaaggtattttagaggctgtttgtatctgtttagagtgtctcaaatgtgccctgccgaatttgcggttatcagccagaaggggtttttcctccgttaacttccctgtcagaaacagctggtggggggtgggggaggcctctcacttagaaaaagaaaaaagaaaaacagtttaaggggcaaaagggggaggttctgggggaagaaccccttgttagtgcaactgggcatttccaatccttatatctttcccctgggtcagactgaattgaattccttggccaggggaggaaagggttccattggtacagcgg

SEQ ID NO: 5967 - DNA, 1112 bp, Homo sapiens
aagttctggataaatacttgatttgatgtgatagtgtgtattactctatcagaaatgcagagcgttgtatgatttttctgtgtacacgcgataagagcaatattagttgcaaaaggaagttttcatctttgaacattaaaggtatcctttattcttgatcactatagcatgcaaaaaagaaactatattttctgtcctgttctttgtattactgttaaagagttggtaaactgccgtcttgctgtgagactgggaagtcggcaatgaagttagatttgtattcatgaacatgatctgcctgtcatataggcttgctttgacttgttttttttttcagtagtggcaaagggttttctgccactcaatccacactttcctccgcattggtatctccgttgaccattttgcaaaatagtttattgagattaggggtctgatcttttgtataacctgttgtagtgaactgatcatatgcgacttgactttggccaatagtacctcgtgcagtgtacagtactactatttagacttactgatttgggtaatagaaaagctatgatgttagaaatgttgtcgttgtatattggagaaattttgaagttgcatattggagtaatttagtcctgtatgctttgtaaatgagtgcattctattgtcgagagtaaatacagtattttgtagtataaacttaagcttttagctgaagaaattggcagcatagttggagtgtggagactattcttaaaacgcaaatgttttaaattacaaggaactgtagtggtgtgtaggctgtaacaattcctggtgccaaatttgggagattatttggttgagctactttctataaagaaacatattaagtatctgcaataaaagtggatttgtagctatacacaagggattttacattataaataataactcaataaggcacctttctttgctctttgtgtatctgccagttaagaccaaaacatctcatattttcactggagcttcctgccaaaacaaatactggttttgcattggctttgctgctcagtttgaaagctaggggaatctcttagagcctactctggttctggaggctgcctgattaaaaaaaaaaaaaa

SEQ ID NO: 5968 - DNA, 168 bp, Homo sapiens
ggcgtggtggggggcgcctgtagtcccagctactgggaaggctgaggcaggagaatggcgtgaacccgggaggcggagcttgtagtgagccgagatcgtgccactgcactccagcctgggagacagagcgagactccgtctcaaaaaaaaaaaaaaaaaaaaaagatg

SEQ ID NO: 5969 - DNA, 184 bp, Homo sapiens; identical to SEQ ID NO: 5421

SEQ ID NO: 5970 - DNA, 147 bp, Homo sapiens; identical to SEQ ID NO: 5241

SEQ ID NO: 5971 - DNA, 143 bp, Homo sapiens; identical to SEQ ID NO: 5446

SEQ ID NO: 5972 - DNA, 170 bp, Homo sapiens; identical to SEQ ID NO: 5447

SEQ ID NO: 5973 - DNA, 141 bp, Homo sapiens; identical to SEQ ID NO: 5242

SEQ ID NO: 5974 - DNA, 125 bp, Homo sapiens; identical to SEQ ID NO: 5454

SEQ ID NO: 5975 - DNA, 175 bp, Homo sapiens; identical to SEQ ID NO: 5462

SEQ ID NO: 5976 - DNA, 162 bp, Homo sapiens; identical to SEQ ID NO: 5244

SEQ ID NO: 5977 - DNA, 100 bp, Homo sapiens; identical to SEQ ID NO: 5916

SEQ ID NO: 5978 - DNA, 140 bp, Homo sapiens
ggctgaggcaggagaatggcgtgaacccgggaggcggagcttgcagtgagtcgagatcgcgccactgcactccagcctgggcgacagagcgaaactccgtctcaaaaaaaaaaaaaaaaaaaaaaaaaaagaggggaaaa

SEQ ID NO: 5979 - DNA, 153 bp, Homo sapiens; identical to SEQ ID NO: 5246

SEQ ID NO: 5980 - DNA, 193 bp, Homo sapiens; identical to SEQ ID NO: 5539

SEQ ID NO: 5981 - DNA, 136 bp, Homo sapiens; identical to SEQ ID NO: 5560

SEQ ID NO: 5982 - DNA, 150 bp, Homo sapiens; identical to SEQ ID NO: 5248

SEQ ID NO: 5983 - DNA, 142 bp, Homo sapiens; identical to SEQ ID NO: 5249

SEQ ID NO: 5984 - DNA, 123 bp, Homo sapiens; identical to SEQ ID NO: 5589

SEQ ID NO: 5985 - DNA, 177 bp, Homo sapiens; identical to SEQ ID NO: 5600

SEQ ID NO: 5986 - DNA, 166 bp, Homo sapiens; identical to SEQ ID NO: 5608

SEQ ID NO: 5987 - DNA, 142 bp, Homo sapiens; identical to SEQ ID NO: 5251

SEQ ID NO: 5988 - DNA, 268 bp, Homo sapiens; identical to SEQ ID NO: 5616

SEQ ID NO: 5989 - DNA, 368 bp, Homo sapiens; identical to SEQ ID NO: 5252

SEQ ID NO: 5990 - DNA, 2925 bp, Homo sapiens
ctcccgagtagctgggactacaggcgcccgccaccacgcctggctaattttttgtatttttagtagagacggggtttcaccgcgttagccaggatggtcttgatctcctgacctcgtgatccgcccgtctcggcctcccaaagtcctgggattacaggcgtgagccaccgcgcccggctgagatgggtattattaagaaattaagatgtggattaccagggtaagtcatatttcaatgtgcaacctctgcaagtccacagggtgtgatatggacattaaggagatctatggacgaatagcgtatgataccttgacaagttgacaaaatgtaaaatagttgaatggccatagaaaaaaaccagctttttagccccataggccgagggattcaggagggctggctacgggcattttggaatggaagatgttgtaccaacaaatcaagcttaggttcctggcaatttgcccacatataatatgtgaaagttcagatgtgaaataaatctgcggctaatagtaagaacctagccacaggagttaaaacttacggttctgggaccagatggactgccttctaatcttagtcttactacattttagcggtaaaaccttcagcaagttatttagcctccagcatctcagttttctcatctgtaaaatggtgataatgctactcttacattgggttgtagtaggataaaaggagaaaacgtatgtaaaggatttagtagaaacttattaaaattaagcaattattatttctcaattctaagattctaacctgcaaaaggcataaggcagctgctgagaacagggtgagaagatagggattcggtcaggaaaagtcttgtttccctgttgctgttggtggttttgtttgctcatttgtgtgttttttttattaatcattttcacttgtgtttattgacaagcttaatcaataatgccattgacatttagtaaaagtaaatttccttaagtgatctcccaggtagcaatgtttattcattatgtgtggagtagagataggaattattttattgctgcaaatattttattattggtttttcaagttttaaaagtaattttaattttttaatttttgtgagtatatagtaagtgcacatatttatggggtacatgagatattttgatacaggcatatgatgtgtaataatcacatcagggtaaacagggtaagcatcacctcaagcatttgtccttttttgtattacaaagaatctaattatactcttttagttatttttaaatgtacaataaattattgttgactatagttttgccactgcaaacaatagaaggcttcctgatacagcctcctagtcattggagttctatggcagaattcctaaagtttttaagtttcatgagatggctaaattttggtaaatatgatactttctttgaacagatgctacagaggccaatataaaggagtgtaacagagtgacacctgtgatcagtatctctccaactacaaagagtgtcccttaaatttcttctgtgtggttcctctttttttttttttttttttttgagacgaagtctcgctctgtcgcccaggctggagtgcagtggcgcgaacttggctcgctgcaagctccgcctcccgggttcactccattctcctgcctcaccctctcaagtagctgggactacaggtgcctgccaccactcccggctaatttttttttgcatttttagtgagagatggggtttcactgtgttagccaggatggtctccatctcctgacctcatgatccagccgccttggcctcccaaagtgctcggattacaggcgtgagccaccgcgctcggcctgtgtggctcctcttaagtaatactctgcttcgtccatataagcagaggtcagaactggctaagaatttctttatgtgtgtttatcctgatgttttcctactgtcacttttcttttcttatggattagcattgagggaatggtcagatggtgcctgcgtgagtctgattgaaacattttagcggcggggtgcgggggttgatggcatgtgcaatagtttaggatatttgagttagtggcagaatgtagacatgagggtgagtagagagtgcgtagcagagcaagcaattcaggaatctatgttggttaattacttttgttttgtggacattttattctacctgaaaagattatctaggaactacagaaattaatgacgtgtagtggaaactttgcacagtgtaagtgttatccatttacttctcttagtttccaatacaatgactctcctggtagctgtcatacatgataaatataatttcgttaataaaattatattttatataattgcgtactttaaacaagtgatcaatataactcagttataaatgtacagtaacaaagatcaatggataataaatacttctgcgttcattttcatggatacattctatttttgtttgtctcacaagcagtaatcagactatgaatcatgatatagctccataaacacttactttatagcaattcactgatatatgctccaccaaaaaaaattaagagacggatacaagcaatttaaagcttctgtgtgtgtgtgcatgcaaccgatgtgtatggcttttttttttttttttttttttgacacagagtgtcgctctgtcgcccaggctggagtgcagtggcgtgatctccgctcactgcaagctccgcctgcctggttcacgccattctcctgccttagcctcccaagtagctgggacttcaggcgcctgacaccacgcctggctaattttttgtatttttagtagagacggggtttcaccgtgttatccaggatggtctccatctcctgacctcgtgatccacctgcctccgcctcccaaagtgctgggattacaggcttgagcctcctcgcccggcc

SEQ ID NO: 5991 - DNA, 4704 bp, Homo sapiens; identical to SEQ ID NO: 5253

SEQ ID NO: 5992 - DNA, 1831 bp, Homo sapiens
tccaagaccagcctggtcaacctagcgagaccctatatctatgtgtatttaaaaattaagaattttgtaaaataataaaaataatagaatccaggctgcccatctttgtagtttagagatggtaggttcttctaaggggtagtaattggcctttgaaagttcacattcataacttctttcttaagttgggtggagagagggaagccaatggcgttttttttttttttggtttttttgttttttttaaacatcaaagtgcactgtcagagtgccgagtcctgattggtggaatgatgatggtatgatttgattctcccaaatcatctttgaaaaactgtgaaacatacaataagcttattccttgcctaattaccggttgctgggtcccagggggttgctggaacacggagactaatcagatgattcttgtctttaaggagcatgtggaagaggggacagatgaataccccatcttcctgctctccatcagtccgccctggtgtgatgtgccttagcagttccgagtaatcttcctggaaaaaataaataggcaactgcgatgagtttgtgcaaggatcctaatggtaatgaataataataacacaccactgacagcgaacgctgagtgttcactgcgtgctaggcaccatgcagagggtttcccctcacatgtactttaggggtagaaagagggacaaagaggaaagtctattaggtgcagatctgtgaactctgaataggccatccaccatctgagactcagaaacctgcagggacctggccgatgggcaggctgcatgctggctgcaccatgagtcagcaccagactgggagacgcagccactcagggatccaagggactcaaacatctgcaacctggccccaggccaagagaacaaactgcaggctccggatttgcggccctgtaggataggctcaaaatgaaacatgtttgttatttctaagtggatgggaactgaaagaacccgaacaatcagtgtacaaggattcatgaatggaccaaacatgcttgctttttgttcttgaaagatgtttgttgtatttaatatataacgagaagagtggtcaacgctgactgggtgctgagcactttaagtgcattacctgggtggctggctgggctgtgccagggttgaagggtgtggggagcttctttcaaggtgccccttctgcctcctggcacaggactctggctccagcacaccccaagctgaccctggtgggggtagggcccctcacccaaacctggcctctcccgtctcttgttctgctgcctcagctttctcctgtctgtggtagagtctgcttggacagactctgggcagggcagggggcagggcaagctggagagagaattcgttctaggttgatgtgggatgatagtggctggtagggcgcttgtatcctattggaaatccatgatgagatcccattcattcccacccttctcttaacaatgtctccttaagtccaagtctcaagtcgggtgcccagtttcataccatccttcctctccctctcacaaccttcgggcaggaccaaccccctcagaggaacccctgctgccccagccctttcaggctctgtgcccaggatctcccctccactccctggaaattccacatttggccaggtgtggtggtgcacacccttgttcccagctactcaaaaggttgaggtggaggtagaggctgcagtgagctgtgatctcactactgcactccagcctgtgcaagagagtgagaccccgtctctaaataataataataataataataataataataataataaatttaaagaaaaagaa

SEQ ID NO: 5993 - DNA, 1466 bp, Homo sapiens
gtttcctcaggtgtaaaatcaggatacacccgttcagcaaggatgctgtgagagcatccacctacaacagtgatgctcgcaggcccggggctggcaccgtcgctctgtgggcctcggcctctgggtccccacaaggcagggctgggacacccgcccgacctcctcccgaaccagaaccccggctgcccccagctccgcgggtctgcccccgacacatccctcccgaaggccacttggcttggacacaaatcgaaaccgaaaagctcatgtgacactggaggcagggatgcggcctcgcccgctctcagcccagggagacgctgtctccacccaactcggccatcttgagaggcccgagcagacaaagcgaccccattgttttgggtgacggcagacggggacccctttcccctccccgcgaccaggagcggggcgccctgggggctccgggccgggcagtgggtgtggcgagggcgagccccgggcgccgcgccggcctctgcggggcgtctgcggccctggggacccggccggcgggacgtctgcggccgccgggctctgcccatccaggggtcatctgcagctgccgggctcctcccatcccggggacatctgcgaccccggaggacctggcaggccctgcattccgcgaggcctggctctggcgaccctgccctccgcggccccgcacctttgagcgtggagcgctccaccagcaccgtgtggacctgcgggtccgaaaggaacttgcgcatctgctccagggcgctcttctcctccagcgccgcctccagcgcggccggcgcctcgccgccgtcctccagcagcagcggcaccagcttgcgcaggtgcttctgcagcaccgacacgtccgccacattctgcacggccgacacttccaatccggccgagccgtcctcgccgccgccgcccccgggctccgacatggtgtcgcgctcgggaccttccaggagcgatgagaaggcggccgcgactcagcgagacagccagcaagagacagaaacggccgccggaagccggaccgtccgctagcccaccgcagactgaggagagcgggagccggctccgccctaaaggcagccactgccaggtggccccgccccgccccgccggccgcagccgccgcagccacccgcgctcgctcgcggccttagcgtcacggcgccgcgcgtgcgcggggggcgggcccggcgatgtcgccgcgcgcccttctgggacttgtagtctcggcgctggtcggggcccgcagcctccgcactgcgagtcctaggagatggggacttggctcaacgtcctggctcggcgcccgggcttggcgaggttggtcaggggctgcgtctgtcttcttcactgctgtggacgcagcgaatagcacacagccagagaaactttatagtgaatcagtgatgttattggcgagagctaacgtttagtgagcgcttagc

SEQ ID NO: 5994 - DNA, 6154 bp, Homo sapiens
aagctgaaattggaagaagagaagaagaataaagtgagagaggggcgggggccggggttgggggcagtggctaatccctgaggccggctgagcagtgaggcctggagggactctggtggggcagcctgagcagctggtgtctcctgtcggcagggcagagagatctcttgaccagcggctgatggctggcatggtcttgtcttctgccccagcttgaaagatttaacagtaccagatttaatctggataacctggctgacttggaaaacttggttcaaagacggaaaaagcgactgagacacagagtcccccccaggaaacctgagcccctggttaaggtgagtgggaggtcggggttagggcagtgcacacaccagggctccagttccagaggaagggcttggggcagagtgggcactgcaggccaggaccacacagccagtgcctggggagcccattaaatccactccagagcccccgcggatgtgtccgccagggctgccataacaaagtcccacagcctggacagcctcaacagcaggcatgtgtcacctcgctgtcctgggggctggaaggctaacaggaaggtgttggcgaggctggttccctctgagggtggtgagggagaatcccttcatgcctctccggcttctggtggatgctggtgatctttggcgttccttggcttgtagatgtatcacccaactattgccttcatgtttgctgggcgttctgcctgtgtgcatgcctgtgtccatgtgtctcccccaactttttttttttttttttttttttttttgagacggagtctcgctctgttgcccaggctggagagcagtggcacgatctcggattactgcaagctctgcctcccgggttcatgccattctcctgcctcagcctcccgagtagctgggaccacaggcacccgccaccacgcccggctaatttttttttgtatttttagtagagatggggtttcaccgtgttagccaggatggtctcaatctcctgtccttgtggtctgcccgcctcagcctcccaaagtgctgggattacaggcatgagccaccgcatccggcccacgtgtcccctttcataaggacatcagtcacattggattagagcccactttaacacaagtcatattggtgaggggcccaccatacgccggtgtgacctcatcttaactaattacatcctcagtgactctgtttccaaataaggtcacattctgaggtacctggggttagtacttcatacgaatcttggggagatacaagtcaatccataacacacacgctcacacacacacagtctattcaatctcctggcgtgggattagaataagaaactgcattagtacgagccagcagtgttccttggtgggctgcatgggacccgtgggccagactggtgaagctgtgacatcttgggcacctgcggccttcgggagtgatttggtcttgtcttcaactgaaccagccgcagtcccaggcccaggtggagcctgtgggcctggagatgttcctgaaggcagctgctgagaaccaggagtacctgattgacaagtacttgacagacggaggggaccccaatgcccatgacaaggtagcacaggttgggtgagtcggctggcagcagctgcagctgcaggagcgctgccttcagtgtgttcaagtcctggcctaggaggctgcagggattttcactcttatgggcatgaatccagtggcacctgcagacggaggagagggagcggcccatcgcgtggtgggggaagtggcaattccattcagggacctggccctgggaaggggaccgcgtggggtctctaggggtggctgcactccctctgcctaatcttccatctctgccctcagctccaccgcaccgccttgcactgggcctgtctgaagggtcacagccagctggtgaacaagctgctggtggcaggtgccacagtggacgcgcgagacttggtgaggatggggaaaggcccagcctctggtcgacgcccagcttcacatcccagcagctgagtgcttgggtgcttttgttttgcagctggacaggacacctgtgttctgggcctgccgcggaggacatctggtcatcctcaaacagctgcttaaccagggagcccgggtcaatgcccgggacaaggtgaggggcacggtgctttgggggcctgtcgggaacacgggagcagacgctgttcctggagaagagagcacgtagtcccatgggttagggaggcctcaccaatccagacccagcactgacccccacttgctctcagatcgggagcacccccctgcacgtggcagtgcgcacccggcaccccgactgcctggagcacctcatcgagtgtggcgcccacctgaacgcacaggataaggtaaggcaggcgcttggtcttttccggctcggacagctccagaggagcagggactgaggagccccagccaggaccagaggtgctgtctgctcggtgacagcagccctgaccttcctgcatgaggagggcagcacgcggaggcagaagcttgactgcctgcgttctcagcaggaaggggacacggctctgcacgaggccgtgcggcacggcagctacaaagccatgaagctactgctgctctatggggccgagctgggggtgcggaacgcggtgagtgtgggcgcagccctggctcctgacccgagggcgggtggagcgcctgcaagggactgacccacaccgttgctcccaggcctccgtgaccccggtgcagctggctcgagactggcagcgcggcatccgggaggccctgcaggcccacgtggcgcatccccgcacccggtgctgaccgcagcaccgccccccgccgcgcctttcgcactgccaccattccatcctgtgccccgcccccgcgtctgcacctctgtggttcctgccctcagccctggttcctccctctctggcctgtgccgcctcagcagccctggcagaactgaagagcggcaccgggcccagcaggcaaagagagaggcctccctggcttcgagtgtcaggggagccgcgttccctcccagggctggagcagaggaccacaaggcagcagaaagcgcgggtccagatgagggccaggaaggggaggagagtgagggccaagaacgagccttaagggagcagtcccaagctggagccacccagggctgggtctgggagtcctcagtgtccacttgtcccaggttagggggcttgccttgctctctccagggccagtctgtgtgtgtggggactcagcccgtggccggcagatgccatccaggatgtacaaggtgcagccaaggcaggccatgcaggggccgggcctgtctgcagctggtggatgcctgtgggcatggctttctctggggaccccattcctgtcagtagcaaccctggcagtgtccggagcggctctagacaactttggtcataggaactctggaggtgggttctggtcatctgaggtggctactcaacaggtttgaggccccacagcaacagaagtccaggacccactaggttgcctcagaagccctaagactgatgagctggagcgcgcatttgagagaagcctcgcacccactgtgtactggccccgctcaggccggcctggcacaccgttgcctgctggcggctctcatggggaagcgcctgggcactggggattgcttgtggcccactcaactcttggggcagtggcccgtaaccctagtttgcctgaggcccttatgtccccttatgttcctggtactggagcttgagctcttgcctggaacgctgcagctgcacccaccctgcttgatcccacctgggaggccaggacactgaggagctctgaacccagcccacagggaagcagaggaaggtgagcccccgccgccccccagcccttcccatcccttccctgctccctggtggtctaaggacccaagctccctagacttcctcttccaccgtctgtacgtttcaaattacactggtgtaggcctgtactgctggtggggctgggcccctaaacgccagaaagtgaatcttaagaagctctgccctaaactgagaaccacatgctgagggaagggctgaaaggtgaaggctcagcctccctcacatgggtcctgggttacattaggtaccgggctgattgataggcatttggccatggttccttttcgtctacctttgggggccttctcaggcccagaacaaggctgttgttactatgtggaaaagctgaccagtgctgcacactaggggcacacacctttccatgagcagctcctgccctgtggcgacagccagcgtgcacccagacgctggtgccatggcgaagcaggcgttcaagaccatggagaagacaactcctcatctagaaaatgaggacacctcagtgacaaacacacctttttataccaatcagtatcctctgttcattaaaactggctatccattacagcctagccgtctttcctgggccgagaggagcccatgcttcagtcaccagggactgtctgatagggcccacgcctgttagccatgccggccgacagcaagataggccgagtgcagagtgggcgggatgcggggtcctggcactaggcttttgtgcttaaggcacctctgctcactgacgacaaggtcaaagagcagtggttctccacctcagctgcttatcagaatcaccaggaaggtttaaaaagtcctgatgtccagaccctaagtcagaagccctgaggggaggatccaggtattctcatgcagaggccatgcttgtctatgtgggaaatcctaggaatctacagaaagcagacaactagggagtccagcaaaatctcgggtgcaagataaacacacaaaaacctgtttctacctcctagaaatgaacatgtagacacaaaagttaaaaatatgtactgtttacaattgctgaaaaagggaaatacttcggtttaaatctaacaaaatatgcaaggacttgtatgctgaaaattataaaacgtgatgaaatcaaagatttaaatagacatgccatgttcatggattgctagacagaatacagtaaagatatcaattctcctcaaattaacatacaggttaaatgcagttcctatcaaaatcctagaagatgttttgtagatgtagacaaggttattctaaaattcatatacaaatttatagcaaaaatattttgaaaaagaatagagtgagaggaggaatcagtccagctgatttcaagatctactatatagctatgtgaaccaagagtgcaatgctggcagaggcacagacacacagatcgacagagccgagatcatcacgggaacaggaccacacaaatatgcccagctgactttaaggtgcaaaagtaattcaatggaggaaggacagcctttcaacaaacggtgctggagcagctggaccagctataggattaaaaaaaaagaactttagcctaagtcttacacattatacaaaaattaacatggctcacatgcatacttaaatttaaaactataaaacttcttttaggaaaaaacagataacctttgggatctaagactaggtagagttgttcttaaatgcaacactaaaagcaacagtccataaaggaaatatcagtaaagtggactttatcaaaactgaaaacttttgctctgtataaaaccctgttaagagggtgaaaagatggccgggcacggtggctcacacctgtaattgtagtactttgggaggttgaggcaggcagatcacttgagctcatgagtttgagaccaggtgtgggcaacatggtgaaaccccatctctataaaaaattagctgggcataggctgggcatggtggctcatgcctataattccagcactttggtaggctgaggcgggcagatcatctgaggtcaggagtttgagaccagcctgaccaacatggagaaaccccatctctactgaaaatacaaaattagccaggcgtggtggcacatgcctgtaatcccagctactcgggaggctgaggcagtagaatcacttgaactgggaggcggaggttgcagtgagccgagaccacgccattgaactccagcctgggcaacaagagtgaaactacatctcaaaaaaaaaaaaaaaa

SEQ ID NO: 5995 - DNA, 452 bp, Homo sapiens
ctgggaaatgcaaatgaaaaaccaccgtgaggcatcacgacacacctgtcagaacggctgaagtaaaaacatgtggacaccactaagtgctgtggaggattcagggaaactgatcatcctaggttgccggtgaggacatgagtttgacagtttgtggccaggtgcggtggctcacgcctgtaatcccagaactttgggaggctgaggcgggcagatcacgaagtcaggagatcgagaccatcctggctaacatggtgaaaccccgtctctactaaaaatacaaaaaactagccgggcgtggtggcgggcgcctgtagtcccagctatggggaggctgaggcaggagaatggcatgaacccgggaggcagagcttgcagtgagccgagactgcgccactgcactccagcctgggcaaaagagtgagactccgtctcaaaaaaaaaaaaaaaaa

SEQ ID NO: 5996 - DNA, 618 bp, Homo sapiens
cctgtctgccagcagcagagtccagcaatgagccctctatatggcactgttccttggggtgttcagccagctacctgtggcaggttgattacattggaccacttccattatggaagggacaggatttgttctctactggaatattcttactcaggatatggatttgcctttcctacatgcaattcttctgccaagagtaccatccatgcacttgcagaactgccttgtcgactgccatggtattacacatagcattgcttttgaccaaggaactcactctacagacaaaaatgcgacaatgcattcgtgatcatggcgttcactggtcttaccatgctccccttgatcctgaagcagctggcttgagagagcaatagaatggctatttgaagtcataattacaatgccaaccaggtgacaatactttgcagggctagggaaaagttccccagaagactgtatatgctctgaatcagcatatagtatatggtactgtttctcccataggtaggattcataggtccaggaatcaatgggtgaaagtagaatgggactccactcacaattacccctagtgagccactagcaacatttttgcatcatattcccatgacatta

SEQ ID NO: 5997 - DNA, 634 bp, Homo sapiens
cctgtctgccagcagcagagaccagcaatgagccctctatatggcactgttccttggggtgttcagccagctacctgtggcaggttgattacattggaccacttccattatggaagggacaggatttgttcttactggaatattcttactcaggatatggatttgcctttcctacatgcaattcttctgccaagagtaccatccatggacttgcagaactgccttgtcgactgccatggtattacacatagcattgcttttgaccaaggaactcactctacagacagaaatgcggcaatgcattcgtgatcatggcgttcactggtcttaccatgctccccttgatcctgaagcagctggcttgagagaacaatagaatggctatttgaagtcataattacaatgccaaccaggtgacaatactttgcagggctagggaaaagttccccagaaggctgtatatgctctgaatcagcatctagtatatggtactgtttctcccataggtaggattcataggtccaggaatcaatgggtgaaagtagaagggacaccactcacaattacccctagtgagccactagcaacatttttgcttcatattcccatgacattatgttctgctggcttagag

SEQ ID NO: 5998 - DNA, 1291 bp, Homo sapiens
ggaacatggggcggggggggggggggggataagtactggggggggggggccgaatccaggcactgctgggctgcctgctcaaggtgctgctctgggtggcctctgccttgctgtactttggaagcgaacaggccgcccgccttctgggcagcccctgcttacggcgcctctaccatgcctggctggcagcagtggtcatctttgggccgcttctgcagttccatgtcaaccctcggactatcttcgccagccacggcaacttcttcaacatgtgagtccactcaaggctgtgggagccgggtccctgcactctgggatcctagctcccttctccaggcttctgtcctcctgccagtctgaacactaaaaataggctaggaggttgaggaaaaggtcgggggagggggaagggaacagagccctggggtacaggggaagttgggaacaggactaaagaggaaatatggaccctggaatgctgaattgtcttccaaggagatagcaaaggttaaatgactgggggctgtaaagggcacggcaaggagagaacgagtgatgatgtgtagggttggggagagtgcagtgatgggagcacagaccagggtgggagatggagcttggggtctcaatagtctcccttctttgcccacagaaaatttgtgaattcagcctggggctggacatgcactttcttagggggctttgtgttgctggtggtgttcctggctacacggcgcgtggcagtaactgccagacacctgagccgactggtagtaggggcagccgtgtggcggggagccggccgggccttcctgctcatcgaggacctgactggctcctgcttcgagccactgccccagggtctgctgctccacgagctgcctgaccgccgcagctgcctggcagccggccaccagtggcgaggctacaccgtctcctcccacaccttcctgctcaccttttgctgcctgctcatggcagaggaagcagctgtgttcgccaagtacctggcccatgggcttcctgccggcgccccactgcgccttgtcttcctgctgaacgtgctgctgctgggcctctggaacttcttgctgctctgtaccgtcatctatttccaccagtacactcacaaggtggtgggcgccgcagtgggcacctttgcctggtacctcacctatggcagctggtatcatcagccctggtctccagggagcccaggccatgggctcttcccccgtccccactccagccgcaagcataactgaaagaaataaaaaccatcgggcctggc

SEQ ID NO: 5999 - DNA, 801 bp, Homo sapiens
ggcaacatggtgaaatccctgtcttaatcaatcaatcaataaacaaacaaatacacatactacaataaatgtacttatttatcttgttatacttgtgcttttattttagcagttctgaaaatggcttccttgtaagcgaagtctatctatatttaaaattttaatagatattagtaggtaaaaacatttttaaaaacttgattactaataaaaatttaaaatgctacaccaatttatatttctaccaataatttatagtaatgtggtgcatcctatcttaccaggagtggatgctgccagtcattaaatttttgccatcctgggccaaaaatgatatctaattttgtttcctttctatgaaaattggtattcagacatattccaatgtttgtagctatttacaatgcattcttgctgtattggccattcatatcttttttattattaattgttttctttttaaaatcagttcataaggcttttcaaaaattcttacagaggctggggatggtggcttgcacctgtaatcccagtgctttgggaggccaaggtgggagaattgcttgagcacaggaattcgattgtagcctgggcaagatggcaagacccctgtctttacaaaacattaaaaaatcagcatggcatcatggtgtgtgtctttagtcccagctacttcagaggctgaggccacagtatcccttgagtccagtaattcgaagtggcagtgagctatgatcctgccactgcacttcagcctaggtgacaaaatgagaccctgtctctaaaaaaaaaaaaaaaaaa

SEQ ID NO: 6000 - DNA, 801 bp, Homo sapiens
ggcaacatggtgaaatccctgtcttaatcaatcaatcaataaacaaacaaatacacatactacaataaatgtacttatttatcttgttatacttgtgcttttattttagcagttctgaaaatggcttccttgtaagcgaagtctatctatatttaaaattttaatagatattagtaggtaaaaacatttttaaaaacttgattactaataaaaatttaaaatgctacaccaatttatatttctaccaataatttatagtaatgtggtgcatcctatcttaccaggagtggatgctgccagtcattaaatttttgccatcctgggccaaaaatgatatctaattttgtttcctttctatgaaaattggtattcagacatattccaatgtttgtagctatttacaatgcattcttgctgtattggccattcatatcttttttattattaattgttttctttttaaaatcagttcataaggcttttcaaaaattcttacagaggctggggatggtggcttgcacctgtaatcccagtgctttgggaggccaaggtgggagaattgcttgagcacaggaattcgattgtagcctgggcaagatggcaagacccctgtctttacaaaacattaaaaaatcagcctggcatcatggtgtgtgtctttagtcccagctacttcagaggctgaggccacagtatcccttgagtccagtaattcgaagtggcagtgagctatgatcctgccactgcacttcagcctaggtgacaaaatgagaccctgtctctaaaaaaaaaaaaaaaaaa

SEQ ID NO: 6001 - DNA, 429 bp, Homo sapiens
gttctaatcccatttctgaaagaaagagcataaatatttgccgttagaaatcatggaacagtttttagatgtgttttatgttatttgataggttaatactttatttcaggatttctttttgcattatccttggcagtggctaggtactgtcaatgaccagtattttttgttctatctggggatgtgaatccaaaacaaaggatagaattgcttgtgctctgtttttctctcagttaattttttcaaaatataatcccaagtacaaatcatgcttttgagtattataggggatcatatttttttcttataaccttgaataagatgcagtaaaaacagtgaagctgaccacttttcttccctatcatttaggtatgtagcttctaccagatattttgacatcctgtttcataagaatctttttctttaatt

SEQ ID NO: 6002 - DNA, 852 bp, Homo sapiens
tgctttccttccatttttttttcttttattattatactttaagttttagggtacatgtgcacattgtgcaggttagttacatatgtatacatgtgccatgctggtggctgcacccactaactcatcatctagcattaggtatatctcccaatgctatccctccccgctccccccaccccacaacagtccccagagtgtgatgttccccttcctgtgtccatgtgatctcattgttcagttcccacctatgagtgagaatatgcggtgtttggttttttgttcttgcgatagtttactgagaatgatgatttccaatttcatccatgtccctacaaaggacatgaactcatcattttttatggctgcatagtattccatggtgtatatgtgccacattttctttatccagtctataattgatagacatttgggttggttccaagtcttgctatgtgaatagtgccggaataaacatacgtgtgcatgtgtctttatagcagcatgattgatagtcctttgggtatatacccagtgatgggatggctgggtcatatggtatttctagttgtagatgcatgaggtatcgccacactgacttccacaatggttgaactagtttacagtcccaccaacagtgtaaaagtgttcctatttctccacatcctctccagcacctgtagtttcctgactttttaatgatcgccattctaactggtgtgagatggtatctcattgtggttttaatttgcatttctctgatggccagtgatgatgagcattttttcatgtgtttcttggctgcataaatgtcttcttttgagaagtgtctgttcatgacctttgcccactttt

SEQ ID NO: 6003 - DNA, 990 bp, Homo sapiens
tgctttccttccatttttttttcttttattattatactttaagttttagggtacatgtgcacattgtgcaggttagttacatatgtatacatgtgccatgctggtggctgcacccactaactcatcatctagcattaggtatatctcccaatgctatccctccccgctccccccaccccacaacagtccccagagtgtgatgttccccttcctgtgtccatgtgatctcattgttcagttcccacctatgagtgagaatatgcggtgtttggttttttgttcttgcgatagtttactgagaatgatgatttccaatttcatccatgtccctacaaaggacatgaactcatcattttttatggctgcatagtattccatggtgtatatgtgccacattttcttaatccattctatcattgttggacatctgggttggttccaagtctctgctatggtgaatagtgccacaataaacatacgtgtgcatgtgtctttatagcagcatgatttatagtcctttgggtatatacccagtaatgggatggctgggtcaaatggtatttctagttctagatccctgaggaatcgccacactgacttccacaatggttgaactagtttacagtcccaccaacagtgtaaaagtgttcctatttctccacatcctctccagcacctgttgtttcctgactttttaatgatcgccattctaactggtgtgagatggtatctcattgtggttttaatttgcatttctctgatggccagtgatgatgagcattttttcatgtgttttttggctgcataaatgtcttcttttgagaagtgtctgttcatgacctttgcccacttttaccccattctttttttttttttttgagatggagtcttgctctgtcgcccaggctggagtgcagtggagcgatctcggctcactgcaacctccgcctcccaggttcaagtgattctcttgcctcagcctgctgagta

SEQ ID NO: 6004 - DNA, 809 bp, Homo sapiens
tagaaataactcatgttttcacagtatgtactacttaaagaaacaatatagaataagaccattagagttctaattatggctccaccatttgttaacataatcactctacataaattacttaagccatttccccctctgcatattgggattaataaataactcacagttgttgctaagcttaaatgagataacaaagtcattagctcaccatcatttgtatatacagtcattagcaaatatttactgagtaaattctgagggatacagtgctttgcacattataaaaaagtcaatacattttatagcattttgatagtcctagacctagaaagtacttgttggggtcacattgatgccaaatgaaaggaaaagagaagggggttctaatcccatttctgaaagaaagagcataaatatttgccgttagaaatcatggaacagtttttagatgtgttttatgttatttgataggttaatactttatttcaggatttctttttgcattatccttggcagtggctaggtactgtcaatgaccagtattttttgttctatctggggatgtgaatccaaaacaaaggatagaattgcttgtgctctgtttttctctcagttaattttttcaaaatataatcccaagtacaaatcatgcttttgagtattataggggatcatatttttttcttataaccttgaataagatgcagtaaaaacagtgaagctgaccacttttcttccctatcatttaggtatgtagcttctaccagatattttgacatcctgtttcataagaatctttttctttaatt

SEQ ID NO: 6005 - DNA, 58742 bp, Homo sapiens
gggctgtcagccggcctaggaggaggaaggagcctgcggcgtgcagtgtgaggggcgggacccggctgccggcggtgggtctagctgggggaggtcgggccatgctggtgggccagggcgcggggccgctggggcccgcggtggtcaccgccgcggtggtgctgctgctgagcggcgtggggccggcgcacggctcggaggacatcgtggtgggctgcggtggcttcgtcaagtcggacgtggagatcaactactctctcatcgaggtgagcgcccgccccgccgcccggcgccgagtcgccgggccggtggttcagcctctctgggccgcgctggcctcgtctctgacaccgggcggtgtggagtccttggagcccttacctcttccgaggctatgctgtccgcgggctccctgcagcccctccccagtcgcgctggaggggaggttcttatcatggggtcgtctaaggactgaggggtgccagacctcaggttcttcaaaaccccgactccagatccccggaacacagaccccagatcctcaaaacccagaccctaaattccctggagcccagactccatttctttaaaacttagacctgagatctcctcgaatcagaccccctgaaactcagatttccccaaacccacattccagaacctagagaccacatgtcttatcccccaaactccacagcccagaaccccccgaagttctaatccactgctcctccaaaccccgcggcatgattttaaagagcatcaattcccatcccatagattctgacctagtagatcagtattggcaaccctggggccggaaagctattttttatttctccggctcccctccacttctgaaaatggagagttgccagctgccctgattgccttaatgagtagttaatggaattaccctagagatttgtgctgaaggttttttttttttttttttttaaattaagttgtaaagtcctgttaaatgtttatcagcccggtgggattatgacccagaaaggttcccgtaaagaggaaagggatggatggaggtaggggcagaatgtcatttgtcccggtagatgggaggggaccagagcaaggcctgggcctcatttttgggaggggatttatggtggggtaggacaaggaagaggaaaagagcgggtgcctcggaggtaatttaggagaaaacgaaggaagaggctgggaaatgccaaagagagggattggggaataagaccccaaagatcgtctgaaagcacctttgagctgttccagggctggcagtgaagggtgaagctctgtgttctgcaaagcgggctgctgaggattgggggaggggtagggagtcagttccacaccccaccagctctgcgacctgcccttgctctaggtttcagtttttgtacctataggatggtgttgggagagaaacagtggaacccagcagatacatttctttaacaagcggatccgtgatcttcttcaaggcccccttgtttgctgctttttcagactgaagaggtcagaggtcaggcattgaatgaatctacccactggcagcggcagggctcctaggatttcctgggtacatgtttctgggtgcccatgccacctcctaggtctgcactggggacaggacacgttcagggtggtatggctgtagacggcacagggcatttcagaagctgaaatgcaagaggccgctaaggcctcttgcaacttgtagtttccaggggttctggaaggaaggaaaagacaggcacccccctccaccctcaccctcatactaatagtgaccttgagagcagagaacaggttttgtgacccatttcaaagtgtgttccttaagcccaagggctgcctgtccagatggtgtgggacactcattctttcataagtaattcagattctgaaatcagacatttcatactggccatcttgatgtagattacattgccatcctgtgtcctgattgtactttatgaaagatgtagaaataatcatgatatttcacggttatttcttgattgtgttttttgtgttcctatgcaactgccgccattcttctctagctttctcccatcctgagtgtttttacatcgtgttcattgagtcaacaactatttactgagccccggcacatactgaagccttgtccccagtgtggatatagcagtacagtgaacagaacagacaaaactccatactctcatgagactgacattttgttctctaacagggaccttactgttaaaaaaaaaaaaaattatactggttgctaatactttaacaatcagcaggtttcacattaaaaactgggtgctttatttctctggaaaaccagccaatctttaggctgccacacttggcttgggttttgtagtgatctgaatccttttggatgaatgtcccttgatgttgcctccctaaccggtctagtctggtgaatttccagtccctgccttaaatgcatgcatctgaatctctttgtcacctgtagcaaattcactgagtacctagagtaagctagacactgtctcaggcactggggaatgaagttgtcactgacctcagagaactttacatacaggcttaaccttatttcacacgagtcctttcccaaatgttcaaatgttcgttttatgagttagtcactttgtacatcatcttagctggtgagattcgactgtttcatagcggctcgtgtcatggtttgtttcatggtcatagagcattaacattttggaggtgaggcttttaggtgcatcagacccaactgcttccttttacagacatggaaactgagcctcagagtggttgagctgtgcaggtacatttaggaaattttccttgagcccagtatgttccctacgtattacactgtgttgcctttttcttcagagagagatattaaatagtgatacaaactgctttttccattttacttattttattttgttttattttgaggcagggtctcacactgttgctcaggctggagtatagtggcaccatcatagctcaccaaagcctctgactcctggcctcaagcagtcctcctgcctcggcctcctgagtagctgaggctacaggcacgtgccatcatgcctagctaattttttttctagtagggatgaggtgtggctgtgttgtccaggctggtctcctgggctcaagtgatcctccttctttggcctcccaaagtgctgggattacaggcatgagccaccatgcctggccgcaaactgatttttctttgaatccatattctgtagcaggtgcttaatatgcattgatgtgaatctgtacaaccacatgaaaaggagtggctctatgtctgcacctgaagaaaccgaacacgagcttgcccaaggccacgcaacacgtggaagactcagatggcatttgggcatcttactgggttaacacttcgtgtctggtaatgctcagaatgtaagagttttagagagtccttgaagagaggacagatattaaatgtctttttagtctctttttcttcggagaatgaaagtaatgagaaaattaagtttctagatgaatgttgctccaagtatttgaaattattcagagttagtaaggaagatttctggccctcattgcagacctttagttgagaaatagaggtgggccccaggaatttgcaatttattttactttattttattattatttttgagacggagtcttgctctgtctcccaggctggagtgctgtggcatgatcttggctcactgcaacctccgcctcctgagttcaaacaattttcctgcctcagcctcccaagtacctgggactaccggtgcctgccaccatgcctgggtaactttttttgtatttttagtagggacagggtttcaccttgttggccaggctggtctcaaattcctgaccttaagtgatctgcccacctcaccctcctgaagtgctgggagtactggcatgagccaccgtgcccagccaggaatttgcatgttaataagcaccttactaatggcaaagtttgcaaatttgttttagacccggaaacttacacgagcaacctagaggcagccactaaaataaacagaaaagcattgaaaaataaggcattgtaataggctgtaggtggtttctaatctgaaaaacattgagtcacatgatttgggagagagtttgttgatttccctctgtccccagtaatgccccgtgttaaaagctggcatataataggtcctcagtgaatgtatactgactgagtgcattcaggtgtaacatgtgtagttaattcccaaaggcaatgttatgatttctgttttccttccttcctttccagataaagctgtacaccaagcatgggactttgaaataccagacagactgtgcccctaataatggttactttatgatccctttgtatgataaggtaagaggggactgcttgtcacttatgatgggaagtcactagtgtgcctcaccaggctgcattaaccatgtcctttcctacactagcaaatgctcatctgttttgtaaattattagtggaatatgataatcctagccacatttggagggagacaacttacaaactgccttgacgaatacagtggctctctctgtgtttaggaccatttggcaatgtctagagacgtttttgttgtgacatctgtggctgtgcgctacagtcacccagtgagtagtggccaggcgtggagctaaatgtgctacagtgctgcctacgacagcccagatgtcagtagtgccagggctgagaaactctgatttcatggaacccgttacttgcaagcagcttaaagtattgttaaaaaaattgtacaagtaatacatgaattcatgaactttgtgaaaaagaaagtcaaggtctttagaagtatgtgaaataaatttgtacccttttcgctccaattttacctccctctgtagtgataacctctgataatctgataaaggttttttttgttgtttttttttttcttcttttgagttggagtctcgctctgtcgcccaggctggagtgcagtggtgtgatcttgcctcactccaacctccaccccccaggttcaagccattttccttcctcagcctcctgaatagctgggattacaggcatctgccactacacccagctaatgttttgtatttttaatagtgatggggttttgccatgttggctaggctggtctcgaactcctgacctcaagtgaaccacctgcctcagcctcccaaagtgctgggattacaggtgtgagccgatgtttccggccctcttataaaattttgatgtgcatcctaacagattgctttctatttatagttattcagatatccacgggtacacatgcatatgtatatatggaaatacacacaagcacacatgcacatcgatatgtatccacaaacacctctatacaatcccatcctcccacatataaaccttttatttggaaatacagattcataggaagttgcaaaaatagtcaatacacatagttttgattttgatatattttttaatacaaatgaaatcaaacaataggatttattctgcagtttcattttttcccctgtgttaatgctttcaataccagagggacatttggttttttcctcttgcatgctttcaacattagcatagatagatctactgacttttttttttttttttgagacagagtctcactctgtcagccaggctggagtgcagtggcgcgatctcggctcactgcaacctctgcctcctgggttccagtgattcttctgcctcagcctcccaagtagctgggattacaggcacccaccaccatgcccagctaattttttttgtatttttagtagagatggtgtttcaccatgttggccaggctggttttgaactcctgacctcaggtgatccgcccacctcagcctcccagagtgctgggattacaggcatgagccaccatgctcagcctactgacttctttttaatggctgcatagtgtgtcagagtcaaacccaaactgtaatttatttaactacttggacatatagactttccccaattttaaaataatagtaattttaacataacacaccaggaaatattcttgaacttaactcttcatccagaatgcataggattgatttctagagatggactagctgggtctgtcctgaaatctatttaattaatttttaaatagtatcagtatcagtctcaagaaaccaggaggctggacgtggtagctcatgcctgtaatcctagcactttgggaggttgaggcaggtggatcgcctgagctcaggagtgtgagaccagcctgggcaacatggtgcaaccccgtctctactaaaatacaaaaaaattagccgggtgtcacgtggatgcctgtagtcccagctacttgggaggctgaggcaggagaatcgcttgaacccaggagacggaggttgcagtgagccaagatcgcaccacttcactccagcctgggcaacagagcgaggctccatctcaaaaaaaaaaaactaaaacaaaaacagaaaccagggttgataagtaaaatctagttttatttattgaattaatgagttaacgtattgtttagagacaggatccccttccgctgcccatgctggagtgcaggggcacaattatggttcactgcagcactgacctcctgggctcaagtgatctttctgcctcttcctcctaagtagctaagactgtaggcgcctgccaccacacccagctaattttttaagaacattttttgtacagatggggtcttgctatgttgcttaggctggtcttgaactcctggcctcaagtgaccctcctgccttggcctcccacagtgttgggattataggtgtgaggtactgtgcctggccaaatctagttttagggggtgcctttagttcctgaagatacatgctaacttgtgcaactgtaggcatgtgagggcttaatgggagactcaattaatagaattatagtatgtttagtattaaaagacagtgagtggctgaacctagtgtctttagaactcatgaatgggcttcagcactgtcttctgattgtttagatgaaaacttctggtgttcagcttcagcttgtagcttctgaagagaatcagtgctcagtaccatgtagaagaacaaggcttactcttagaatttcatttccggtgtaaaaaaattttagattaaatgataacactaaactaaatttagccagagtcacaattctcatttcttgaaattacattttctttttttccttttagggggatttcattctgaagattgagcctcccctagggtggagttttggtaagttaactgaatcactagacattctttgtaaaagattagatgatatgccgaatattaatttaggctagcagagtgcataaactattaaaatattaaggatcatttccagtatggaagagggtttgtattcctcccctccttgcccccatcactctggtttagttcggatttaccttaatctacctcaagactttctgtcacctttgaaaaatagacatcttttcttctacctttctggaaactcttcccttgcagtttcactcattacgtggccgtggaacagtatagaaatcaagagtggggacttggttcccatcccaggatggcttcttttttagccccctcagttttttaagtttttatggaattaattgaaacatttaaagattgtgagatttgtcataaaaatccagatttatgtcccatgagatgagaagactgtcagccttataccttaccagttaaataactttgggcaagttacttcccccgtgtcagcctggctcctcactgtcgagcaagggtagttatagtccctgccccactgggtacttggaggattaataaaccaatactgagtgttcagaggggctggcacgtaattagcaagtactcagtattcagaaacagcccttctgcacacatcccaacaaaagctccaaactttcctcatataactgccttcaagcatagctggggagttggggatggggttgagatcagaagagagggtctgttttgatgtagtttacatttttgaagaggagagactcttgatgtttcagtagagcaggtgtgggtgaccccagtccatggcttggggagaggagtagggatcaccgttgttgatatcaggcttgctcgtgcattagacaaggaagaatttagcacctgccatcaccaaggctaaaatgaggctcaggcagctgacagctaatttggctctgtgagagcagctcttttatcagtttatagtcaggggtagggtggggggtgcctggctggtacgttccagaaagctggagaggaatgcagccctgctcatggccaaagcagaagtccagattggtggcctggaggagtgttgtgtttgccaccccccaccctacccccaactggtgctgttgataagctttttaattgaattatactttcagaaaagtgccttggatgaattttcactaagtgaacacacccatgtatccaccatccagataataagatagcacttcaccagcaccccagaagtccccatcctgggtgctcattagccatcccgccccaccctccaggtgaccaccaccctgaccttctacaaattagagatccatttggtctgttttgaactttatacaaatgctatcatgcagggaactttttaatatccggtttctttcactcaacattatgaactttatctgtatcatttgtagctttagttcattctctttgctgttgagaattctgatgcataaatataaaattatttatattttataaaatacttatattttattttatttttttcttttttttgagactgagtctcgctctgttgcccaggctggagtgtgatctcagttcactgcaacttctgcccgggttcaagcaattcttgtgcctcagcctcctcagtagatgagattacaggtgtgcaccaccacacccagctaatttttgtatttttagtagagatggggtttcatcatgttgacccaggctggtctcgaactcctgacctcaagtgatctgcccgctttggcctcccaaagtgttgggattataggcaagagccaccacgcctggcctatatttatattttatattcatattttgtatcagtgatctcttctactgttgatggccatttgagttgcttaccgattttggccactaagagcagtgctcctgtgaacattcttgtatgtatattttgatacatgtgtctgcatttttgctgagtatatcacaggagtaaagtcgctgagccatagagctgatacatgctcagctttaggtgtttgcaaacatccaaagtggatgcaccagtttgtgttctcccagcagtgtacaagggtttccattgctccacatcctaacctacacttgatatcgtcagttttttttaattttagcccttctggtgggggtgtggtattatctcactgtggccttgatttacattccactgatggccaatgaggttgcacactttttcgtatgtttatgtttgtttgccatgggctagctatttttgtaagattcctgttcaagtcttttgcccattttttattggagtctttgtgtgtgtgtgtgtgtgtgtgtgtgcatgtacgcgtgcaagcacgtgtgtaattcatcttaactgaaaatctcatctcatggttttccatttttttctctactcattactccatattcttcctaacctttcaaaaactcaaccttaacccctattatgatgaactcttcagttaaaaaatggagttaattgctgatattgaaaaatcaagagatggtatataaaatccagatttccagtttttcggagaagttggaagctctggcaaagcatggtagtggttggcagacttgagtggcagttgtctcctttcaatttgccacagtccccctgaggatgctccgctcacttcgaacccatgaggcccctgtggccctggagtttgtgttcctggtttaacatggctgagctcatgtccttggtcagagaacagatccagagccagacttttagggttgaattggggctctgttactcagaagctctgtgatcttgggagctcctttaacctttctgtgccttaatttacccctcagtaaattgcagctattactgcctgtctcttaagataattgtgaggattaaaggcactcagctcagtgcctggtcggtgatgagcattcaggaaataaaattatttggtgctcactgaattttcactggaactctgagatataacttagctgaaaggcgttgtaaaattattttatactctaaacacgaattccctctggggcaggaaaccaggaggctagggggataggggtgagagggagacttttcccagaatactttttcgtacctttggatttggaaacacaacgagtgtattaagtgttcaaaagtaaaatgaaacctgaataataaaaatacgttctacttaggttcactgtaccccaaaactaagcttgcctttgtgtcttgtgccccggtttcctcccctgcttcgttcctcagagccgacgaccgtggagctccatgtggatggagtcagtgacatctgcacaaagggtggggacatcaactttgtcttcactgggttctctgtgaatggcaaggtttgtctttggaacttgattatttttcctgttcactctataatgtatactaaatccttttttaaaaaaatgcaggatattttaacctggggactttgatcccacaagggacccatggataagtggcaagtgagcctgtgaactctgtacttcatccgtgtagaacacagcaggtgtatttaggaatgagattgaggttgctggtcatcccctctgctcccagagcataggctgttggtgtttttatttttttattttttattttgagacagggtcttcctctattgcccaggctggagtgcagtggtgcaatcttgactcactgcagcctccacctcccaggttcaagtgattctcctgcctcaccctcccgctccttcaccctcccgagtagctaggattacaagtgtgtgccaccatgcctggctaatttttgtattttcagtagagatgggcttttgctgtgttggccaggctggtctcaaactcctgacctcaggtgatccgcctgcctccacctcccatagtgctgggattacaggtgtacgctgtgcacccagccgctgttagcgtttatgtcagggatggccttttacagggatgccgaattggaaggacacactctctaagccttgtggcatcttgctgtccctgtgggtgaattgaagtcagcttctcccagagagagcgtgcatctgcttctgacacttacgtaggaggattcctattatttaagttctgagatttttttggaccgccacggtggtgtgaatttagagtcctaacgggtgtgtgcccagctcccgtgattcagattctcaggggagagtcatttctcctccacccgccctgtgcctgcggttgagatgtgcttccttccttcctgtccttctcttcatgatggacttctttctcctctacctttgcggtgacggggaggcccttccatcccagctgtatgtgtgggcttcttgttagagatggggatcttgggtagttttttctttatcgatggtttgcaaaataatggtgaacctttttttatttttatttttatttatttatttttttgagacagagtctcgctctgtggcctaagctggagtgcagtagcgcagtctctctcaccacaacctccacctcctgggttcgagcaattctcctgcctcagcctccccagtagctgggattacaggcgtgtgccacctgacccagctaatttttatatttttatttttatgtacatttacttttttttttttttttttttttttaagatggagtctccctctgtcgcccaggctggagtgcagtggcgcgattgcagcttactgcaacctccgcctcctgggttcaagtgattctcctgcctcagcctcaggagtagctgggattacaagcatgtgccatgacgcccagctaatttttgtatttttagtagagacagggtttcaccatgttggccaggctggtctcaaactcctgacctcaagtggtctgcctgcctcagcctcccaaagtgctgggattacaggcgtgaaccaccacacccacccagaccaataatggtgaatctataactgatgatgtcttagattcattgaaatagagtcttattttactgttactgttccctctcctacctcatccccaggaaacatatccatgatttatagcatcttttcaatgggattcttgacccaaagagggttcctgggctccacctgggagttgtaagcaggactgccagtgctttgagaggagggtgctttgctgggtgggccctaactttcttctccatggcaggtcctcagcaaagggcagcccctgggtcctgcgggagttcaggtgtctctgagaaacactgggaccgaagcaaagatccagtccacagttacacagcctggcggaaagtgagtagcgtcctgtctcttagtgttgccttagagccgggctctgacaggggtcatggagctgggtttgggagtttggcattcagggagttctgggttcagatcctgattcagcctcttaagtttgggtgagttcatgcccgtcagagtgctgagttccccacatgtgaaatggaatccatttgacccatcttgcctagcattgatgagatgattaaatatgagttcatactggccaggcatgttggcttgcgcctataatgccagcactttgggaggccagtatgggaggatcacttgagttcaggagttcgagaccagcctggacaacatagggagactcagtctccacaaataatttaaaaaattatatcaagtagagtcccacgggggaagaaaattagctgggtgtggtggcatgcttctgtggttgcagctactcgggaggctgaggcgggaggattgcttgagcctggaaggttgaggctgcggtgagccgtgatcatgtgccactgtgctccagcctcggcagcagagcaagaccctgtctgaaacaaacaaaaaaagagttaatacccataaagcacctgcttcaaggcctggggcttagtgggtcttcatttagcagctcagcctggctctggagcctgccagcccgggcttgaatcccagctcccccatttgctggctggttgacctagggcaagttccttaacccctctgtgcctcagtttcctcttttgtaaatgaagataattgtggaacctatctcctaaggtactggaaagatgaaattaatattattacttcaagctgcctggcatattagctcaaataggttagctcagttatgattagaaaaaatcattatcattattatatcaaaactgctttgtagttggaacagatgcctagctgaccttgctgagtcagatttaaagcatttatttaatggatgtatatagttgagttgtaaatgttaacagatatgccaagattaataccagaatagttcaaactgataattccgaaagcgttcaaatcattactaactccgttaatatacaaactgagtaaattgcaaaatagaagtttataatgagtctgtcagtaagttattcaattttaaagttattattgttgaaactagttttcatttttgaaataacatttacttctgcttgactggtgcctctccaggcctggtgtgtagcaggaatatggagctgtaattttttttctgggctagtaatttggtgttgaccttactagaaaaaaatagtgtcttgagccttctgaatacctttcatctgcactaactgaaacaatgaaacatgtagcactgggctattatgaaaatgaaatagaagctcaatcttaccaatacttgtagtaatgtgatttccaagacctatccagttattgcaggcaagatttgacacaataaaataccacagaagaagaaatcaaatgcgttttctagttcatttcaccggacttagccttctcatttgtcagttgccttacaaatttgaagggataaacatgttagtatactggcagcagcatttccagctttagctcggctcactctggtgttagtctgtctatggctagtagagtaattttcatcagctgctggtttcttatctcagttgctttgtgcaaaaacccagaatgacttatctgtgtttctctaaagccttttttctgggattcaaagcttatcatagtttaccctgccctgtgtcatttgcatcatcttgggtcagcgtccccctcagcctgtgcatctgttctgttctttttcaccccacttctcccttcccatgtgtttccttggacacttctgtccccttctccttgtcagttcatgcctgtcacctctgtcaaacccagtcgaatgttctgtgactggtccctgctgtgctacaaggattggttttatgccagaaatccttgagattaagggagacgtaagcactcctctttccgatcagcacatggagcacccctcttggcacacagtaagtgctcaataagcgctcttttatgcagatttgtacagtgaaggattgaatttcattcatgctcatttaacaagctaatggaagtttgcgataattccaacattgttttcttgtgctgccaacattagtcatagaattagaaatacttgggttgtttggagaaagttaaatggttattttttatgtcttaggtttgcattttttaaagttctgcctggagattatgaaatcctcgcaactcatccaacctgggcgttgaaagaggtgagtgacagctacgtctatagccatgccaataatatgctggtcttgggacaaatgtagggcttttcaatttaggatatgaaaagaatttatggttcctccaggactagatgaagaaccaatggtgctgttgtttagtttggtagttatttataaggtgtaactcctcactgtagcagatgttgcttgtgttagtttcagttttaggtgacagtgttgtcttcctgctgtgaaatagatctgttttattaactatagctattttaaactaaatcaacaacagaaggccctgacgagatttatttgttgttcttttttcagcctgaaacagaaatctgtaaatatactaaacattctagaaactgtggtacgcgtgaccaaggagaatgtatgagaatgtttattgcagctttgtttgtaatagcaaaatattgtaaacaacctaaatgccttttaagagaagaatggattggggttccatcatacaataggctgctgtatgtcagcagtaatgaatgaaccagagctacatatatcaatgtaactacatttaaaaacagagttgaaggaaatatgattttaaatacttgtgataatcatttatggatacagtcttttttttttttttttttttttaaagatggagtctcgctctgttgccaagactggagtgcagtggcatgatcttggcttattgcaacctcggccttctgtgtccaagcgagtctccggcttcagtctcctgagcagctgaattacagggatgtgccaccacgcccagctaatttttgtatttttagtatatatgggattttgccatgttggccaggctggtctcgaactcctagcctcaaatgatccaccagcctcgggctctcaaagtggtgggattacaggtataaaccagtgcactcggccagatacagtctttttttttttttttttttttgcaacagggtcttgctctgttgcccaggctagagtacagtgacatattcatggctcattgcagcctctggttcctggccttaagcgatccttcaccttggcctcccaaggatctggaactgcaggcatgtgccactgcccctagctaaggatacagtcttttttttttgagatgaagtcttgctcttgttgcccaggctggagtgcaatggggcgatctcggctcattgcaacctccgcctcttgggttcaagcgattctcctgcctcagcctcctgagtagctggggttacaggtgcctgccaccatgcccagttaatttttgtatttttagtagggacagggaggatacagtcttatgtagaaaaattataaagacatgtatgggaatagcagacgctgttcaaaatgatactgacttctagagaaagagggaggagggggacttcggggtacgccagcatcttgaattgtatttttttaaatttctttagctggttagaaggtatgtaagtgttctttagcatatctttttttgtttgactgaaatagtttatagtcaaagatcaaaaaaggaactccacctagtaggtgaggttctgtaatagccgtgaaagaccaaattgaaataagacttaagggacatcttgacatgttagcttctgtgttagtattgaagctgtatctcatttttgctaaagaagcattggaatcagtatttcagcttctactctatctgttttattattatttttactctgtaggttttacgcacttataattgatgatagtttcacacctagatgtctcttcttactgtttgtgacttttggttttgggggtttttctcttctgcagcaacatttaaaaatattttattcgaggctgggcgcagttgctcatgctgtaattccagcattttgggaggctgaggtgggtggatcacttgaggtcaggagttcgagaccaacctggccaacatggtgaaaccgcatctctactaaaaatagaaaaaaattagccaggaatggtggcatacacctgtaatcccagctactcgggaggctgaggcaggagaatcgcttgaacctgggaggtggaggtagcagtgagccaagattgcaccactgcacttcagcttgggtgacagagtgagactccatctcaaaaaaaaaaaaaaaaaaatttattcgaaatgaaagagcttacacatttataaatagaagagattttaaggtttacattgtatgttaattgtctgcatagaagaatctgagtttattaatatgagattgggattttcaagtaaagcatgttgttagaagtcaggataatgtttatcttcctggggtgttagtgaccggaagcaagtgtgagggcacttctggcttgctggtgctattctgttgggtaaccagtgcccaatttgtgacaagccctgtgctgcgtgcttagaatctgtacacttttctctgtgtttattgtaccttaacaaaaatgtttaaaaatatacacatattgtgaaaagaacaacttaaggcaaattaaacagagtttaattgagcatagaacaatttgtcaattgggcagctccctgagccagaataggtttacagcgactgtggcactgttgcgtgattggaaagggtttatggacagaaaaagaaagtgacggacagaaagtggaagtgaggtacagaaacagttggattggttacagctggacgtttgtcttatttgcacatggtttgaacagttggctgcctgtgagtagttgaagggtggctgcttgaattgggtgagacttggcaacacgtaagagaaacctttaggccaaacttaaaatatgtaaggaggcagctttaggctaatcttcagttaacactatatatcattaaaaatagaaaaaaaggcaaaatatgctcattaaaaaaattggaacatatagaggaatataaagcagtggaaacaaattttggaagctggaaaagtatacaagtaaaatagcaccatatagacaaaatcattattgtttacattttgccacatttcctttcacttcattttgggcattaaaaaataatgataagccaggcacggtggctcacacctgtaatcccagcactttgggaggctgaggcgggcggatcacctgaggtcaggagttcgagaccagcctggccaacacggtgaaaccctgtctctactaaaaatacaaaaattagccgggcgtggtggcgagcgcttgtaatccccgctacttgggaggctgaggcaggagaatctcttgaacccaggaggcagaggttgcagtgagccgaggttgcaccattgcactcaagcctgtgtgacatactgagactccgtctcaagaaaagaagtgatcatactgaataagcaattttatagattacgtttcccagttaatattttagcttcagcgtgtcctcatgttgttaggcactttgcaagtgtttatttttttacaggttaaaatctttttctgttacaggcaagcaccacagtgcgtgtaaccaactccaatgccaatgcggccagtcccctcatagttgctggctacaatgtgtctggctctgtccgaagtgatggggagcccatgaaaggcgtgaagtttcttctcttttcttctttagtaactaaagaggtaagcaaagaaaagaacaaaagagatggtgtgaagggtaggagggtgggggattatagaccagaacgtactgttttaaaaaatgcaggtctgagttgatttatcattttaacacttaagaatatcgtctgtctcaggccgggtgtggtagctcatgcctgtaatcccagcactttgggaggccaaggtgggtggatcacttgaggtcaggagttttagaccagcctggccaacattatgaaaccccatctctactaaaaatacaaaaacattagccgggcatgttggcacgtgcctgtagtcccagctgcgtgggaggctgaggcagtagaatcgcttgaacccaggaggtggaggttgcagtgagccaagatcacgccactgcactccagcctgggtgacagagtgagactctcaaaaaaaaaaaaaaaattcaagaatatcatgtgtctctgttgactcacaagacattgcacatctacactgggaggcagtggtatgtgatggaaagtacacaggctttgaaatcagacctgggtttaaacaaatctcagatttaaacaaattcctcttcctagctatgcgaccctgggccggtcacattaccttcctgagcttccgtttccttatttggagaatggtgacccatgataaggaaggacagtcatgtcatctttcccgggaagactgtgccagtttttaactttgcaacttgaatgtcaagatttttgttccttttatctgtattaatgtgtcttagatttcagaaatacatatattgacatgaaacttaaaaaaattttcctataatgtggctaattgatggtattcagaacatgtaaatggaaaaggaagtcttgtcttttttaccccctggcataggatgtcctgggctgcaatgtctcaccagtgcctgggttccagccccaagacgagagtctggtgtatttgtgctacacggtctccagagaagatggctcgttctctttctattccttgccaagtgggggctacactgtggtgagtgaagcagatttccgttctgtttatgtctgggactctcatgacacagtaaaagccaatgctgtttgggtgttaaaggaaaagatggttggcctgcagttctctgaacatgctgttaagcagtaacttacttaagatgagacactcaccccttcgtaatagctacaaaaagggcaaggcttcctcttttcaaatctgcaacagttatgatgaatgtttctcttggtctgtctgaaccccttgtcatttgtgggctgctagatcgattattaatattgctgattgatcatgttagtggttcttagtgattaagagactcttccttccagattccgttctatcgaggggagaggattacctttgatgtggcgccttccagacttgacttcacagtggagcatgacagcttgaaaatcgaggtaaggcttttctgtcttctggagggacaggtgtttgagttcccatccctaggcacaggtattgcaaacatgttttaaaaaaaaatcaattattttatctggaagggctgttggaaaaaatgccatctggtattatattcttacccatgatgtccttatcgtagagagctggattcctagttaaatctactcattcaatgaaatatatttattgattgccagtgacatgcatttcaggcaccattccaggactggggatatagcagtgaccaaaagaggcaaaaattcttgtccctgtggacctcattttttttttttttttttttttttaagacagggtctcactgtgtggctcaagctggagtgcagtggtacgatctcatctcactgcagccattgcctccagggttcaagtgatcctcccacctcagcctgttgagtagctgggaccacaggcacgtgccaccatgcccagctaatttttgtatttttgttagagatggggtttcaccatgttgcccaggctgttctctaactcctgggttcaagtgatctgcctgcctcggcttcccaaagtgttgggattacaggtgtgagccatcgcacctggctagacctcatgttctaatgacaggaagggtcaatacatgtatagatgtataagttagaaagtacagtagaaggtgataagtgttctctagaaaaataaaggaagaaaggaggtagtacagtatcagggtggagacaggggttgcagttgtacatagggtgtttttgggaagtcctccctgtgaaggtgacatttgagcaacaacctgaagggaaagaacaagagaaccatacttcactcctgcaggaagagtgtgtaagactgagggaacggcacgtgcaaaggtcctgaggcaggagtgtgctgaagagtttggggcatcccaaggaggccagggtggctggagtggagggaatgagcaaggaaggaggaggcggaaagagggtcagggaggtgacagggcagattgtgcagggcttggtgggccactttgcctataactctgggtgagaattggtgccactggaaggttcctagcagaggagtggcgtgatccttctggcagctgcattgaggagagtttgcagggtgtcagggtggaagtgggagaccagttgggatgccatggccgtaaaccaggtgagaactggcagagcttggaccgtgatggtaggaatgggcagtgtgatacatggcttgataaactgcctagaccctcacataaatggtaaatgtatttttcatctcacttacgtctcctttaattacagaagtagaaaatggttactgtagaaaattggctagctagaacaaatcccaaaagaaaataacagcctctcctaagtggaccacccaatgttagagttatcgaagcaattatattttaatcattttcttttaataattacatttgaaagtactgtgttaaaatcgcttaaactggcagaagcggacttttaggtcatatgcacagtggggtgcagactctgcattttaagattcagtggagtgtttgaccgttctgctgtacactggaggggaaagagaagggtaagaagatgaagcctttactttgcttctcgtagcttgcagagaaggatgggggcaggtgagcagagacagctattcccagattacagccaaatacatattttgaaaatgatgaatggaatttcagggaatggggccctgtaagttccctgaggtcaggtactgtgtcttattctttactgttttcctaacatgtgatttagtgcctggcacatagtaggtgcccagcaaaaatatttgttgcgtacatatgtgaattaataagtaggtaatgcatggaatgaaacatgtctttttggaaagatcaagaaggactacctgtcatgtgagaccatcactaagaaaccatttgctgaaaaaaaaaataaaaaaataaaaaagaagggctccctgcataaaaaggaagtcatttaattatttaaagcttcatctcaaatgctgttgcacacgtgcgtgcacacattcattcattcaggagtcagttattgagtgcctgctgtgtaccaggtgactaagacagaaaaagtccctgtctccatgaggtaacatgctagtgggagggagacaactaagaaatcgaacgaggacatttcagatactggtaagtttgatgaagatattaaaataggttagcagtggtgaccttggggatacacagatcagggctggaactcagtaactgcagagaaagcacagctgtgctgctcacaggcgagtggggcacagacacagacacagacacatggagcacgggaccacgtgtgagccagtgatggtggtggaggagggtggtctaggtggatttctttttttttctttgagacagagtcttgctgcttcacacaggctggcactatcttggctcactgcaacctctgcatcccgagttgaagtgattctcctgcctcagcctcccgagtagctgggattacaggcgcccgccaccacacctggctaatttttgtatttttagtggagacagggcttcaccatgttggccaggctggtcttggactgctgacctcaagtgatctgcctgcctcggcctcccaaagtgctgggattacaggcgtgaaccactgcgcctggcctaggtggatttcataaggacctgtgttcaggtcgtggtggaaagacaggaggggacacgtgagaccttgcagaggtggaatccacaggactgatcgatgctggaggagcggggcgggtcatccaaagtgatgccggggtgtgcatgggagactggaggaagacgtggttcaccaaaatgggggcatctggaggggaggagatggcacaggggtaagggtggggggcttctagaagcttgagtcagtgaccttttaacgagggaagtaagtctctagacttttcttttctgttgtttgacactcagcagtgtgttgggaacacaacagagaagacagatgtgggtaaagtgagagggagcccggctggcacacaggaccggggcactgagtgttgggaggtgggcggcaggagcagacatggtaggtggtggccggcgcagcagaaggaggctttgtggctctggcacaggagcaccttcgagcaccttcttgttctttgttttctagcccgtgttccacgtcatgggattctccgtcaccgggagggtcttgaacggacccgaaggagatggtgttccagaagcagtagtcaccctgaataaccaaatcaaaggtgggctgacacagcagccccaggctgatggccagcgctctttttggatcacagagagaaatggagaggaactgatgactatatgagaacatggcagcttttggtccaagtattctggtgtacatgtaaggatacactgttgtttttggcttatcttctgtttgtgtgtttttgttttacagttaaaacaaaagctgatggctcattccgccttgagaacataaccacagggacatacaccatccatgctcagaaagagcacctctactttgaaacggtcaccatcaaaattgcaccaaacacacctcagctggctgacattgttgcaacagggtaagcttatcgtgtggatttggaagcaccagtaaatatgctggcagccagtgtagaaccaaatgacctgtgatctgtgtgtctttgccgagcttaagaacttaagaaagattagtactttttttttttttttgagagacagagtcttgccctgttgcccaggctgtagtgcagtggtgccatctcgactcactgcaacctctgcctcccaggttcaagtgattctcctgcctcagcttcccaagtagctgggactacaggcgtgccccaccacacccagctaatttttgtattttttagtagagacagggtttcactatatgttgtccaggctagtctcaaaactcctaacctcaggctgtctgcctgctttggcctcccaaagtgctgggattataggtgtgagacactgcacccggccaagaaagattagttctaaatcttacaaactgaaggtactgacatgtcggatgcttaatgaaaagtcccttgcttcaaattaaaatgggcttgtgaaattaaaaaatctttcatgtctgactttcacgatctttcacaggacccctctttgcttaatctttgaggatttttggaagatggtattgttggttgagaaagcttattggaagatgcttcaggtcattggtgtagttcttcctgcttgtagttactcattatactataagtacaggcagggacatcttgtggttgaattcatgtggttttaccatcatctgaagcaagattgtgtagtgccaagaacttgggctttggagtcagatcccagatccacctgtatgtaacctgcagaacagctttagacataacaggtgctcacaaaacagtagcttagaaggagactgcagggtctgcttgggagaagcgcggcatgagcaaagtcaggcagtctcacagcagcatgaggtggctgcgggtgtaaagctgggtgctactggagcagaatatactggcaggtgaaggtgatgatgaggccaaccccatagcacctcctcacaccccaccagggcgtaggggctttctcccactggggccaacgggccatgagtggttttgagcattaatataacaagctttgatcattgttttcaatagggcattctgaaaacaatggcatggagtagagtggctttgaaggggacaggacttgggcacaggaggtctgaaagcagagacgacaagggcttgccttgtagggaagtcagggacagactggtgagatatttagggtgcccagcttgagaggtgtgatggctggggacagaaagagaagccagttaggtgatgaggtttcagatttggccacattggtctgtaggaccactaggtggagctcttcaataggtacttggatggatggtaaatcctgaagatttggccgcaggtggcagccaggacctcaaatatgtatgtgcaagtagaattagaagaacagtaggccaaaaacagagtgccaggtggcccagggggggacctagggagcctgaggtcataggagctaagaaagtaagtttggggtaggaggtagggcccaacaggtaggtgcagggagctgggccctggtgaacacagtcccctggcttgatcactgaggaggccacagtgactcttttctgtagacagatggaggtcaaggtcaaggagtccagtggtgaatggaagacagggaagcaaattaccctcagaaagtaattcttggatttaagtctttcccaccttccataaacactttgtgcaattactctagatgaggcactgaaaaatgcttcgtacctaataattaatcaaactagtgttccagagatggggctttcaccctaccagggagacagactgaagacaaatacatctgtggccaggcttaatgcctcacacctgtaatccatcccagcactttgggaggcagaggtgggcggatcgcttgagcccaggagtttgagaccagcctgggcaacttggcaaaacaccatctctaccaaaaatgcaaaaattagctagtttcataacctggtctaaaaataaataaagagataaaaattaaaaaataacaagatttttaaaaaagacaaaaaagacaaatacatttatgctgctaaattatggcaagtgttgtgcagggaagagatcagggtgctgcaagaagagctaatttagagtgggagctctgcaaggctctctgggttgcagagaccttagtaaagactaaaagttagctaaagaaagatcttccctagtagagaagcagcatgctcagaggcctgcataggataggaaggacctgaaaggcagtctgcgcagctggaggaggtgggtgaggtcagggagctctggggccttgtagccttgctttgggattgggctttgctccctaatgcagtggaaacccgttaggagttgtctgttggttggccgggcacggtggctcacgcctatgatctcagcactttgggaggctgaggtgggcggatcatgaggtcaggagttcaagcgcagcctggccagcatggtgaaacccggtctgtactaaagatacaaaaggttggcggggcatggtgatgcgcgcctataatcccagcaactcaggaggctgaggcaggagaatcgcttgaacccgagaggcaggggttgcagtgagctgagattgtaccattgcactccagcctgggcgacagggtgagattccgtctcaaaaaaaaaaaaaagagttatcagttggcaagggagtgatagggatcatggtactttaaaaagtttgtttttcttcctggctgctgtgtggagaatggattggaggaaagccatggtgtgaatggaggggccagatatgaggcagtcgtggttgtctggaggagatatggtagtggctgggcccaggcggctggcaggcgagggagcgaggagtagatggatttggtaggtcacatggagaacacacccacaggcctgtgctgttgaggttacaggtttcttatttgagccactgggtagatggaggcggtgctgttcacggagatggaggaaatatatttattttctcctttaaagtagagtatttgggtcaaagaaagaaaaatagcatttgttgaacatttttggaaaaatctcttttttttaattggccgatgtagtacacttgcctttttagcacactgatacttcttactatttcttttcctttttattttttgttgagccagggtcttactccgttgcccaggctggagtacggtggcgccatctcggctcactgcagcctccgcctctcgggttcaagtgattctcctgccccagcctcctgagtagctgggattacaggctaatttttatattttttagtagagatgtggttttgccgtgttggctaggctggtctcgaactcctgacctcaagtgacccacccgcctcggcttcccaaagtgctgggattacaggctgagccatggtgcctagtcttcctttaaagtaaaataaaaaaattactcaatttattgtaaaaacaaactctttggcttctgtccaaatgactgtgaaaatagatttctctcaatatccaccaatattacctgtttctgtccatatatgtatttaaaccctgttgaaagaatttattgatacaaatcaatttttaagggcttcagtataacggaacctttttctaccacccttttggtttatttttccaaactaagccagtatagatttgaggtttagggaaaataggcacttctttttaataagaatgtgggctaaaacagatcttatggttcaaatatttacaacttaaggaggcaaagagatttgataggaaatagacaaggtgatgtgtcctctgacaggtacacaaatcaagagaatatgacaggtccttgggaatgattgtgtcagtgttcgcttcccatccttttattctgaaagttcacagtaggggaatgtgagaaccaaaatgcatatgctaggtcagggactgggacactttctctgtggagagccagagaataactattttaggctgcgtgagccatacggtctctaggacaacagctgagatagacatttgtaaatgaatgggcagagcgcaacacaactacatttttggacaccacagtttgcatttcatgtaatttttacatgtgaaatattatctttcttttgatttttttttttaactttaaccacttaagagtgtaaaattctttttctcggcttgcagttcatacacaaacgggaggggggtccttgggtggtagtttgctgacccatgctggagatagtgagctcatatggctgggcagtcccttcactctgaagaaatggctgtgtttttcataattcctagatttcacatacacaatcttccaccatttccttgtgttttccactgtttttttatttgaggcggagtggtggttccaacatttaatgtacccctaattgtcagaatccaacattcttgattatctttatgtcagaagtaactaatttttatctaaaatgattcttgaagattctttaaaatgaacagttgaaaagacaactgtgacccccagctaggatgtactattacactttaatacaccagctgcttcagaaatgaagaccagcactccaaggatgatggtcgttgtaggggggcctctcgtgtgttattcgagggatgccttgcaacaccttactccttatttagaatctcaaatctgaatcattaccttaatagggcttttcagttataagttacattgtggctcctacctcccaaggagttcaattttagctttgcattttttaacttaattaccttttctgttccaatctcccagtttgctttcatccatgtattatatataatcacaagcaaggaagacgtctttgataatcctgacttatttgatggcctggtaatgccacagtttcttaggcagcttagagctcttgcttttaagggctagcccacattctcagtccaaggccgctctgctgtcaacgatccaattacctgaaacgtttttattatctgcagattttcttaaaattgcctctgcagtgggggattgccagatgtcacccggaacacacaaacagccccactacgggcccctgttctgtagaaagatgcccagtcttgcttctgaaggttgctttttaaaaccagaatgaaggttgctttttaaaaccagaatcatctggattgcattctgtctcttcattaagattagactattctcaggaacaagggctgggagagggctgcatcttttttggtcgataagagcctttcctgttataattgagtcctcgtgctggaatgaatggtcttctctttgcaggttcagtgtctgtggtcagatatcaatcattcgcttccccgacaccgtcaagcagatgaataaatacaaagttgtcctgtcatctcaagacaaggacaagtctttggtcaccgtggagacagatgctcatggatcattttgttttaaagcaaacccagggacttacaaagtgcaggtgcgatgcattgttttaaatttaaaatgttttgagaaaaagcagtgatttttagaagggttattaggtcgaatggggttagagaaggagcattccagtttccaacttcttgtttttaagtctttacaatcctgcaccagtagaggagagtcagataggcatccagctaaaaaataatgccatctgcctctcttttttccagtcttgatggttattagtatcaggctgccagtcactcctctaccttcaggcttctggctgctgtagaatgtcgatgagtccaagaggacaccaaaaatgaactctactaatggccgctcaaaaatggccatagtgcgtggcttctgggaccccaggccaaaatggagcttcccatttcctgctttgccttgacttcaagatggctaggcagggaccacgcgacttatccattcaagcaggccgagaacggggagacggtctggcctgtggtctcatcaccatggtgaaggcccaagccacagctggcccaagcaagcaagagacaggacagagcagaggtcagcccaccatgcctttcagtgcagtggccctgcccttggggagagactgtttccgtgggctgtcacccatcaaatcagcagctgcccttcctccctgtggaagagcaaataacacaaagggagagggccgagaaggttccctgttagactctgctgtcctctagggcaaagtggggtccctccctctgtgggaaacagggtaggagattgcgttctccctgcttccacagaacagcgtggtgtgtgggttgacagctgactttattagatggtagctggcttcttgcgaagatgtccacattgacaagtctttggaagccctttcggaagcatgatggacttctccaaggaagggcagtgtcgtctttactagggatgaaagagttgaccgctgctaccttcacctgttcctcttcttagcccatgaaaggcacgcagaacaataggaggaagaaaatgacttaattccaccaaagtgtcatccacatagtgttgacaggttcagagcttatgctacaagtgatccgaagccgggaaaagtgactgggatgtagtatggtttctagtatgtaagtgaggcgtgtccgcgtcgcgggcctgtggggaattaggccagatagacttttgttcatacacatcggtctgttgaggctaatttttcatctgggtagaaccgtgcttacttcacacaagttattcgtggatttgttgtgattgtaaaatcagcctggaaacgaacctttggccttcaaaatctctttagccttggtcccagatgaatgttctagcgccctgtaggtcagggggaagatctccccgaatgcagcctctaacgttccatccacgtttccgcaggtgatggttcctgaggcagaaaccagagcagggctgacgttgaaaccccagacatttcctcttactgtgaccgacaggcctgtgatggatgtggcctttgtacagttcttggcatcagtttctgggaaagtctcttgtttgggtaagatatcactggaaagtaagaacacatagtttcaaagaagtcagccggtaggagtgggatttgggaaactttttgttttgcctttgttgtttgctactgatcacctgcgtgcgagggaggcttcttggagtcaggtgggtacatcttaacttgaaagaagcgctccgtctgcctccggccactgcctcttaggagctcagcagtagcaagaagctattacatagggttaggattcgaacctgtgctgaagccttataaggggtcacatggagccctcccttcttttccctgcagacacctgtggtgacttgctggtgactctacagtccctgagccgccagggtgagaagcggagcctccagctctccggcaaggtcaacgccatgactttcacctttgacaacgtgctccctggaaaatacaaaagtaagaattggaatgcaacatcctgtggccctcacacacttcttgtctttgtaaactttctaaaactcaggtctcaaattgtatcacgaccatgtacctttccttgttttaagtcgtctttgcctcgtgaccttgactgcattatttagcgttggacaagcatggaggagtccaggccctgagctgaccaccaccttgtctgcacagcccactggcggcttctgttaagggagggtgccccgacgtatggcattttatttctaaagcccagagaaaggagtgtgaaatagttccactgatgtgttctactaacttagcagtactggtgctgagtactggccatggcaaggtacttgacctccctgaaactcagttttcccatctgtaaaatagacataatagaacctttctgcagaatataagactaaaagaagtaaagtttataaagcccgttgtgcagagagccagctaagtagctggtgcccacaaatgttacttcccttttccttgcccttcttaagaagccacttcttgcctgtatttctgctttttcagaaatcagcttggggctgctggcagtggatagctcataaaacagactgctttttctggaattatattaatattttctgttatggcagggcttggcagactacaaaaactgccttttataagcgtagtttccttagaatacagccttgcccatttgtttatggattctctatggctgctcgtgtgtaacagtggccaagtcgagtggttgaggctgacaaagcatgtggcctgcaaaactgaaaagagttacagaaaaagtttgtggatccctgaataccttacttgcagcctgatcttacaggccccattagatttctttcttgatgtaatggaaattggttccagtttttctttctttttttttgaaatttagcctcgctctgtcacccaggccagagtgtggtggcgcgaccttggctcactgcaacctctccgccttctgggtgcaggagattctcttgcctcagcttcccgagtagctgggattacaggcatgcaccaccatgcctggataacttttgtatttttagtagagatggggttttgctatgttggtcagactggtcttgaactcctggcttcaagccatccaactgccgtcagcctcccagagtgctgggattataggcatgagccaccacgctcgactccaggttttctttagcagtaatttattccaaatactgctagttataaatatatgtatgtgtatatttctatctttatgtctacatacacacctgctttttaaaattagttaattcatgatcattgtttctggtggcgtgcagggaggtggtgtgctccacgcccatgtatccgtttttggtgtttgcttttgcagtaagcatcatgcatgaggattggtgctggaagaacaagagcctggaggtggaagtgctggaggatgacgtgtctgcagttgagttcaggcagacgggctacatgctgagatgttccctgtctcacgccatcactctggtatgtacggcttatggagtctcttatttggaaaagcgcttgccttgtggatgtcaagaaagactaacatcccaggaatattgtaaacgtaggcaagtcagatttccttttctgcctctgcactcacccacctgttacgcaacgcataatcaggaagcatttatactctctcagtggaaggacccctgtatttaggaggtttccttgtcctggccctacactaaatctgactggtgattcggggtgacctttggtacagtgtagagcacactggctttatattattagtaataatagctttgggtaaattcatttactgcttctcagcctcagttttcaccgaaaattgagatcttaatacctacttctcagggttatggcagggcttaagtgaaccctcttaggtatcaaagtgtccttggtgtacaccgctctgtactgccaagtgagtttctctgatatatatatatatatatatatatatatatatatatatatatatatttttttttttttttttttttttttttttttgagatggagtcttgctctgttgcccaggctggagtgcagtggtgcaatctcggctcactgaaacctccgcctcccgagttcaagcgattctcctgcttcagccccccgagtagctgggactagaggtgcgtgccgccatgcccagctaatttttttcttttttttttgtatttttgttagagacagagttccaccatgttggccagactggtcttaaaactcctgacctcaggggatccacccgcgttggcctcgcagagtgctaggattacaggcgtgagccattgtgccccaccttctctggtgtatttgttccagtgcaggggaagaagctgtaaacaggatcttagcttcttgttgactgtggtctctgtggcctgaaaggcagtgtgaaatgggtttcaggagcacctctgtagatcccttcgtgaattttctataatgttttgatgtcgagcggcggcagatgtcatcgtcaggtcttagtttctctgtagagaaactagaagaattggaactggtgtttcatgtgccaacttactcccctaactgcttaattacaaaaactcgacaggtcgatttgttataggagatcgattaatatccggttcataataagtgatagatatttaggaaacctttcccttccagcagtggagtggatttccagctctcttgtaataagatccttttttttttttttttttgacacttccttaaccccttctttatctcctcccactgtcccctcactcgccgggccccagccacagtggtcctctgcagtcccacaccaagctcactccctcctcggggcctttgcacatactctcccctctgcctggagtgctgtgacttctccagaaacacgtgttgttggtttttcctcctcattcaggtgcagccctattgttcaggagagatgtgccctgggaccagcgagctaaagacccctcggtggggattgttcttctcttgctttcctgtttattttcacagcttcgttactgaccagttgagatcactaatttatttgttgttgcgttgattttgtcttcctgtattagaacataagccctgtgagagcaggagccatggtcatgactcccaaggcccagccttgtgtctgtcacatagcaggtgctcaataaatattagttgattgaatgaaaaatagcacacttttgttggaagttttgggaggtttttaattttactgtggcacccaactgctccaatgattaatgggcaaaacagatgactggtttggaaagagaaatattattaatcatcttggtgtctccatctctcttagtaagtcattgtattggctttgctcccttaggaattttatcaggatggaaatgggcgtgagaatgtggggatttataacctctccaaaggagtcaaccgattctgcctgtccaagcctggtaagtttggaaggattgatgtgccatgaattagaaaaatggaaaggcaccagaggatggttttgaaggcatttttttctaccttggttctgtttgcatcaagctttcaatttctgtgtgttcaacctgctcttgtttttctgtctgtcttgggtttgagttgggtagacaccactgggccctttcacctccaaaaatataccattggccaatggcctctctttatagtgctgttttaaaatttgaatcatttcccactttgcttaaaatctttcagtggcttctcactctttctcattttttttttctctttctttttttgagatggagtcttgctctgtcacccaggctggagtgtagtggctcgatcttggctcactgcagcctccgcctcctgggttcaggcgattcccctgcctcagcctctcgagtagctgggattacaggtgcccaccaccacatccggctaatttttgtatttttagtagggatgggtttcaccacattgtccaggctggtctcaaactcctgacctaaagtgatccgcccgcctcagcctcccaaagtgctgggattacaggtgtgagctgctgcacccaaccctctctctcttttataatggctttttttggaggcagaatttgcatatcataaaactcacctatttaagatgtacaataaaatgatttgtagtaaatttatcaagttgcacaaccatggccagaatccagttttagatttgttcatcacccacaatgtaagatcctctgtgcccgttgacagttaatccctgtttctagccatggccagccactgatctattttctgtccccatggattggctttttttggacgtttatcatacgatgctggtattttgtttggcttcttttatttaacatgtttttgaagtttatctgtgtcatggcacatatcagtagtttgttctgttacattgctgtgtagtattctggtgtgtggttatatcatattttgtgtatccatttatcagttggtggatatttgagtggtttccagtttgacgctgttatgactaatgttacggacattcttatacaagtctttgtgtccgtatgttttcgtttttcttgtttcgatacctaggaatggaattgctgcattgtgtgataagtttatgtttaaccttttaagaaactgtcaaattgttttccacagaggctgtgtcatttgatattcccaccagcaatgcacgagggttccggtttcttcacctccttcgccaacatttgttattgtctgttttattatagtcatcttggtagatgtgaagtcgtgtctcattgtggttttgttttgcattttcctaatgaataattcagtggctcctccgtttggttcccaagataaaatacaaactccttaacctgatcttagctcctgtgtaacccagccctgtctgccactgtctctactccagccactctgtccttctgggtgtcagttcagctgcctttggctacatgtaacaaaatccatacagcagtgccattggcaagtggtagtttatttggctcaataaagaagtgtggcagtgcgtggctgccagcatgggttcagcagctggtagatgttaggggtggtgtctttgtgattctttaggcctttcccttctattttttgccttgtattttcaagatggctgtggttagaaaacttatgtttaaaggaggaagtcaaggagagggcaggcaaacatttccttgcgccccctcctccagtaagctacttgtctgtattattggccagaaccgtgccacatggttacttctagctgcaagggaggctgggacagttggatgtgctacccgaggctgagcacgttgccaccctcaacataaccagggtttgttctcaaggcaggaaggatgcctgttgaggaaacaatgagccagcctgtgaggcagatgctgttctctgtggacatctcctcctgcccctcctagctggggccttcttacccatcagttcagtattgcttcctggggaaggatggcctccagggccacttaggcctgcctcctacactcttgctctcagcactcacttctatccccttcttgcatgtgccacaattgatatgtttgtggctgtcaaatgctccccctctctgtggatggtaaactccatgaagacagggaccactgctctgtcattccccactgtgtaccagtacctagcataatacctggccaggaagagatgctctgtcgatatttgttgaatgaaagaccaaacaaaacaaacagagaaacctgatttttttttttttttttttttgatggtaactactctggggcttgttgagtgcaatgaaaacagcagggtggttttagctaatttcaggtttttgtaggaagtgtggccaaaatactggttaatgatgatttgggggaaatacattgttattccttgtatcttcctgaaattgactgtgttcctctggcaagtgatgaaatgtacccctactcggagtgtcctcccacacagactcacacttttctggggcttcccttactccttacctcctttttaggaatatttataggaagaaattgaggctgtggttatctcttggatccttaatagaatcttttaagtaggaaattatcctcagtccaatttgcagtagaaacgtactttctgttccttctcgtgcatgggtccgttcacctggtctgtgcagatttaactactgggagttgttaccttatggaaaatgaaaatcatgcgcctgtgatcgggccattgcatggatcgggtcattggtaagacgccttcataggcagtgaaaacgatgcctgcccagtatttctgatcccattattgcagatctgcgatacatttgagttttcacatgcaaagagctgccactcgatttcagatgtcggaattgctcagtgtaatagatgccattctctgaaaattacttttgatttcctgtctgtaggtgtgtacaaagtgacccctcgctcctgccaccggtttgagcaagcgttctacacctatgacacgtaagcctgggaattgaatgctttgtggtgtttgtatacattccgtggaggattcttcatttacttcagagaacaaaaggagtttttctgttttttttctgaaagaggcaaggttaggccttcaacagcatttctagataaggattttaagacacttggattagttactgaggaaccggagacaggatccctttcccaagaattctgtaaccccaggatagagggctgtgtttttgaagtgccttaaatagaagctttgtcaaatctcccagccctcaccgatgggcatctgtcaagttcaagtctgccatttttgtatttttacagatgtgtgtgggtttcactgggaattggaagcataaagttgtggagtggagaattagtttactctttaaaatacttctctggatctccagagttattttaccccagactaaaagcaattttctgtagtatatttagggtgaagaaggatgcccaaaaagggtattgctgatgatcttctgagaatgagtaggttctagcgtttcctctgctttgatttgtaggtcttcacctagtatcttgacattgacagccattcgccaccatgtccttggaactatcaccaccgacaaaatgatggatgtcactgtgactatcaagtaagatgagcgttctgcagtgggccgagagtggcgggagagggtgtggatgaggcctggggagtctctaataggctctctggaaattagttttgatttcttatctctagatgtatatacaaatggccttccctctcttataggacattgccgtcaattcccagcagccttgatcctttccttttctgattcagaaattacctgtgggtgaggaagagcgttgcgacagcttgtttcagtgtcttcaatttctgtttgaactctttgtacttctcatctttgctaaggaaaaaaaaaatctctggggtttgtgcattgtatttcaagtgttttagcaaattcaaattgcctatttttctttagacttttgcttgaaggcttgggaaatagagatggcacctggtataagagaagggtcgtgagagaggaagtatttgaaaggcaagtccctcaccgaaggtcacgttcatgtgaatgtcacctttcagggaatttttgcagtgtggtgaggtacctgtgacgccccaattttcttgagaaatgaaagagttttggcaacatgaccgtctctgtcaagtagaatgggcatcgcagtccctgtctccctcctgcccctggttgaagtcacctttccagctatgtttccatctttctgtccaccatctgtttatccatccgtcatccctgcagagtacatgatgactgaaaaactgagagtcttcagtgtttaggcactgggcttatgaggccacagcccctacacttatgggattgacagtctcatggggggaacagtggtcagatactcacatgcagaaccgtaaaatgacaactgttctgagtgctttgagcttgaccttgggggcatgcaggacaggtaggctgcggggggccaggccatgttaaggtccatagtctttgtcccatgatgcaattgacatgttttacatagaggaatgacatttttcttcctgaaggtccccctattggccgagtggagaacagacagaagaggcctgagagtgggaggtggtggaggcagggggaggcaatgggggccccagactagtggctgcggagatggagagcgacggactggtcggagagtcgttgagggactgagttgatgagacatggcactaaagtgaccactgggttagggcgggagaaatgtcagggctggccctggtttctggtgatggggagccaggtttttagctgggggtggatttgccgaaggtctgttgctgtcttttactatcatttactgtctccctgcttggaaagtatgaattactgataggactagcaatctaccttcttaccagtagtaactgcatattacctcctttcagcttgattacattcatttttgtaacttcacaagggtgtttgtgttgcttgcttgtgccggaggttgtatggaatgcatcttccagctagacagagccactcggattccccctgggaatcgtgtactcagcagacccaaaacccgactgctgacagttgccctccatgagcccctctgtggtcttttctgattcagatatggcagctcccgctttctccttgtttcttgattcttatttcccttgaaccctaggcccagccaattccccaacaaagccttggctttacaatcaaaatacacccgtcatctagtccctttttaccacttggccctcagccttggtctgacccccctctggggtcactgcagcagcttcccagctggccttcccttcttaccacgtggccctcagccctggtctgaccccctccgggatcactgcagcagcttcccagctgggctttgcttcttaccacgtggccctcagccctagtctgaccccctctgggatcattgcagcagcttcccagctggccttcccttctcaccacgtggccctcagccctggtctgacccccctctgggatcactgcagcagcttctcagctggccttcctgtttccgccattgctttgtgtattttccatgaaggagcaaacgatttcttttatcataccattcctcgactgaaaactccagtggctccaggtcggcaccaagcctgtgaagcctcagtctgacatctgctgccccttggacctctctgttggatatgactcttccgtgggcccctgtgccccaggctggactggtgttgccattgcttgaacatctgagtgagctttctctccaaggactttgcacttggcatcgctttgcccaagctactgtttacccagagagctgcgtggcgcattctctcccttccttcagacctttgctcaatgtcaccttatcagaaaggccttgactgtccctttaatgtaaaacagtgctccgggctctccgtcttcccacactgctttatttttctttattgcacttttcctctggtattatttttctctttattttcagccccttcccactgaaacgtggattccacaggggtaggaagtgtggtctgttttgttgatgctgtatccttggtgcctagttctctatcagagcagttctcagcgaaggtagaatggagaacagaggatggtggtgtggagaaaactccgtgtcctacatggaagctacaagcttatatccagtcgccataaaatcaaccgtatttcattccagcccagatctaccagatactgccaccatcactgcgaagctcagttgttattttttgtgaaactactagtttatttaaaacagaagactccgccactgtggtgtcatgataagatgtccagtttgtaactcgcaagtccatactcgtagaaaggtcaaattcccactgaccacaaggatacgcaaccacgtcctaggggccgccatttctttcttctaggtcttccatcgacagtgaacccgccttggtcttaggccctctgaagtctgtgcaggagctgcggagggagcagcagctggctgagatcgaggcccgcaggcaggagagggagaaaaacggcaaagaggaaggcgaagaaagaatgaccaagcctcccgtgcaggagatggtagatgagttacaaggccccttctcgtatgatttctcttactgggcgcggtaagctctcttgtgcgtttccctacagtgtcctctgttttgtggggacaggacccgccaaactgaagtatattaattattttaggtctggagagaaaatcactgttacaccgtcatctaaagagctgctcttttatcccccttcaatggaagccgttgtcagtggaggtaaatgtcaactcagcgagtgaatgtcacacacacctttgcagttgttcccttgcctgcatttacaagtagatttgtgatgttatagtgaagccatctttgtaagccaccttacatcctctctggcacacagatgttactgttggttggatggatggatggatggatggatggatggttgggttgggtggatggatggatggatggatggatggatggatggatgaatgatttagataaataaaagtaacttttgctgttagaattgagttgatctttttggaaaaggacttggttttctttgacattatcaggtcgacaccagaaggtagatgaagcacaaagctgccagtgatgatctttaatgatctttctgttgtttggcagagcatgatgggagggtctttttttggggaatggatgactgaagtgatcacttgtggagtatttgtcttttgccacttattatttttttcccagcactctggcttcgttaagttgtgggtgttatgtggttcgtgtttggaagcagagggtgttgaagagcgtgacttctagcaggcaggctgtttggggcagtctttctcagtgggtcctccagaggctgagcagcacggcctcctgtctgctgtaaagtgttccctcctgatctgtggcctcctgagaacctaggaagagtagtagtaaaaacccagccttcagcgttttttgattctcttgctaaagtccttcacactgagaaaggcctttcagggatggaaagaggcttgggctgtatccgattattgagctccccggggtgttaaataaccgcatttggaactagcttctaagatctgttttagccacttttgtcatgggaaacccccaaccaagaagctcctgtctctgctaccaagccccatccttgtgtttatttcttcccctcttagaaagctgcccagggaagctgatcgagatccacgggaaggcaggcctgtttttagaaggccagatccaccccgagttggaaggagtcgagattgtcatcagtgaaaagggggcaagttcaccgctgatcacagtctttactgatgacaaaggtgcctacaggtgagcccgggatagagacacatttgcctgggatcagcgtgggagtcctctgaagaaactggggcccacatttccttgggcttggtaaggcttcctgcagggtgtgaacaaagccgttgctagcattctgctctctcctcttcagtgttggccccctgcacagtgacctggagtacacggtgacctcacagaaggagggctatgttctgactgcggtggaaggaaccatcggagacttcaaggcctatgccctggcaggcgtaagctttgaggtaactaacactgtattttcaaaaggcagttatactgaggtataattaacatataataaactgcacaaaaagggtacagtgtggtagtcttgacctaggaatacacccatgaaaacacctccacaattaaaatagcacatctgtggccctcaaggtttcctcctgccccttggtaatccctccctgccacccttccgctgagctgatgatctgcttttcatcaccattggttagtttgcattttcgagtttttataggttggtgcaaaagtgattgtggtttttgccattgagaataatggcagaaaccgcaatcacttttgcaccaacctgtatataaatggaatcaaacgggatatactgttgttttttttttttttttggtctgacttctttcacgtagcataatttggagagctgttgactttagcatgtttgtgtaccttctgggaagtagttaaagctgtcatccataactgttccattttgaaggacacagaatgttcttactgaggcgtttgctgcctagctcccttccaccggtcctttctgggaagaagcgtgctgcgattgtacagagtgggtctggagattgttgagaatgaatatttataaactataggccaaaggaaaagagtgacagattacatcgcataaaaatttaaaattctatattgctgaatacatttggaaccaaactgaaagatattcaaactcggaagaaatgtttgtatcataaataatatccccattttacaaggagctcctaaaattggtaagaaaaagacaacccgctagaaaaaaaatgaacaaagattatgaaaaggaaattcatgcaagtaacacagtgactaataaacacagaaacacaaagcctctgtagttactgaggaaatgtgctaaggaagttacagtcgaaacactgttttgcagggattagatttgctgtaattaagacaatctttattttttggtaagtgtgggttttcccaagcataaataatttatgggactgtaagtggttacagccactttggaatgcaattagatagtatctttctgaatttaaagtgcatgtatccaacaattctacttctaggaatggattgttcaggaaataaaaataaaactaagtgcctagagatacatatttggggatattccaattgtctcttgtgtaccacaagagtaggtgctgtggtttgtcaaaccctgccttagaatgctatgcagtagttaagaaacaggcagatttctattggctggcagaagagaaccaggataaattgttgaggaagagagcaagttgcagaactgtacatataacatgccatttttatttcacctcctccacccactcaatgaacttgccagtctgtgaacaataatatgtaatgtttataaaatttgtgtgggcatagaaagagttctgggtggggcacggtggctcatgcctctaatcccagcactttgggaggcccaggcatgtggattgcttgagcccagtagtttgagatcagcctgggcaacgtggcaagacccgtctctataaaaaatacagaaatgtagttgggcatggtggtgtgcgcctatagtcccatctcctcaggaggttaaagctgaaggattgcttgagcttgggaggcgaaggttgtagtgagcccaggttgtgccactgcactccagcctgggtgacagagcaagaccctgtctcaaaaaaaaaaaaaaaaaaaaaaagttctagaaggctacacaccaaacttacaaaacttacaacagtagttacctgtggggaggaagattaggtcccctgtcctcctttgagtaacaataaaagaaaaaaaccttgaaaaaatgacctcttgacttgtggaactgttattttcatagttagtaggagtttaaccttgctctggtctcaccttctcatccccagataaaagctgaggatgaccagcccctcccgggagtcctcttatccctgagcggtggcctgtttcgttccaacctcttgacccaggacaacggaattctgacattctcaaacctggtgacgtgttctgcaatttaccacctgcctgtcttccctgagagagagccaggatgcagcatgcgagacttacgtgttgcttgacaacgtgagaagagaaggccaatgtggagtggtttcagtttcttgggggcccacggtcattagagtattgctcttactcgaacttaatgctgctgattcatgttcccttccacacgcacttcttgttttctgatcacccgcttgtcactaagacagtgtaattaatttccctggccacaacggctgctctcttaggcgtcttcttgttttgccacggaatcatgcttatgatgctgagtcttgtttggtggttagcttgcgtttcttctgaaaagacattccacttggtgggaagagagcagcagtttttctttcaagatgcagtcggaggccctgactggtggggattcaggaagtgtgtgttagttggtcatcttgtcagtcatggtgacaaagtggctgtggtggggctactggagaccgggcagcaggggcatctgaagacaccactttgcagtgatgcagactgctccttacttgctgtgtcctatcaggcaagttactttgcctctctgagcctcagtttctttattcattaaattcaaatatgagccaggtatggtggcccacgcctgtaatcccaccgctttgggagggtgaggcagtaggatcgcttgagcttgggagtttgagaccagcaacataggaagaccccatctctacaaaaaataaaaaaattagctgggcatggtggtgcatgcctgtggtcccaggtactcaggaggccgaggtgggagatttgcttgagcccagaaggttgagactacggtgtgctgtgatcgtgcactccatcctgggggacagagtcaggccctgtctcagaaaaaaaaaaaaaaaagaaaagaaaaattaaatatgacttctacctctctgagtcattgcaggcaggtgataccatcagctgccgttgttagagttgtgattgccattacctgactgtgagtggtgattatagagagagggttactatttctggctgccagggaagccatggcgctcccctggtgtaattctggtccatcgtgacattcgcccctcacttttaagccatgcctagatgtggctgctgaggctcagtgtgattatcttggcagagccctggccagtattacttcaaacccatgatgaaggagttccggtttgagccatcctcacagatgatcgaggtgcaggaaggccagaacctgaagatcaccatcacggggtaccgaaccgcttacaggtaagtgccctggccaccccactctcttccagggctgggctggtgaatcacattcaggcctctgttgcctggaaacgcatcccaggcttcacactgattttacttgggagggaagggagatgagatatgagggcaaaggagttttgactgctgcccttctctcctaggagctcaacctggtggttcagtctcaaatttcctattttggaattggcttgagagagccttttgagttgctaaaagcttttatttattttttattttttgagacggagtttcattcttcttgcccaggctggagtacaatggcgcagccttggctcactgcaacctctgcctcccgggttccagcaattctcttgtcctggcctcccaagtagctgggactgccaccatgcatggctaatttttctatttttagtagagacaagatttcactttgttggccaggttggtctcggactcctgatctcagatgatctgcctgcctcggtctcccaaagtgttgggattacaggcgtgagccactgcgcctggccacttttattttttaaaagagtttcaaacctgaattaaattattaaaaggagaaaatgtgctcagttgaataaaacttcaaaatgctgaaaagagtatagtgtaaaatttcccctctgtctcgtctcctagccacccaagttcctcttctgggagacaaccagtacttccagtttttctgaatgctcccagctgtagatagatagatacacatgagtgtctggcaaggcacagtggctcacacctataatcccagcacttttggaggctgaagtgggaagttctcttgagtctggaagttcaagaccagcctaggcaacatagcaagaccccgtctctacaaaaaaataaaaatacaaaataaaaaagatacacatctatagatagagagatgcatacatatatacatgtatacacacagatacacacatatgtgtattttttgtagacttatacagaatcactttagaggaagagtaattggaaagattgggtttagaaaaatggaccattttctactgaatatatggagtgaaagaggaagtgagttatttccatgttattgaaagctccattatttcaaataaagcctagaaagaataaaataaagctttagccttcttaaattacaattttccagagcatccctcaaaatgtatgagaaaagaaattgatggcagcttatccctccggcaggaaggtgtggtttgaaagtgggccggccacaccgagttgcctgggtcattgaggcacagttctcccctgaactattttgccccataattgttggtaaacgggaaacacttgggtccttcagataaccatgagaatatctcattcgtgcctgttcttgccatactagttgctatggcacagtgtcttccttaaacggagagcccgaacaaggggttgccatggaagcggtgggccagaacgactgcagcatttacggagaagacaccgtgacagacgaagagggcaagttcagattacgtggattgctggtgagacttggaatgtgttttctttggggacttttttttcatcctgtgtccagaagtatcttgtggtggccccaagactgctaggagtgggttgggcgagagggctgggggtggggctctggagccctcccagttcttacctttaattggtagagtttgccttttttctagccaacaggtcagatcaaggatctgtggcacaatggagttggaaaaccatgggtttggtagggcttttccctagcagtatgtggccatggcttacgccagggctcaagccaaacgcctatggagccagaagagcagtatgaacgggggagaggaggctgtgcgaaatgatagggagtggtgagggctgtggagtgggcacggcctgtggaaagggacagcctgtcacttggttccagcttattgtagccatgggagaagacagagtcagggttgccagatccttgaaattttaaaaagagaagtcagaaattcccacttcccagaaataatacccaacacaagcatttgggaatgcttatggtggacattccagatatccatcaatgtgtatatacgggtagaggggaggggtggatggagaggaaaaacatcttagaagagtaagagcacatagtatgcttggaattttgaaataagaaaccaaatttgatttattttggggtaggagaaaatgaaactgagttgggatggaaggagtcgcaaaatttcagatgtttcaacactaggggtgttcttaaaggaactctggactcttaaggttaacaggccacagattaggaaatgaggggagagaaatgctcctgtcttaatgatctcgtgcagccaaaccaggcttggaccaggcacgatacgacaagccccctttctagagaactgactcctgagtttttttgcagccgggatgtgtgtaccacgttcagctcaaggcagaaggcaacgaccacattgagcgggcgctcccccaccatagggtgattgaggtaaggcattcagtgctgccgctgcacctgggtgtgggtgcctccctaatcagaagtcctcccgtctcctctggctgtctgcctttcatctgtggcggggggaactttcatcctaattaagggtcctcttagaatagtgtcatcttcacaagcagaatcttatgtgggtttttagtgaacagcgttgctgtcatgcatccagaaaggaaattggaactgttgtatcctccccgcgacttgccctgtaagctctgatcattattctgcaagttaaggaacttaaggcctaagcagcatttcaaatcaagggacaataatagaacatgggcttaatgggtggcagggccacgcagttatcttaggttcagatgacctttttcctgctcccattttgtgggcagagtcttttgatactcaagatcatgacctagctaaattaatccctaaagaggacatccttcgagtcacagaatgtggcctgggaatcatttgaagtaaggcttttctcttactgagtaactctcattgggaagactagagggcttaggtagggcaagaggggctgcctcttagtggctttatttaggtggcttcattatgcatgaagattgtgagggaggatagaacttttgacctaggaagtggattttcttttttttttctttttttttttttttgagacggagtctcaccctgtcacgcaggatggagtgcagtgccgtgatctcggctcactgcaacctcctccttgtgggttcaagtgattttcccacctcagcctgtagctgggactacaggcacacaccatcacacccgactaatttttgtatttttagtagagacggggtttcaccatgttggccagattggtcttgaactcctgacctcaggtgatctgctcgcttcggcctcccaaagtgctgggattacaggcatgagccaccgcaccgggccggaagtggatttccttgacgtctttacggtgttggcattttaaatggctgggatgactgcatctcacaccaaaatgctttgcatgttctcggtgtagtaacttaggccaggatcactagcataatgtggactgtggccgggcaggtatgaaagggaagggggccggccctctgggatctcgcaaactccatgtacagacctcacgcagagggggtgctgtgactctgcccctgctctaacaggcaagagcatccttctcctctttttttttaagagaagctggaaaatctggcttcatatatgaaatttcttaatttttaacatgttggcaagtaattcaaacgtagaaaaaaaatactgtgctttcgaaatgaaatgtgtctatgggccagggatatgcccctgctctaacaggcaagagcatccttctcctttttttttaagagaagctggaaaatctggcttcatatatgaaatttcctaatttttaacatgttggcaagtaattcaaacgtagaaaaaaaatactgtgcttttgaaatgaaatgtgtctatgggccagggatagccatcttctgtcagtttgtgaccttggacgtagggtactcaatgacaaacttcgcttccttaatgtaagaagcaaagtttgccatgaagcagctctcaggccatcggacagctggcatagaagttcctccaccagctttctcatcactggcattccctctttctctctctaggttgggaataatgacatcgatgatgtaaacatcatagttttccggcagattaatcaatttgatttaagtggaaatgtgatcacttcctctgaataccttcctacgttatgggtaagtccagacttttaagctccaagtattgtgttccctttggctttgagacaagtacgaatgggatgtttttggttttgtgcctgtctcgtgccttaggtgtgacaggtggaggtgctccagagtgccgcctgctgagggttgaggttgagatttaagaaccttggaccacaacacgtatttgggagagtgattgccagttgtgggagagaatgtggtccagtttcagataactgtctgccatcagttaatcttccaaagaattatagtagaagcctgatcaatgatcaatacaatatggaatctaacgtggaaagccaattctaaagaaagcgccttgtaacttaaaattttctctggagtggaggtcgtattaaacgttcttgcattggtttaaagaaatgcctgaggctagataatttataacaaaagaggtttcattggctcctcgttctgtaggttgtacaggaagcatagtggcgtctgcttctggggaggcctcaggaggcttccaatcatggcagaaggtgaagtgggagcaggcatgtcatgtgggagaagctggagcaaaagagagagttggggcatggtgccacacacttttaaatgatcagatctcacaagactcataacgaagacagcaccaagccatgagggatccaccccaaagatccgatcatctcccaccaggccctacctccggcacgggggattacaattcaacatgagatttgggcagggacaaatatccaaacagtatcagaggtggtggacggtgggctggagagcaggtggtctgggctttctcttgtctccagtagtgactcaccttgctgcctgggtcagtcacttcatttccacatgcctcaacttcgtcctctgcaaaacctagattttggactcagagacctcttataatcttgttcagctctaacaaaatctccatgttaccattaatgaagaaatgtttataaaataccctgcagaccctctgcggatgttagtgatttgctctgggggtacattgttaagatgcacttgtaattttataagcagttaagtatttggcatgggtgagaaagtgtgtgtgcgctttagtccactctgtccagggcttgcaggcgtgtgcttgtagggaccaggcaggtaatgtcagagagtgcagagggttgggtagggtggggggcaaactggggaactcctgccccatccatgaggggcacaagggaggggaagaggcagagaggaggggagggcgccactctcttgctcctgagtgttgctgtgctagaattgaggctcagggttggtgtcacttcccagttttccggagaagctggaaattagaattatttgaaatcacctgatttttaaatatagtcggtgaattcagatttacttaagatgttatagaagaaaaaagaacacataagggatcttcaatgcgacccataaccttcagtctgtgactttcattttaggaaaattccccttgtgtgttatgtagaaaggtgccagtgtgggcccagggaggtggtcctggcattctcttgcggcaggtgcactgtggcatcctcacagcctttgccatcagccagggctgcaccttaaccctgctcatgccccatcccgtgtgggagtgagaacaggcaagaaccccagaaataaagccagaaacaaagtactccagtgcctcctgaagcagcgtggagagccacgtacatgatggaatgcgttttgagtttaacagattggtggagttaaggtgacatcatatgatgaggcagtgcaaggcgggaaggaccctcaggagtcgtcagggggttgagtcccaggctctaccatgtgtaagttgtgtgaccttaggtgactttggctctctgggtctccatagggataataacaatacctgttttgtagtcaggattggcgataatgtagataaaatatctggcgcctgcctggcatattacagatgttcaacacgtgttagaagctatttttaatattactattatattaacttatattactattttgagcaagaacatgggtagtcagaatctgatttgaatcttaatttctgtgcatgatacataactggatggagtctcagatgacagagggatgtgtgatgtctatggagggagctttctttttcaaatatccatgtttccaaagacacccacccagagagcggctgtcctgaggatgtctgctatgaaatattgattgtgtttcagtttcaaagcatgtctgactttgtttctccctccaggtcaagctttacaaaagcgaaaacctcgacaatccaatccagacagtttcccttggccagtccctgttcttccatttccccccactgctcagagatggcgaggtaatgcctgtggccggattctaccttctgcctttgttttaataattctgctgtttagtttaaggaagcacagttctctccttttctccctaaataccactctgcagaaatgcgctctctgaatcaaaagaggttgggttctgtagggattattttttcttcattgtttttctgtttacaaaaagaatacatattcatggcaggagattttgggaaaaagaagacataagcccatcatccagaaatagccactgctaacacggtgattggtatcctttgggtcttttttcaggcacgtgtgcgcatgcatgtataaatataaatagacatttattttaataattcaaaactgacactgttttgtacattgttttgtaatccatgcttttcaatgaagaatttatcacaaatctgttcctcatcatcaaatctttctttttttttttttttttgagacggagtctcgccttgtcgcccaggctggagtgcagtggcgcaatctgggctcactgcaagctccgcctcctgggttcacaccattctcctgcctcagcctccgaagtagctgggactacaggcgtgcgccaccacacccggctaattttttttttttgtatttttagtagagacggggtttcaccatgttagccaggatggtcttgatctcctgacctcgtgatccacctgcctcggcctcccaaagtgctgagattacaggcgtgagcccccgtgcctggccaaatctttcatactatgatttttatggacagtagtccataaactaggaaacgccatgatttatttaaccaaggcctactgttgggcatgatcgactcttgcactttgaacatatcaccccatgctttcctgctaagaagtccacttttaaaaatgccttgtaatttttaaaaattcctctattttaacattccgctattgagtttagggaaatacagtttcctcatgatgggggatcccttgaatgagatgagttgcttttctcttgctgctttgaacgttctctctgtctttgataatctgattataacgtgtgtcgtgtagaacacttgcagctccaccttttcagtgtcctttgggttccatgaatctggatgtctccctccttggaactgggaagttttcagccattattctggccgtcatttactgattataaagtgcttattatcaattctatttggacagagctaacttgtagttggtgtggggagtgcaaactttgcaaagaatttggttcttttctggtggtcttagcctgaggatgtcaagtgtgagcctagagggtgacgtttcctctcctggctccttaccacctgccgtgaagatgatctactctggcctttctctgtggaaaatggctgcgaaataatgaaacaggctgtcacggaattttctcctcctctttctccaggggtgttgaaatagtcacttcctacagcgatggggaaacatcttgggctttggggtcacacttcccctgagttcagagccttcatagatgtgtggcagccttcttagctgagtgaccttgggcaagttactcttagtctcttcgtgtttgactttcctcgtctataagacggggtgatgatcccgaccttgccagtggtagaaagcaaagcagccgcgggcctcatgcaatgtgcatggtgcctggcagctggtcggtgctcagcacacagagctgtgacgggcctcatgcaatgtgcatggtgcctggcagctggtcggtgctcagcacacagagctgtggctgcccctggtgccgttccagggatgctgtatttttaggatttgccagcttacgagcctctcaagcatcgtcccttagaagtcagccccgttgtggatcctcagttgtatcacgtacctcccttatcagaattggctcataataattttttgtgtttcataaagtcagatcctcagaggaccgtaattgtcaaggttgggtactcataaaaaggctgcaggctctgacagccttatcagaagccacagtctcagagacactggggacacatgcccgccactgatggaatagcccgctgaggttgatactttgaaggcagcaaccttggtttggatgtgtagtcttggggatttctttaaaaacataaagttctttacatcacagccatacgttaggttttagttttcatttgctttgccagagctgtccttataaaaataacttcttcccatgtgtgcacagaactatgttgtgcttctggactccacactccccagatcccagtatgactacatcttgcctcaagtttctttcaccgcagtgggctaccataaacacttcaccttgatttttaatcccacggtaagtaaaagagggagttaaaaaaaaatccatgggctgggtttggtggctcacgcctgtaatcccagcactttgggaggccaaggctggtggatctcttgagcccgggagtttcagaccagcctaggcaatacggtaaaaccccaactctacaaaaaatacaaaaattaaccgggcgtggtggaacgcacctatagtcccggctactcgggaggctgaggtgggaggatcacttgagcctgggaggttgaggcctcgatgagccatgatcatgcccctgcactccagcttgggtaacagagtgagaccctttctccagaagaaaaacaaaacaaaacaaaacaaaacaaaacaaaacaatccatggggtggcgaaagaaggcatgtccatacaacctgtgctccaggtcgcaggttgcagggcagatatttaaagggctcctggcattgggtcactttctcattctgccttctggattctgggcttccccagattgtttttagcttttctgagcactgatgcctgcgattccctttgaggaggaaactggtaataagagcagtgtaattgtttagatcggtggctcaggaatgattttgggggaggagggacaccactatcgctggtgtggcgtgtgcttctccatgagggagcacatggtacatggccacgcaaacccctagaaccaactgctactttacaggaaatagggaggacccaggagcacgcaaatgactccacagggatgcaggacaaccacctggagcctgatttgtttgacaaataaattgcaaggaaaaaaaaaccaacaacagatggacagaatacctgtgggttaaaagaaacttaacttatcgcttaattcattgcaatatgtggcccttactatttgcaatatgtgtatctgttgcatacggtctgtcctgtatccgataggctggaacagtggaacaaacaaaacatacacgtatcttttaccttcttgataaaattgtttagtgattcctaaagctcagatgcagtattgtcacctgatgattaaacagacacatcagcaatagcaaaaacagagtccagggctcagcctcaggactgctgattctgaacttgacggggtgaaagtgtagcacaggagtctgcattaaaaacaaaaatctggcctcatagctactgtgttggttcttgcttctaggccttttcagtgggcagaataagaactttattgttttcaaaaaatgtaactgtaagtggaacaatatcttccgatcctcctttttccttttttgataacgacacagcattcctctgtgtggatataccgtgtgtcttaggccatttgggctgctattttgtatcttagactgggtaacttataaacaacaaacatttatttcttacagtactagaggctgggaagtccaagatcaaggcattggcagatttggggtctggcgaggacttgctgtctgcttcatagatggtgccacctagctgtgtccccacaaggcggaaaggggcaaacaagttccctcaggccactcttacggggcattaatccctgacttaatcacctcctaaaaagggtgtcctcttgacactatcacattatggattagggttcaacctatgaattatgtaggcacagacacattcagatcctggcactacatgtaggatattcagttagcccctggttgaggggcgtttgtgttgttactggttttctgctattacacataaccctttaatgaattgccttacgcatgcatgtttttgagtgttcgtcagtctctctttggaatagactcccagaagtggaattgctgagtcaaagggtaaatgcatatggaattttgattgatacggccacttcccatccatgggggttttactgttttatattcccgccagcagtgaatgagtacccttttttccccaacagagtattttgtcaaatttttcaatttttgcaggcttatagatgagaagtgatattatctcagtgtacttctaattgcatttctctcttttcatgtggttaagagccatttgtatttgctgtgaactatttaacctatttttctatagaatttttggtctttttcaaccattttcagctctttgtatactaggaatattaaccctttgtaatgtttgttgtacatatttttcccaatttgtcatttatcttttcacttggtttctgcaaagatttactttatttctgtgttaaatgtgttgattttttcttattgcttctggattttagagtcataggaaggttttcttcattcccagcttttacaggaatttatcgtgtttttttcaggcagacttttatagtttctgtttttacatttaaatctctctatccatttggagtttttcctggtatagatgtgaagtatggctccagattgtctttttccacatgctatccagttaccatttcatgcttttcaaacgccatcctgcatggaaggtggacaggaattacctttcatttagagatgagaagatgggaacctagaaggagatgtgagcagcccaaggtcaccagctcacgtggagcagtgctagggcttgagcagagctctgctgctgattctgggcttctgtgaagagtgattcatgctcagtgagcctgtaaatatgatcttacctgaacaagagagtttttctcatgacccacgaggaaacacttccttgttactcacagtagagacctggttagaaagtgctggagagggctaggtgtggtggctcacgcctgtaatcccagcattttaggaggctgaggtgggcagatcatttgaggtcaggagttcgagaccagcctgggcaatgtggtgaaagtgaaaacccatctctgctaacaatacaaacattagccaggcgtggtagcacgcacctgtaatcccagctactcgagaggctgtggcaggagaattgtgaacctgggatgcagagtttgtagtgagctaagatagccccagtgcactccagcctgggcgacagagcaagactgtctcaaaaaaaaaaaaaaaaaagaaagtgccagaaagataagcatatacaagaaccacttacctttgcttggggctgcattgtggcccagttgctgggagaggcttctgtgaaggccgttgatagctgcaggcagtgacattctcaggggcccctagcagacaactcatccgggctcagggacacacctgggagccagtggcaggaatgtggagacactgcttggtggtggccgagcagcccagcctcgtagctgctgcctgtcacttctgagaatgtaagaaactgtgccctggtgtgtgatgttccccttcctgtatacctatgtaaccaacctgcacattgtgcacatatatcctaaaacttaaagtataattaaaaaaaaaaaaaaaa

SEQ ID NO: 6006 - DNA, 2646 bp, Homo sapiens
gtttgacaaataaattgcaaggaaaaaaaaaccaacaacagatggacagaatacctgtgggttaaaagaaacttaacttatcgcttaattcattgcaatatgtggcccttactatttgcaatatgtgtatctgttgcatacggtctgtcctgtatccgataggctggaacagtggaacaaacaaaacatacacgtatcttttaccttcttgataaaattgtttagtgattcctaaagctcagatgcagtattgtcacctgatgattaaacagacacatcagcaatagcaaaaacagagtccagggctcagcctcaggactgctgattctgaacttgacggggtgaaagtgtagcacaggagtctgcattaaaaacaaaaatctggcctcatagctactgtgttggttgttgcttctaggccttttcagtgggcagaataagaactttattgttttcaaaagatgtaactgtaagtggaacaatatcctccgatcctcctttttccttttttgataacgacacagcattcctctgtgtggatataccgtgtgtcttaggccatttgggctgctattttgtatcttagactgggtaacttataaacaacaaacatttatttcttacagtactagaggctgggaagtccaagatcaaggcattggcagatttggggtctggcgaggacttgctgtctgcttcatagatggtgccacctagctgtgtccccacaaggcggaaaggggcaaacaagttccctcaggccactcttacggggcattaatccctgacttaatcacctcctaaaaagggtgtcctcttgacactatcacattatggattagggttcaacctatgaattacgtaggcacagacacattcagatcctggcactacatgtaggatattcagttagcccctggttgagggggcgtttgtgttgttactggttttctgctattacacataccctttaatgaattgccttacgcatgcatgtttttgagtgttcgtcagtctctctttggaatagactcccagaagtggaattgctgagtcaaagggtaaatgcatacggaattttgattgatacggccacttcccatccatgggggttttactgttttatattcccgccagcagtgaatgagtacccttttttccccaacagagtattttgtcaaatttttcaatttttgcaggcttatagatgagaagtgatattatctcactgtacttctaattgcatttctctcttttcatgtggttaagagccatttgtattttctgtgaactatttaacctatttttctatagaatttttggtctttttcaaccattttcagctctttgtatactaggaatattaaccctttgtaatgtttgttgtacatatttttcccaatttgtcatttatcttttcacttggtttctgcaaagatttactttatttctgtgttaaatgtgttgattttttcttattgcttctggattttagagtcataggaaggttttcttcattcccagcttttacaggaatttatcgtgtttttttcaggcagacttttatagtttctgtttttacatttaaatctctctatccatttggagtttttcctggtatagatgtgaagtatggctccagattgtctttttccacatgctatccagttaccatttcatgcttttcaaacgccatcctgcatggaaggtggacaggaattacctttcatttagagatgagaagatgggaacctagaaggagatgtgagcagcccaaggtcaccagctcacgtggagcagtgctagggcttgagcagagctctgctgctgattctgggcttctgtgaagagtgattcatgctcagtgagcctgtaaatatgatcttacctgaacaagagagtttttctcatgacccacgaggaaacacttccttgttactcacagtagagacctggttagaaagtgctggagagggctaggtgtggtggctcacgcctgtaatcccagcattttaggaggctgaggtgggcagatcatttgaggtcaggagttcgagaccagcctgggcaatgtggtgaaagtgaaaccccatctctgctaacaatacaaacattagccaggcgtggtagcacgcacctgtaatcccagctactcgagaggctgtggcaggagaattgtgaacctgggatgcagagtttgtagtgagctaagatagccccagtgcactccagcctgggcgacagagcaagactgtctcaaaaaaaaaaaaaaaaagaaagtgccagaaagataagcatatacaagaaccacttacctttgcttggggctgcattgtggcccagttgctgggagaggcttctgtgaaggccgttgatagctgcaggcagtgacattctcaggggcccctagcagacaactcatccgggctcagggacacacctgggagccagtggcaggaatgtggagacactgcttggtggtggccgagcagcccagcctcgtagctgctgcctgtcacttctgagaatgtaagaaactgtgccctggtgtgtgatgttccccttcctgtatacctatgtaactaacctgcacattgtgcacatatatcctaaaacttaaagtataattaaaaaaaaaaaaaaaag

SEQ ID NO: 6007 - DNA, 287 bp, Homo sapiens
tttatttttttgagacagagtcttgctctgtcgcccaggctggagtgcagtggtgcgatctcggctaaccgcaagctccgcctcccaggttcacgccattctcctgcctcagcctcccgagtagctggtactacaggcgcccgccaccacgcccggctaagtgtttatatttttagtagagacggggtttcactgtgttagccaggatggtctcgatctcgtggcctcatgatctgccagccttggcctcccaaagtgctgggattacaggcgtgagccactgtgcc

SEQ ID NO: 6008 - DNA, 331 bp, Homo sapiens
tggctaattttgtatttttatagagacggggtttcaccatgctggccaggctgttctcaaactcctgacctcaggtgatctgcccacctcagcctcccaaagtgctgggattacaggcgtgagccactgcacctggcctgaattaaacttttaagtaagtgtttacttcagtggaaaaatgggttgggttctaagagatgtccaaagatacaggagtaggcagttgttgatggaaatctgttcctgcccttattctttcatttatgaaagggcatcccaggtacagcggcgcccacagtcactctctagcccagcagttcttggatgggtt

SEQ ID NO: 6009 - DNA, 331 bp, Homo sapiens
tggctaattttgtatttttatagagacggggtttcaccatgctggccaggctgttctcaaactcctgacctcaggtgatctgcccacctcagcctcccaaagtgctgggattacaggcgtgagccactgcacctggcctgaattaaacttttaagtaagtgtttacttcagtggaaaaatgggttgggttctaagagatgtccagagatacaggagtaggcagttgttgatggaaatctgttcctgcccttattctttcatttatgaaagggcatcccaggtacagcggcccccacagtcactctctagcccagcagttctcggatgggtt

SEQ ID NO: 6010 - DNA, 9525 bp, Homo sapiens
gttcccatggtgcacggtgctacgccagccactgtgtccgcagcaacaacatctgccacaagtgttcccttcgctgcaacagccacagccaaccaggtttgctaatttacagctttgtttcttaaaaaacaactctaatagggctcaatccaacagcccttacgcacgtggatttcccattgaggtcagtgggaatcgtgtgtacgtgagggctgtagagggtgctttaataagcatggggtttcaaagatacctcttgttggcctacacattctctctatgatgagcagcagaatgcttttatgccatttataagtgctccaaagtcgtcgcagctccatttctgaagctactaaaatgatatttacacaagcaattctcaattggtttcaacaatcgtgcaggtattttgaccaatcataaatagaggccatttttaaggtttttatttaaaatattgtggtatatacagtttcttagttcttgcctaaatgattaatagaaagtaaaatacttaaatgtattacgtatgccacaaatgaccactcttgtaaataagtttgttataaattcattataatctgaatcatttaatgagcagattcaaaataaattgtttgcatgtagcatttctaagcttttattctcaatgctttcagtgaaagaaaaatcctaagcgctcttatttttataattaccctgcataaatgttggagatttatgaaggaaaagaaaagaaattaagtatggcaaattgacagtcattctgtattccatgcaaatttattgcaggatacttttaagtgaaagggatttgtttcataaatttaaattttatgatatacaataataactatttaaaaataaatgatgatttaaaatatttaaaatttaaaaattgacatttattcacccagcattttctgattctacttaaaaatattttctagaaaatactggttgatttcaagtttcatttatgtagatttgggcttcaatagagttgatagtgtatgaaaaacatagagccaagccacatttcagataatccacagaggaagattaaaggtagccaaatgaatctcaaaagaatgagtgtcagatgaaaatgaacatgttcccccttgggaagggaagaccaattaagacatagatttgttgttattactgtgaggagtagccacccttgttctataatacatcacgtactgttgatgaagaacattcagctattagtacagccattaaaaactttcaaaatcagaacacaaaaatgaatttaacgtttcagtcaagctttaaacatttcttggcaaagaatcattaatttttcagaagcttgtcaaaatagccctgggtttacatgaacacgtcagactcatttacaagaatgctagattgtgcatatgtggcatgttaataagtaacctttggtagaactattatgatggattcaatacaatccatctatggtgcaaatcaatgataaagaactctcatgcgtctaccatgtatgactgtagaattgctggtgtaagcagaactatagcagagcaaatttcaacatgcccttggccacctgggttgtaggggacactttactttttgcattgtgctgtgaccatttcatgcataatcttggatcttcatactatttgacaaccaaaagaaagaaaagggaatggatatatatatacacacatatattatatctacatatacatacatatgtatatgcctacagtacattagcaatgctggaaatagctgatgccacaaaatgcagcctgcatgcatgcagaagtttatagctggcccttcatctgcatcgattggtgttgaaggtccttggtatgtttcgacagccccatccttgatgcttctacactgttgggtgcaacatcctgtcctgcagcagcaggaaaaatggtatgagaagcttcattatgcttggagcacattttcgtgccatttgccaatgctgtaaaattgtgtaaaaatgtcagctgagaactggaaataaaacagggacatattaatatacacgccagactgtggattgtagtatgttgaattagcctaagatgtctaaattgaaagaacagcaacaaaatgcctttgtgtatctgatttcattattctcccaacaacattgctgaaatgggattagtatcattttatagaagagacttaagcatagagtaatgagttgctttgctcagggtcacacagccagtaaatggatctctggggctagcacccgtgtcatcagtcctctgacagtctcaatccattgtgctgcctctctcaggttagcaggcattaatttcaggttgaagaatcaagctacaaatccgaagttcttaactttgggaactattgaaataagtcaactctatattggtttcttattgtattttctctcaagttctctaattctcttgcccatttaaaatacaataaaaggtgtcatcaggattcagaaatatgttctgaagtaaacttaggctcttacctagttcttttgaattactgctttataattcttacctggtatttttaatttggaaaaaaaaagttagacaccctaatttgaacgaaaatgttagaaatttggtgcacaaaaataggcaagacatttccttatctgatttctggatgattactaagtaactgaaaccacgggggtgcgtgtgtgtgtgtgtgtgtaggccaacaaaaagggcttctttcaattactgctctgcatgaatttttgatagttttacttatttcctaaaagctggtaacatttatagaatagtatttaacatgaagattttaaagttagttgctactttggcatttaagtttacattaacttactgttatgttgaccagataaggactatcacctcacagctgaatttcacttttctttaaaaatttaatattaaaatgttttcatctcttaattgttggcttgcttgcatggatcattcattaaataattttttatttgctagatacccataatatctgccgaacatctgactagccacaagtatgttacccagatgtagaattttcatcactaaacagtaagttcattatgtaatatatagttgcatatttgtggtggttttttttaagatagcaattgtatagtgcacttaaaattttgcgaaatctctgagaaaatatatacagatcacatttttatcttaaatgggtgtgaggaattttatcagacatctttataacaaatatgttaatatcacttaaatatacaaagtactaagagaaaataaattttttaaatttctgattagagataaacacagcataaagaaaatgtatgaccaaaaagtaattagaaggtgtagatcaagggttggcaaactttcttatagggtcagacagtaagtatttttgctgtgtgggccgtatcgtttctgttgcagctactctcctctgccattgtatcatgaaagcagccagagaccacatgtaaacaaatgggtgtagctgtgttccagtaaaactttatttacaaaaacaggcagtacatcacatctggcccacaggcagtagtttggctgacctctggtgtagattatcacttttttttttttttttcattctttggctaaaccttaaatgggaccatgtacttacttcatcccatgcaccaccatacacaggggcattagaatgtaatgagtttggctaagcgtggtggctcacacttgtaatccaagcactttgggaggccaaggtgggtggattgcttgagcccaggaatttaagactagcctaggcaacatggtcaaaccctgtcctacaaaaaatacaaaaaaatcagctgggtatggtagcacactctgtagttccagctactagggaggctaaagtgggaggatcacttgagcccaggaggttgaggctgcaatgagctgtgattgcgccactgcactccagcctgggcaacagagcaagacctgtctcaaaaaaaaaaaaatgtagtgagtctgactttaaataaatatatacacataatcaaatatatgtgtacacacaaatctacatattcaaatgaatcttagttactttaaagtagttacctcagaggatcatataattctgaaaatgttgccattgccacattttaaaaatggtttgaaagtcttgtattttgtctttaaaaacactgtggtggtggggtcgggggaggggggagggatagcattgggagatatacctaatgctagatgacacgttagtgggtgcagcgcaccagcatggcacatgtatacatatgtaactaacctgcacaatgtgcacatgtaccctaaaacttaaagtataaaaaaaaaaacaaaaaaaaaaaccactgtcttaaatacttaaaaaggtgtccatttttcatccataggaatatgttttgtccagtatgcatgcattcaagttataacatgtgctcagatgcttgttatttatttttatatttagaaagagacattacatttaaaactgaaattggttaagatgggtgaccattctttgttgcttcctttatttatttattaacatatttacaaatgagtttttggtgctactttgtgttagttaccatggcaaggagataaaggtaaatagataataagataaagatgtaaggaatttcaggataatatagtaaaataagagaggtttgaagaaatttctcttagagcaaagatgaaggagcagctgttcccaacaggatccgtaaacaaatgaatgtggacaatgaaggtgttgttctaaagagaatggaggtgtaaaggccttgtaaaagaaggacagtgtgccaagtcaggaaacgatgatggctgagaaccaactcagaaacccttgtgatgttaatctgtagcaaagctggacaaagtcaaagcccatgcaggagaacaggcagaattcaatagccatttaagaaagaaatgagaggctcaactggagaagtactgccaaagatatgctgcaatcgtgaattattaaaattgatttttgtctatttcataagttttctcaaagcagttctgataaaaaggttcagattctgaacaatagccacatttgtagaagaagaggcattactttgcagtgttgtaggtttagaagaagaggtttttttgacatgccagaaaaatctgtttcaagctcttatagtcaattaggtgtgtttggtatgtatatatttaactaaattctgtttcttagcaataatccaggttgaaaaaaatttctaaaaataattagcaaaccagtagttttgtctgtattgaagctaagcttttaatgttctgttcatttaacaaatgattgctcatcttcatgaggagttgcaacatttaaactggtttttgagtcactagattatgatttctttcattttcaaggttgtattgtgaagcatacttttaatatatgtaaatattcgctgctgagaacaaatttcatgtaaaaactggaactgttaatccacaagtacattgtaatgtctattacagcttaattcatgagtaataattctgtaattcaaaaagaatgatttttattttcttagttttaggtgaaaaaagttcaacaaactgaattacccaaagccatcacttaaagtatcattctttttttttcaaacatgcattatgctaatcaagcacccaaaaagaataaatcttgtttaatagaacatattacatgaattttaattttgtagaccagacctttactcttgaaaccttattaaacttcagaaaagaagtttaaattttgccctacaacaattgtgctaaaaaagagctctgtatattaggccccctgattctgcaaatgtattttatacttttagtttaggattggtaaattttggagcacattctacagttttattaaattgtacgtgttatttcattcgtgtagagatgatagacaaattttgatctgtctactcttgtaaaatggtttttgtttttatatgaagatataatgtaaatatactggttaatcaaaaagaaaattttcatattaaatgtatattagaaactgcttttagatattacctgttctaacaaagcttatctctttttcccttgtagatcatgctaaagaggaaaggacagtgtgcttggttagagtaaaggacgaggtcattagccatattgtatatatcgtcaagcaacacacacaaaagttcctcagccacaagacatccacatattgcatgttaaccagaagaaaagacaacattttccggaaatccactgcacactgttgcctatacactttgtacatttaattgatatttgtgctgaggtgatattcctgtctaaaagaacaacattgtctttcttttctagcacagagttatgcattcaaagatgcatacctagttagtttcctatatattcatgccatcttgaaaagacagactatggtgtaaccatgattctattatgtattggtacgtctgtagaccaagatataattttttaaaaataagtttatttctttcaaggtttacaaataacaaaggtgcaccttgtatttaaaattgccattatagatgagagcgtgcatgcacagtcatttttgtttaagagtaatatttttaatgtaatagattgtaagacgtggtgagggagggatctgacagagatgaatgtgccaagcaaaaccacaactgtgtatattttaaagcacatcatggctttaagtaccatgttgttaaggattctcatgaagtgccatagactgtacatcaaattagagtattatttcttcagtgttattgttttcagagccacattttgttgcatatttgctagtactaatcagtcaaagggcaccattctttttttttttttttgaaaccaaagctgtctcagaaatggccaatttaactttacagtaacaatagacagcacaacacaaactctctcaatacagataaactcacacatactggagatatatatataatagatatatataaaattattttaatgcattgtagtgtaatatttatgcatactatactgtataacatgttattcaaaagggattgccatttctgagacacagtaacaaaaaaatgaggaaattattttgcttctatttatagcctctgtcaaaagtcaaaagactataaatgctttgcaaaaatggtttcacgtttgcttaaatgcttcatcacagtcacattcaaaatagtgactctaaacaaagaagaaagcagcactgtcatcagatgcatgataaaccaaaatatgaaaatgggaaatgtttaattaacctagtaattgggtgggttaagtacatgggtgaattttatatgtgatttttgttttgttttgttttgttcagattaactgcttatagccttagaaagccttttacaaaattaaaaaaaaaatagatgtgcattcagtttttaagaatggaatcatccaaaggaattcctttttttgaggtttggatgttgcagctagtaaaggatatttttgctctgttcagcagttctaaaaattgctgaagtaggggccaggtcactggtagttatagtatggaatgggagaagtgaaagttcagttatagaactttccatacttccaagtttactgcaagtttttatgcttgagagagatgctttctaatataagactgatgtgttgattttactgattgtactgtacatctattaaagccttagattattacattacgggttggaacccataccaatgtaatttcaatcgtgttaagaaagtaatggtgacttcacatgttattgtagttagttacattatagaatattacttatttttcttgttaaaatgtagtttttcatttcctacatttattagattttcattttctattaacaattgaataccatttcagtttatagacttgttttattagattttaccaatgaatttttcaaaatacaaaaaaaagtagtttttccttcataacatactcagttttgaattacatgtagtgtcacatgaatattcgtattgttaactaaatgatttatattttactgatttaatattacagtgtaagaatgtcagtcattgttagttcttgtctagttttcattaaaagaacaaagatcttttatatggatatcttataaatatataatcattgctaagtaagaagttaagttgttgctatcgcaacaatcctggcagacaattgagtaatattttgatgatttattttgtttgtaattagttattataagaagatctagatcctagatattagaataaaatttattttctactgtatccatttcaaatgttaaaatattgtttaatatttttgaaatccctgagtatcaggccttgttataaataagctgcataatcaataaatagaacaagggactttttgttgataatccaaatactcaaagtttacgtaatgaaaattatagcgtgtgtgcaaactcttgagggttgattatgctgcaatttagcatgttggaacgtctagggagaaggttgactttttgcacttctgtatatagtcaaaagagagaaacctgtataatagtaagatcttattttgaataaaaacgtctataattacaaggagttttgttaaggctaatacaatgacagactgagcaaaattgcttgcaaaagtggcacagagttagcactccataccccttcaaacatgttgctttgctttcttgtggacagcttgtagtttgccaggattttttcagctggaaagatacgccatcctttcaaaccctcatgactgacaaaaactccatggggccaaatctgcctgaagatcattaccaaaaatagcaggtacttctaccattaaggtgaaatcatggatcagatattccttacatttttcaaaactactgcatgtttaaaacttcaacaaaaaaagagagaaagaactatactaagaacatatattattcagatcagtttctgccaatttcagtggtttattgttcacaaaaaaatcttcaaaacaagtattgactttcacaaaatttaaatcataaacaggcaaaccaaacagcacactgtagctatagttgttatgtgattgttttttaattgctgtaggatcctgttctttcagcaggtgaaaaataaaacgcagttcaaatttcatggttttaattttcaactcagaagcactcaaaaatgcaaaatgtgataatgggcacttgtttaaaagaattagtgtatccagccttcactccagctggttaaaaatgttgcacttatcagcaaccctaccactttcatctgctgaaaggacaaatgtgcttggttttactattatgtaatcacaacttactttctgcttgtagttgcttaaaattatgtattttgtcttgggctgcaatttgttttatgcttattttattattactgcagtagttgactttgctgtatggaaaaataaagtgaaattgccctaataaaacttctctttcttaagtatattcgtgta

SEQ ID NO: 6011 - DNA, 9525 bp, Homo sapiens
gttcccatggtgcacggtgctacgccagccactgtgtccgcagcaacaacatctgccacaagtgttcccttcgctgcaacagccacagccaaccaggtttgctaatttacagctttgtttcttaaaaaacaactctaatagggctcaatccaacagcccttacgcacgtggatttcccattgaggtcagtgggaatcgtgtgtacgtgagggctgtagagggtgctttaataagcatggggtttcaaagatacctcttgttggcctacacattctctctatgatgagcagcagaatgcttttatgccatttataagtgctccaaagtcgtcgcagctccatttctgaagctactaaaatgatatttacacaagcaattctcaattggtttcaaccaatcgtgcaggtattttgaccaatcaaaaatagaggccattttaaggtttttatttaaaatatttggtatatacagtttcttagttcttgcctaaatgattaatagaaagtaaaatacttaaatgtattacgtatgccacaaatgaccactcttgtaaataagtttgttataaattcattataatctgaatcatttaatgagcagattcaaaataaattgtttgcatgtagcatttctaagcttttattctcaatgctttcagtgaaagaaaaatcctaagcgctcttatttttataattaccctgcataaatgttggagatttatgaaggaaaagaaaagaaattaagtatggcaaattgacagtcattctgtattccatgcaaatttattgcaggatacttttaagtgaaagggatttgtttcataaatttaaattttatgatatacaataataactatttaaaaataaatgatgatttaaaatatttaaaatttaaaaattgacatttattcacccagcattttctgattctacttaaaaatattttctagaaaatactggttgatttcaagtttcatttatgtagatttgggcttcaatagagttgatagtgtatgaaaaacatagagccaagccacatttcagataatccacagaggaagattaaaggtagccaaatgaatctcaaaagaatgagtgtcagatgaaaatgaacatgttcccccttgggaagggaagaccaattaagacatagatttgttgttattactgtgaggagtagccacccttgttctataatacatcacgtactgttgatgaagaacattcagctattagtacagccattaaaaactttcaaaatcagaacacaaaaatgaatttaacgtttcagtcaagctttaaacatttcttggcaaagaatcattaatttttcagaagcttgtcaaaatagccctgggtttacatgaacacgtcagactcatttacaagaatgctagattgtgcatatgtggcatgttaataagtaacctttggtagaactattatgatggattcaatacaatccatctatggtgcaaatcaatgataaagaactctcatgcgtctaccatgtatgactgtagaattgctggtgtaagcagaactatagcagagcaaatttcaacatgcccttggccacctgggttgtaggggacactttactttttgcattgtgctgtgaccatttcatgcataatcttggatcttcatactatttgacaaccaaaagaaagaaaagggaatggatatatatatacacacatatattatatctacatatacatacatatgtatatgcctacagtacattagcaatgctggaaatagctgatgccacaaaatgcagcctgcatgcatgcagaagtttatagctggcccttcatctgcatcgattggtgttgaaggtccttggtatgtttcgacagccccatccttgatgcttctacactgttgggtgcaacatcctgtcctgcagcagcaggaaaaatggtatgagaagcttcattatgcttggagcacattttcgtgccatttgccaatgctgtaaaattgtgtaaaaatgtcagctgagaactggaaataaaacagggacatattaatatacacgccagactgtggattgtagtatgttgaattagcctaagatgtctaaattgaaagaacagcaacaaaatgcctttgtgtatctgatttcattattctcccaacaacattgctgaaatgggattagtatcattttatagaagagacttaagcatagagtaatgagttgctttgctcagggtcacacacacagtaaatggatctctggggatagcacccgtgtcatcagtcctgtgacagtctcaatccattgtgctgcctctctcaggtaagcaggcattaatttcaggttgaagaatcaagctacaaatccgaagttcttagctttgggaactattgaaataagccccctctatattggtttcttattgtattttctcccaagttctctaattctctggcccatttaaaatacaataaaaggtgtcatcaggattcagaaatatgttctgaagtaaacttaggctcttacctagttcttttgaattactgctttataattcttacctggtatttttaatttggaaaaaaaaagttagacaccctaatttgaacgaaaatgttagaaatttggttgcacaaaaataggcaagacatttccttatctgatttctggatgattactaagtaactgaaaccacgggggtgcgtgtgtgtgtgtgtgtgtaggccaacaaaaagggcttctttcaattactgctctgcatgaatttttgatagttttacttatttcctaaaagctggtaacatttatagaatagtatttaacatgaagattttaaagttagttgctactttggcatttaagtttacattaacttactgttatgttgaccagataaggactatcacctcacagctgaatttcacttttctttaaaaatttaatattaaaatgttttcatctcttaattgttggcttgcttgcatggatcattcattaaataattttttatttgctagatacccataatatctgccgaacatctgactagccacaagtatgttacccagatgtagaattttcatcactaaacagtaagttcattatgtaatatatagttgcatatttgtggtggttttttttaagatagcaattgtatagtgcacttaaaattttgcgaaatctctgagaaaatatatacagatcacatttttatcttaaatgggtgtgaggaattttatcagacatctttataacaaatatggtaatatcacttaaatatacaaagtactaagagaaaataaattttttaaatttctgattagagataaacacagcataaagaaaatgtatgaccaaaaagtaattagaaggtgtagatcaagggttggcaaactttcttatagggtcagacagtaagtatttttgctgtgtgggccgtatcgtttctgttgcagctactctcctctgccattgtatcatgaaagcagccagagaccacatgtaaacaaatgggtgtagctgtgttccagtaaaactttatttacaaaaacaggcagtacatcacatctggcccacaggcagtagtttggctgacctctggtgtagattatcacttttttttttttttttcattctttggctaaaccttaaatgggaccatgtacttacttcatcccatgcaccaccatacacaggggcattagaatgtaatgagtttggctaagcgtggtggctcacacttgtaatccaagcactttgggaggccaaggtgggtggattgcttgagcccaggaatttaagactagcctaggcaacatggtcaaaccctgtcctacaaaaaatacaaaaaaatcagctgggtatggtagcacactctgtagttccagctactagggaggctaaagtgggaggatcacttgagcccaggaggttgaggctgcaatgagctgtgattgcgccactgcactccagcctgggcaacagagcaagacctgtctcaaaaaaaaaaaaatgtagtgagtctgactttaaataaatatatacacataatcaaatatatgtgtacacacaaatctacatattcaaatgaatcttagttactttaaagtagttacctcagaggatcatataattctgaaaatgttgccattgccacattttaaaaatggtttgaaagtcttgtattttgtctttaaaaacactgtggtggtggggtcgggggaggggggagggatagcattgggagatatacctaatgctagatgacacgttagtgggtgcagcgcaccagcatggcacatgtatacatatgtaactaacctgcacaatgtgcacatgtaccctaaaacttaaagtataaaaaaaaaaacaaaaaaaaaaaccactgtcttaaatacttaaaaaggtgtccatttttcatccataggaatatgttttgtccagtatgcatgcattcaagttataacatgtgctcagatgcttgttatttatttttatatttagaaagagacattacatttaaaactgaaattggttaagatgggtgaccattctttgttgcttcctttatttatttattaacatatttacaaatgagtttttggtgctactttgtgttagttaccatggcaaggagataaaggtaaatagataataagataaagatgtaaggaatttcaggataatatagtaaaataagagaggtttgaagaaatttctcttagagcaaagatgaaggagcagctgttcccaacaggatccgtaaacaaatgaatgtggacaatgaaggtgttgttctaaagagaatggaggtgtaaaggccttgtaaaagaaggacagtgtgccaagtcaggaaacgatgatggctgagaaccaactcagaaacccttgtgatgttaatctgtagcaaagctggacaaagtcaaagcccatgcaggagaacaggcagaattcaatagccatttaagaaagaaatgagaggctcaactggagaagtactgccaaagatatgctgcaatcgtgaattattaaaattgatttttgtctatttcataagttttctcaaagcagttctgataaaaaggttcagattctgaacaatagccacatttgtagaagaagaggcattactttgcagtgttgtaggtttagaagaagaggtttttttgacatgccagaaaaatctgtttcaagctcttatagtcaattaggtgtgtttggtatgtatatatttaactaaattctgtttcttagcaataatccaggttgaaaaaaatttctaaaaataattagcaaaccagtagttttgtctgtattgaagctaagcttttaatgttctgttcatttaacaaatgattgctcatcttcatgaggagttgcaacatttaaactggtttttgagtcactagattatgatttctttcattttcaaggttgtattgtgaagcatacttttaatatatgtaaatattcgctgctgagaacaaatttcatgtaaaaactggaactgttaatccacaagtacattgtaatgtctattacagcttaattcatgagtaataattctgtaattcaaaaagaatgatttttattttcttagttttaggtgaaaaaagttcaacaaactgaattacccaaagccatcacttaaagtatcattctttttttttcaaacatgcattatgctaatcaagcacccaaaaagaataaatcttgtttaatagaacatattacatgaattttaattttgtagaccagacctttactcttgaaaccttattaaacttcagaaaagaagtttaaattttgccctacaacaattgtgctaaaaaagagctctgtatattaggccccctgattctgcaaatgtattttatacttttagtttaggattggtaaattttggagcacattctacagttttattaaattgtacgtgttatttcattcgtgtagagatgatagacaaattttgatctgtctactcttgtaaaatggtttttgtttttatatgaagatataatgtaaatatactggttaatcaaaaagaaaattttcatattaaatgtatattagaaactgcttttagatattacctgttctaacaaagcttatctctttttcccttgtagatcatgctaaagaggaaaggacagtgtgcttggttagagtaaaggacgaggtcattagccatattgtatatatcgtcaagcaacacacacaaaagttcctcagccacaagacatccacatattgcatgttaaccagaagaaaagacaacattttccggaaatccactgcacactgttgcctatacactttgtacatttaattgatatttgtgctgaggtgatattcctgtctaaaagaacaacattgtctttcttttctagcacagagttatgcattcaaagatgcatacctagttagtttcctatatattcatgccatcttgaaaagacagactatggtgtaaccatgattctattatgtattggtacgtctgtagaccaagatataattttttaaaaataagtttatttctttcaaggtttacaaataacaaaggtgcaccttgtatttaaaattgccattatagatgagagcgtgcatgcacagtcatttttgtttaagagtaatatttttaatgtaatagattgtaagacgtggtgagggagggatctgacagagatgaatgtgccaagcaaaaccacaactgtgtatattttaaagcacatcatggctttaagtaccatgttgttaaggattctcatgaagtgccatagactgtacatcaaattagagtattatttcttcagtgttattgttttcagagccacattttgttgcatatttgctagtactaatcagtcaaagggcaccattctttttttttttttttgaaaccaaagctgtctcagaaatggccaatttaactttacagtaacaatagacagcacaacacaaactctctcaatacagataaactcacacatactggagatatatatataatagatatatataaaattattttaatgcattgtagtgtaatatttatgcatactatactgtataacatgttattcaaaagggattgccatttctgagacacagtaacaaaaaaatgaggaaattattttgcttctatttatagcctctgtcaaaagtcaaaagactataaatgctttgcaaaaatggtttcacgtttgcttaaatgcttcatcacagtcacattcaaaatagtgactctaaacaaagaagaaagcagcactgtcatcagatgcatgataaaccaaaatatgaaaatgggaaatgtttaattaacctagtaattgggtgggttaagtacatgggtgaattttatatgtgatttttgttttgttttgttttgttcagattaactgcttatagccttagaaagccttttacaaaattaaaaaaaaaatagatgtgcattcagtttttaagaatggaatcatccaaaggaattcctttttttgaggtttggatgttgcagctagtaaaggatatttttgctctgttcagcagttctaaaaattgctgaagtaggggccaggtcactggtagttatagtatggaatgggagaagtgaaagttcagttatagaactttccatacttccaagtttactgcaagtttttatgcttgagagagatgctttctaatataagactgatgtgttgattttactgattgtactgtacatctattaaagccttagattattacattacgggttggaacccataccaatgtaatttcaatcgtgttaagaaagtaatggtgacttcacatgttattgtagttagttacattatagaatattacttatttttcttgttaaaatgtagtttttcatttcctacatttattagattttcattttctattaacaattgaataccatttcagtttatagacttgttttattagattttaccaatgaatttttcaaaatacaaaaaaaagtagtttttccttcataacatactcagttttgaattacatgtagtgtcacatgaatattcgtattgttaactaaatgatttatattttactgatttaatattacagtgtaagaatgtcagtcattgttagttcttgtctagttttcattaaaagaacaaagatcttttatatggatatcttataaatatataatcattgctaagtaagaagttaagttgttgctatcgcaacaatcctggcagacaattgagtaatattttgatgatttattttgtttgtaattagttattataagaagatctagatcctagatattagaataaaatttattttctactgtatccatttcaaatgttaaaatattgtttaatatttttgaaatccctgagtatcaggccttgttataaataagctgcataatcaataaatagaacaagggactttttgttgataatccaaatactcaaagtttacgtaatgaaaattatagcgtgtgtgcaaactcttgagggttgattatgctgcaatttagcatgttggaacgtctagggagaaggttgactttttgcacttctgtatatagtcaaaagagagaaacctgtataatagtaagatcttattttgaataaaaacgtctataattacaaggagttttgttaaggctaatacaatgacagactgagcaaaattgcttgcaaaagtggcacagagttagcactccataccccttcaaacatgttgctttgctttcttgtggacagcttgtagtttgccaggattttttcagctggaaagatacgccatcctttcaaaccctcatgactgacaaaaactccatggggccaaatctgcctgaagatcattaccaaaaatagcaggtacttctaccattaaggtgaaatcatggatcagatattccttacatttttcaaaactactgcatgtttaaaacttcaacaaaaaaagagagaaagaactatactaagaacatatattattcagatcagtttctgccaatttcagtggtttattgttcacaaaaaaatcttcaaaacaagtattgactttcacaaaatttaaatcataaacaggcaaaccaaacagcacactgtagctatagttgttatgtgattgttttttaattgctgtaggatcctgttctttcagcaggtgaaaaataaaacgcagttcaaatttcatggttttaattttcaactcagaagcactcaaaaatgcaaaatgtgataatgggcacttgtttaaaagaattagtgtatccagccttcactccagctggttaaaaatgttgcacttatcagcaaccctaccactttcatctgctgaaaggacaaatgtgcttggttttactattatgtaatcacaacttactttctgcttgtagttgcttaaaattatgtattttgtcttgggctgcaatttgttttatgcttattttattattactgcagtagttgactttgctgtatggaaaaataaagtgaaattgccctaataaaacttctctttcttaagtatattcgtgta

SEQ ID NO: 6012 - DNA, 2731 bp, Homo sapiens
attatttcttccatgttattgttttcagaccacattttgttgcatatttgctagtactaatcagtcaaagggcaccattctttttttttttttttgaaaccaaagctgtctcagaaatggccaatttaactttacagtaacaatagacagcacaacacaaactctctcaatacagataaactcattcttactggagatatatatataatagatatatataaaattattttaatgcattgtagtgtaatatttatgcatactatactgtataacatgttattcaaaagggattgccatttctgagacacagtaacaaaaaaatgaggaaattattttgcttctatttatagcctctgtcaaaagtcaaaagactataaatgctttgcaaaaatggtttcacgtttgcttaaatgcttcatcacagtcacattcaaaatagtgactctaaacaaagaagaaagcagcactgtcatcagatgcatgataaaccaaaatatgaaaatgggaaatgtttaattaacctagtaattgggtgggttaagtacatgggtgaattttatatgtgatttttgttttgttttgttttgttcagattaactgcttatagccttagaaagccttttacaaaattaaaaaaaaaatagatgtgcattcagtttttaagaatggaatcatccaaaggaattcctttttttgaggtttggatgttgcagctagtaaaggatatttttgctctgttcagcagttctaaaaattgctgaagtaggggccaggtcactggtagttatagtatggaatgggagaagtgaaagttcagttatagaactttccatacttccaagtttactgcaagtttttatgcttgagagagatgctttctaatataagactgatgtgttgattttactgattgtactgtacatctattaaagccttagattattacattacgggttggaacccataccaatgtaatttcaatcgtgttaagaaagtaatggtgacttcacatgttattgtagttagttacattatagaatattacttatttttcttgttaaaatgtagtttttcatttcctacatttattagattttcatttttctattaacaattgaataccatttcagtttatagacttgttttattagattttaccaatgaatttttcaaaatacaaaaaaaagtagtttttccttcataacatactcagttttgaattacatgtagtgtcacatgaatattcgtattgttaactaaatgatttatattttactgatttaatattacagtgtaagaatgtcagtcattgttagttcttgtctagttttcattaaaagaacaaagatcttttatatggatatcttataaatatataatcattgctaagtaagaagttaagttgttgctatcgcaacaatcctggcagacaattgagtaatattttgatgatttattttgtttgtaattagttattataagaagatctagatcctagatattagaataaaatttattttctactgtatccatttcaaatgttaaaatattgtttaatatttttgaaatccctgagtatcaggccttgttataaataagctgcataatcaataaatagaacaagggactttttgttgataatccaaatactcaaagtttacgtaatgaaaattatagcgtgtgtgcaaactcttgagggttgattatgctgcaatttagcatgttggaacgtctagggagaaggttgactttttgcacttctgtatatagtcaaaagagagaaacctgtatattagtaagatcttattttgaataaaacgtctttaatacaaggagttttggtaaggctaatacaatgacagactgagcaaaatgccttgcaaaagtgggcacagagttagcactccataccccttccaaacatggtgctttgctttcttgtggcagcttggagttggccaggattttttcagctgaaaagatacgccatcctttcaaaccctcatgactgacaaaaactccatggggccaaatctgcctgaagatcattaccaaaaatagcaggtacttctaccattaaggtgaaatcatggatcagatattccttacatttttcaaaactactgcatgtttaaaacttcaacaaaaaaagagagaaagaactatactaagaacatatattattcagatcagtttctgccaatttcagtggtttattgttcacaaaaaaatcttcaaaacaagtattgactttcacaaaatttaaatcataaacaggcaaaccaaacagcacactgtagctatagttgttatgtgattgttttttaattgctgtaggatcctgttctttcagcaggtgaaaaataaaacgcagctcaaatttcatggttttaattttcaactcagaagcactcaaaaatgcaaaatgtgataatgggcacttgtttaaaagaattagggtatccagccttcactccagctggttaaaaatgttgcacttatcagcaaccctaccactttcatctgctgaaaggacaaatgtgcttggttttactattatgtaatcacaacttactttctgcttgtagttgcttaaacttatgtattttgtcttgggctgcaatttgttttatgcttattttattattactgcagtagttgactttgctgtatggaaaaataaagtgaaattgccctaataaaacttctctttcttaagtatattcgtgta

SEQ ID NO: 6013 - DNA, 12390 bp, Homo sapiens
cacatttctcagaagcacaccattctgctctgcaaatatctttgtaggagaaattggaaattgacaaatacattcacttaaattttgctttgtgctgaaaattgaggaaaaatttaaattggccatttgcacattattagtagtaaatcaacccatgtaaagatggaaactatggtcatttcaaaagtgattttcatttttggtaagtgggtcctacagcattatgtcctcatatttgtgagttattgcaccctggctagtattttcattgctgccttatgtttatttgctgcaaatccctctcaaaactgtgtgcattggttataatgctaatgaggaagataattcaaactaaaattcaaatcataatagctttaggattttagagagatagtataaggttaactcattttcagcatgtgcagacttaattatgcatgggatgaaatacagtaggcaagtctcagcctaataataaataattgaaaaatataacctgtacaatatttaaactggctttaatattacttaattatcacattattctttttcattcatcatttcttttccaattctctcaccctaccattaagacagtaatgattttataagatgtagatccggtattaagttttgcttgctctactgtctcaaattattataacttctttgttattactggcttgtttctgtttgtctttcacaagtctttgactcagtagtagtagcaaatgacagagatcttcaagtgtcttaatgcttgtcaatataatattattccacttgataggatgtgtccccagatacattacagagtttaatcgttgatcactctgcccacagtctaattgtgataacaaactaatcgcagctgttacagagatgccagttaagtaatccgtgtttcagctgagtttctcaatggcagctttattttatagggccatctctgacgagattcatttggcagatatttttctaacaaatgttcgtcccagatgctgctagtatttaaacaggatatgctaagatttagatagaaatataaaatccttggatattttaaaacctagaattctaaaataatcccatagaaagaacagtagttctgcatatgggaaagtgccttgtacttggtaaaataagttaaattttcaatatttacatgtcaaagagaacaaggactatctatatatgcaacatttatttttgcttatcatggttgaacaattgtcagcatcagtgctaacaccccatatgtgatgtatgtattttcactctctcccactcaaggtttttattgaactctaattagcagtttcttgcgtgtgaaattttgtagaacatttgctactcccagaagtcttgaaggtctaaaccagcaatgaaaaccactctgatttcctagatactgtgaagtaaaccaatttgatacttataagaaattatattcccccttaatgcttttcctacattttaatttcaaactaaggaaaggcacaaatttcacttttttatgtataatttattgcttggcatccctccaaatacaaatcctgtatgaataattacaacccctttcatgtttatatggttgctgctacaatgaacaggaaaataaagcaaaaggaatgaaaatgaatgtttgggtttcattatattgttaagtcagttttgtacattgaattatttagtatttaataataaatatctttagtaagttaatatgtgcctgatataaagaaaatgttaaggcattcataagttaaagtcagaaatagcaaaacgaccagatggttagtaatcagattaaaacaaaacagattacaatattatttttaaaagaattaagtggatttaaattacttccaaaatacttttgtttataggcaacaattaagagaaacaaagtgtaccagcacacagttaaactggcttttattcttcacttgagactagttctaattgatcactgtgctattgtatgatttgattgtgctgacagttacatgccactgttcccataataacaatttttcttctttgttcaaatgaattttctaattacacgtgtgatgggatgttttaattcttttcccttttcaaatccaccttcctgttgcaatgcatgatgggcaggctcaatattgtgcatgacacccgctacaagtgttggtaggtgccagctttgtttcttgattatcttaaacctatggtgtacctcacagcccctcaaaatccactgctaagtttaacttatatctattgggcaagtccatttcccttttactaacacttgtcaattaaatgccattttctgtttaattgacatggactcacataagtgttttctttacacacaacagtttcctttagtcacctttggtggattttgattggactatgagttctggtgtgtaaaaaaaatctatttcataaaagtaatatactgtatatttttataatagtaaatgagaaaaaaatactttcattcaaacagataactgtatatatgaagtaaatacttgtattttgacttagattttgaatgtctgactatgaacactatataaaattcttgtttttgacttagcatattaagcctgtttgtgtcaattttcttgatttgatggtaacaagcttttttcccccttttttttctctttcatccctcctccccttctctccttggaatgttgtcctgctttgcgctgtgattgcatgtcactcgctggtgatgatgtcctgtcacatggcttattgctgtgataaataccatgcccaattatctcttccatgttgccatggtttccatattgctacactcttctgtatgttcgcttatatgattttccctccgaaagttcccatggtgcacggtgctacgccagccactgtgtccgcagcaacaacatctgccacaagtgttcccttcgctgcaacagccacagccaaccaggtttgctaatttacagctttgtttcttaaaaaacaactctaatagggctcaatccaacagcccttacgcacgtggatttcccattgaggtcagtgggaatcgtgtgtacgtgagggctgtagagggtgctttaataagcatggggtttcaaagatacctcttgttggcctacacattctctctatgatgagcagcagaatgcttttatgccatttataagtgctccaaagtcgtcgcagctccatttctgaagctactaaaatgatatttacacaagcaattctcaattggtttcaaccaatcgtgcaggtattttgaccaatcaaaaatagaggccattttaaggtttttatttaaaatatttggtatatacagtttcttagttcttgcctaaatgattaatagaaagtaaaatacttaaatgtattacgtatgccacaaatgaccactcttgtaaataagtttgttataaattcattataatctgaatcatttaatgagcagattcaaaataaattgtttgcatgtagcatttctaagcttttattctcaatgctttcagtgaaagaaaaatcctaagcgctcttatttttataattaccctgcataaatgttggagatttatgaaggaaaagaaaagaaattaagtatggcaaattgacagtcattctgtattccatgcaaatttattgcaggatacttttaagtgaaagggatttgtttcataaatttaaattttatgatatacaataataactatttaaaaataaatgatgatttaaaatatttaaaatttaaaaattggacatttattcacccagcattttctgattctacttaaaaatattttctagaaaatactggttgatttcaagtttcatttatgtagatttgggcttcaatagagttgatagtgtatgaaaaacatagagccaagccacatttcagataatccacagaggaagattaaaggtagccaaatgaatctcaaaagaatgagtgtcagatgaaaatgaacatgttcccccttgggaagggaagaccaattaagacatagatttgttgttattactgtgaggagtagccacccttgttctataatacatcacgtactgttgatgaagaacattcagctattagtacagccattaaaaactttcaaaatcagaacacaaaaatgaatttaacgtttcagtcaagctttaaacatttcttggcaaagaatcattaatttttcagaagcttgtcaaaatacccctggtttacatgaacacgtcagactcatttacagaaatgctagattgtgcatatgtggcatgttaataagtaacctttggtagaactattatgatggattcaattcaatccatctatggtgcaaatcaatgataaagaactctcatgcgtctaccatgtatgactgtagaattgctggtgtaagcagaactatagcagagcaaatttcaacatgcccttggccacctgggttgtaggggacactttactttttgcattgtgctgtgaccatttcatgcataatcttggatcttcatactatttgacaaccaaaagaaagaaaagggaatggatatatatatacacacatatattatatctacatatacatacatatgtatatgcctacagtacattagcaatgctggaaatagctgatgccacaaaatgcagcctgcatgcatgcagaagtttatagcctggcccttcatctgcatcgattggtgttgaaggtccttggtatgtttcgacagccccatccttgatgcttctacactgttgggtgcaacatcctgtcctgcagcagcaggaaaaatggtatgagaagcttcattatgcttggagcacattttcgtgccatttgccaatgctgtaaaattgtgtaaaaatgtcagctgagaactggaaataaaacagggacatattaatatacacgccagactgtggattgtagtatgttgaattagcctaagatgtctaaattgaaagaacagcaacaaaatgcctttgtgtatctgatttcattattctcccaacaacattgctgaaatgggattagtatcattttatagaagagacttaagcatagagtaatgagttgctttgctcagggtcacacagccagtaaatggatctctggggctagcacccgtgtcatcagtcctctgacagtctcaatccattgtgctgcctctctcaggttagcaggcattaatttcaggttgaagaatcaagctacaaatccgaagttcttaactttgggaactattgaaataagtcaactctatattggtttcttattgtattttctctcaagttctctaattctcttgcccatttaaaatacaataaaaggtgtcatcaggattcagaaatatgttctgaagtaaacttaggctcttacctagttcttttgaattactgctttataattcttacctggtatttttaatttggaaaaaaaaagttagacaccctaatttgaacgaaaatgttagaaatttggttgcacaaaaataggcaagacatttccttatctgatttctggatgattactaagtaactgaaaccacgggggtgcgtgtgtgtgtgtgtgtgtaggccaacaaaaagggcttctttcaattactgctctgcatgaatttttgatagttttacttatttcctaaaagctggtaacatttatagaatagtatttaacatgaagattttaaagttagttgctactttggcatttaagtttacattaacttactgttatgttgaccagataaggactatcacctcacagctgaatttcacttttctttaaaaatttaatattaaaatgttttcatctcttaattgttggcttgcttgcatggatcattcattaaataattttttatttgctagatacccataatatctgccgaacatctgactagccacaagtatgttacccagatgtagaattttcatcactaaacagtaagttcattatgtaatatatagttgcatatttgtggtggttttttttaagatagcaattgtatagtgcacttaaaattttgcgaaatctctgagaaaatatatacagatcacatttttatcttaaatgggtgtgaggaattttatcagacatctttataacaaatatgttaatatcacttaaatatacaaagtactaagagaaaataaattttttaaatttctgattagagataaacacagcataaagaaaatgtatgaccaaaaagtaattagaaggtgtagatcaagggttggcaaactttcttatagggtcagacagtaagtatttttgctgtgtgggccgtatcgtttctgttgcagctactctcctctgccattgtatcatgaaagcagccagagaccacatgtaaacaaatgggtgtagctgtgttccagtaaaactttatttacaaaaacaggcagtacatcacatctggcccacaggcagtagtttggctgacctctggtgtagattatcacttttttttttttttttcattctttggctaaaccttaaatgggaccatgtacttacttcatcccatgcaccaccatacacaggggcattagaatgtaatgagtttggctaagcgtgggtggctcacacttgtaatccaagcactttgggaggccaaggtgggtggattgcttgagcccaggaatttaagactagcctaggcaacatggtcaaaccctgtcctacaaaaaatacaaaaaaatcagctgggtatggtagcacactctgtagttccagctactagggaggctaaagtgggaggatcacttgagcccaggaggttgaggctgcaatgagctgtgattgcgccactgcactccagcctgggcaacagagcaagacctgtctcaaaaaaaaaaaaatgtagtgagtctgactttaaataaatatatacacataatcaaatatatgtgtacacacaaatctacatattcaaatgaatcttagttactttaaagtagttacctcagaggatcatataattctgaaaatgttgccattgccacattttaaaaatggtttgaaagtcttgtattttgtctttaaaaacactgtggtggtggggtcgggggaggggggagggatagcattgggagatatacctaatgctagatgacacgttagtgggtgcagcgcaccagcatggcacatgtatacatatgtaactaacctgcacaatgtgcacatgtaccctaaaacttaaagtataaaaaaaaaaacaaaaaaaaaaaccactgtcttaaatacttaaaaaggtgtccatttttcatccataggaatatgttttgtccagtatgcatgcattcaagttataacatgtgctcagatgcttgttatttatttttatatttagaaagagacattacatttaaaactgaaattggttaagatgggtgaccattctttgttgcttcctttatttatttattaacatatttacaaatgagtttttggtgctactttgtgttagttaccatggcaaggagataaaggtaaatagataataagataaagatgtaaggaatttcaggataatatagtaaaataagagaggtttgaagaaatttctcttagagcaaagatgaaggagcagctgttcccaacaggatccgtaaacaaatgaatgtggacaatgaaggtgttgttctaaagagaatggaggtgtaaaggccttgtaaaagaaggacagtgtgccaagtcaggaaacgatgatggctgagaaccaactcagaaacccttgtgatgttaatctgtagcaaagctggacaaagtcaaagcccatgcaggagaacaggcagaattcaatagccatttaagaaagaaatgagaggctcaactggagaagtactgccaaagatatgctgcaatcgtgaattattaaaattgatttttgtctatttcataagttttctcaaagcagttctgataaaaaggttcagattctgaacaatagccacatttgtagaagaagaggcattactttgcagtgttgtaggtttagaagaagaggtttttttgacatgccagaaaaatctgtttcaagctcttatagtcaattaggtgtgtttggtatgtatatatttaactaaattctgtttcttagcaataatccaggttgaaaaaaatttctaaaaataattagcaaaccagtagttttgtctgtattgaagctaagcttttaatgttctgttcatttaacaaatgattgctcatcttcatgaggagttgcaacatttaaactggtttttgagtcactagattatgatttctttcattttcaaggttgtattgtgaagcatacttttaatatatgtaaatattcgctgctgagaacaaatttcatgtaaaaactggaactgttaatccacaagtacattgtaatgtctattacagcttaattcatgagtaataattctgtaattcaaaaagaatgatttttattttcttagttttaggtgaaaaaagttcaacaaactgaattacccaaagccatcacttaaagtatcattctttttttttcaaacatgcattatgctaatcaagcacccaaaaagaataaatcttgtttaatagaacatattacatgaattttaattttgtagaccagacctttactcttgaaaccttattaaacttcagaaaagaagtttaaattttgccctacaacaattgtgctaaaaaagagctctgtatattaggccccctgattctgcaaatgtattttatacttttagtttaggattggtaaattttggagcacattctacagttttattaaattgtacgtgttatttcattcgtgtagagatgatagacaaattttgatctgtctactcttgtaaaatggtttttgtttttatatgaagatataatgtaaatatactggttaatcaaaaagaaaattttcatattaaatgtatattagaaactgcttttagatattacctgttctaacaaagcttatctctttttcccttgtagatcatgctaaagaggaaaggacagtgtgcttggttagagtaaaggacgaggtcattagccatattgtatatatcgtcaagcaacacacacaaaagttcctcagccacaagacatccacatattgcatgttaaccagaagaaaagacaacattttccggaaatccactgcacactgttgcctatacactttgtacatttaattgatatttgtgctgaggtgatattcctgtctaaaagaacaacattgtctttcttttctagcacagagttatgcattcaaagatgcatacctagttagtttcctatatattcatgccatcttgaaaagacagactatggtgtaaccatgattctattatgtattggtacgtctgtagaccaagatataattttttaaaaataagtttatttctttcaaggtttacaaataacaaaggtgcaccttgtatttaaaattgccattatagatgagagcgtgcatgcacagtcatttttgtttaagagtaatatttttaatgtaatagattgtaagacgtggtgagggagggatctgacagagatgaatgtgccaagcaaaaccacaactgtgtatattttaaagcacatcatggctttaagtaccatgttgttaaggattctcatgaagtgccatagactgtacatcaaattagagtattatttcttcagtgttattgttttcagagccacattttgttgcatatttgctagtactaatcagtcaaagggcaccattctttttttttttttttgaaaccaaagctgtctcagaaatggccaatttaactttacagtaacaatagacagcacaacacaaactctctcaatacagataaactcacacatactggagatatatatataatagatatatataaaattattttaatgcattgtagtgtaatatttatgcatactatactgtataacatgttattcaaaagggattgccatttctgagacacagtaacaaaaaaatgaggaaattattttgcttctatttatagcctctgtcaaaagtcaaaagactataaatgctttgcaaaaatggtttcacgtttgcttaaatgcttcatcacagtcacattcaaaatagtgactctaaacaaagaagaaagcagcactgtcatcagatgcatgataaaccaaaatatgaaaatgggaaatgtttaattaacctagtaattgggtgggttaagtacatgggtgaattttatatgtgatttttgttttgttttgttttgttcagattaactgcttatagccttagaaagccttttacaaaattaaaaaaaaaatagatgtgcattcagtttttaagaatggaatcatccaaaggaattcctttttttgaggtttggatgttgcagctagtaaaggatatttttgctctgttcagcagttctaaaaattgctgaagtaggggccaggtcactggtagttatagtatggaatgggagaagtgaaagttcagttatagaactttccatacttccaagtttactgcaagtttttatgcttgagagagatgctttctaatataagactgatgtgttgattttactgattgtactgtacatctattaaagccttagattattacattacgggttggaacccataccaatgtaatttcaatcgtgttaagaaagtaatggtgacttcacatgttattgtagttagttacattatagaatattacttatttttcttgttaaaatgtagtttttcatttcctacatttattagattttcattttctattaacaattgaataccatttcagtttatagacttgttttattagattttaccaatgaatttttcaaaatacaaaaaaaagtagtttttccttcataacatactcagttttgaattacatgtagtgtcacatgaatattcgtattgttaactaaatgatttatattttactgatttaatattacagtgtaagaatgtcagtcattgttagttcttgtctagttttcattaaaagaacaaagatcttttatatggatatcttataaatatataatcattgctaagtaagaagttaagttgttgctatcgcaacaatcctggcagacaattgagtaatattttgatgatttattttgtttgtaattagttattataagaagatctagatcctagatattagaataaaatttattttctactgtatccatttcaaatgttaaaatattgtttaatatttttgaaatccctgagtatcaggccttgttataaataagctgcataatcaataaatagaacaagggactttttgttgataatccaaatactcaaagtttacgtaatgaaaattatagcgtgtgtgcaaactcttgagggttgattatgctgcaatttagcatgttggaacgtctagggagaaggttgactttttgcacttctgtatatagtcaaaagagagaaacctgtataatagtaagatcttattttgaataaaaacgtctataattacaaggagttttgttaaggctaatacaatgacagactgagcaaaattgcttgcaaaagtggcacagagttagcactccataccccttcaaacatgttgctttgctttcttgtggacagcttgtagtttgccaggattttttcagctggaaagatacgccatcctttcaaaccctcatgactgacaaaaactccatggggccaaatctgcctgaagatcattaccaaaaatagcaggtacttctaccattaaggtgaaatcatggatcagatattccttacatttttcaaaactactgcatgtttaaaacttcaacaaaaaaagagagaaagaactatactaagaacatatattattcagatcagtttctgccaatttcagtggtttattgttcacaaaaaaatcttcaaaacaagtattgactttcacaaaatttaaatcataaacaggcaaaccaaacagcacactgtagctatagttgttatgtgattgttttttaattgctgtaggatcctgttctttcagcaggtgaaaaataaaacgcagttcaaatttcatggttttaattttcaactcagaagcactcaaaaatgcaaaatgtgataatgggcacttgtttaaaagaattagtgtatccagccttcactccagctggttaaaaatgttgcacttatcagcaaccctaccactttcatctgctgaaaggacaaatgtgcttggttttactattatgtaatcacaacttactttctgcttgtagttgcttaaaattatgtattttgtcttgggctgcaatttgttttatgcttattttattattactgcagtagttgactttgctgtatggaaaaataaagtgaaattgccctaataaaacttctctttcttaagtatattcgtgta

SEQ ID NO: 6014 - DNA, 392 bp, Homo sapiens
tagtgatattttggaaatcttttcattgaaaaaatgcataactaaaagtccttgtaacttttgcaatactttaaatgaaactgtattttgttaatcacaacagcatatacatgcatctgaaaaattattttcagaagagttattattacaacgcccactaggagtcctcagctcacagaatgggactctgttagaagtcattcgtttttcatttggagaacaaaatcgtttgctagagctattacttcatcacatacccttggtactcatggaatttaaactttgaaatgatactaaaggtcagtgatgtagcaatctattatttcactgagacatacttttgaatgcctgtatgaatgctttcatacaggaagtagtcactaaagcactgg

SEQ ID NO: 6015 - DNA, 2533 bp, Homo sapiens
cacatttctcagaagcacaccattctgctctgcaaatatctttgtaggagaaattggaaattgacaaatacattcacttaaattttgctttgtgctgaaaattgaggaaaaatttaaattggccatttgcacattattagtagtaaatcaacccatgtaaagatggaaactatggtcatttcaaaagtgattttcatttttggtaagtgggtcctacagcattatgtcctcatatttgtgagttattgcaccctggctagtattttcattgctgccttatgtttatttgctgcaaatccctctcaaaactgtgtgcattggttataatgctaatgaggaagataattcaaactaaaattcaaatcataatagctttaggattttagagagatagtataaggttaactcattttcagcatgtgcagacttaattatgcatgggatgaaatacagtaggcaagtctcagcctaataataaataattgaaaaatataacctgtacaatatttaaactggctttaatattacttaattatcacattattctttttcattcatcatttcttttccaattctctcaccctaccattaagacagtaatgattttataagatgtagatccggtattaagttttgcttgctctactgtctcaaattattataacttctttgttattactggcttgtttctgtttgtctttcacaagtctttgactcagtagtagtagcaaatgacagagatcttcaagtgtcttaatgcttgtcaatataatattattccacttgataggatgtgtccccagatacattacagagtttaatcgttgatcactctgcccacagtctaattgtgataacaaactaatcgcagctgttacagagatgccagttaagtaatccgtgtttcagctgagtttctcaatggcagctttattttatagggccatctctgacgagattcatttggcagatatttttctaacaaatgttcgtcccagatgctgctagtatttaaacaggatatgctaagatttagatagaaatataaaatccttggatattttaaaacctagaattctaaaataatcccatagaaagaacagtagttctgcatatgggaaagtgccttgtacttggtaaaataagttaaattttcaatatttacatgtcaaagagaacaaggactatctatatatgcaacatttatttttgcttatcatggttgaacaattgtcagcatcagtgctaacaccccatatgtgatgtatgtattttcactctctcccactcaaggtttttattgaactctaattagcagtttcttgcgtgtgaaattttgtagaacatttgctactcccagaagtcttgaaggtctaaaccagcaatgaaaaccactctgatttcctagatactgtgaagtaaaccaatttgatacttataagaaattatattcccccttaatgcttttcctacattttaatttcaaactaaggaaaggcacaaatttcacttttttatgtataatttattgcttggcatccctccaaatacaaatcctgtatgaataattacaacccctttcatgtttatatggttgctgctacaatgaacaggaaaataaagcaaaaggaatgaaaatgaatgtttgggtttcattatattgttaagtcagttttgtacattgaattatttagtatttaataataaatatctttagtaagttaatatgtgcctgatataaagaaaatgttaaggcattcataagttaaagtcagaaatagcaaaacgaccagatggttagtaatcagattaaaacaaaacaaattacaatattatttttaaaagaattaagtggatttaaattacttccaaaatacttttgtttataggcaacaattaagagaaacaaagtgtaccagcacacagttaaactggcttttattcttcacttgagactagttctaattgatcactgtgctattgtatgatttgattgtgctgacagttacatgccactgttcccataataacaatttttcttctttgttcaaatgaattttctaattacacgtgtgatgggatgttttaattcttttcccttttcaaatccaccttcctgttgcaatgcatgatgggcaggctcaatattgtgcatgacacccgctacaagtgttggtaggtgccagctttgtttcttgattatcttaaacctatggtgtacctcacagcccctcaaaatccactgctaagtttaacttatatctattgggcaagtccatttcccttttactaacacttgtcaattaaatgccattttctgtttaattgacatggactcacataagtgttttctttacacacaacagtttcctttagtcacctttggtggattttgattggactatgagttctggtgtgtaaaaaaaatctatttcataaaagtaatatactgtatatttttataatagtaaatgagaaaaaaatactttcattcaaacagataactgtatatatgaagtaaatacttgtattt

SEQ ID NO: 6016 - DNA, 392 bp, Homo sapiens; identical to SEQ ID NO: 6014

SEQ ID NO: 6017 - DNA, 2529 bp, Homo sapiens
cacatttctcagaagcacaccattctgctctgcaaatatctttgtaggagaaattggaaattgacaaatacattcacttaaattttgctttgtgctgaaaattgaggaaaaatttaaattggccatttgcacattattagtagtaaatcaacccatgtaaagatggaaactatggtcatttcaaaagtgattttcatttttggtaagtgggtcctacagcattatgtcctcatatttgtgagttattgcaccctggctagtattttcattgctgccttatgtttatttgctgcaaatccctctcaaaactgtgtgcattggttataatgctaatgaggaagataattcaaactaaaattcaaatcataatagctttaggattttagagagatagtataaggttaactcattttcagcatgtgcagacttaattatgcatgggatgaaatacagtaggcaagtctcagcctaataataaataattgaaaaatataacctgtacaatatttaaactggctttaatattacttaattatcacattattctttttcattcatcatttcttttccaattctctcaccctaccattaagacagtaatgattttataagatgtagatccggtattaagttttgcttgctctactgtctcaaattattataacttctttgttattactggcttgtttctgtttgtctttcacaagtctttgactcagtagtagtagcaaatgacagagatcttcaagtgtcttaatgcttgtcaatataatattattccacttgataggatgtgtccccagatacattacagagtttaatcgttgatcactctgcccacagtctaattgtgataacaaactaatcgcagctgttacagagatgccagttaagtaatccgtgtttcagctgagtttctcaatggcagctttattttatagggccatctctgacgagattcatttggcagatatttttctaacaaatgttcgtcccagatgctgctagtatttaaacaggatatgctaagatttagatagaaatataaaatccttggatatttaaaacctagaattgttagataatcccatagaaagtacagtagttctgcatatgggaaagtgccttgtacttggtaaaataagttaaattttcaatatttacatgtcaaagagaacaaggactatctatatatgcaacatttatttttgcttatcatggttgaacaattgtcagcatcagtgctaacaccccatatgtgatgtatgtattttcactctctcccactcaaggtttttattgaactctaattagcagtttcttgcgtgtgaaattttgtagaacatttgctactcccagaagtcttgaaggtctaaaccagcaatgaaaaccactctgatttcctagatactgtgaagtaaaccaatttgatacttataagaaattatattcccccttaatgcttttcctacattttaatttcaaactaaggaaaggcacaaatttcacttttttatgtataatttattgcttggcatccctccaaatacaaatcctgtatgaataattacaacccctttcatgtttatatggttgctgctacaatgaacaggaaaataaagcaaaaggaatgaaaatgaatgtttgggtttcattatattgttaagtcagttttgtacattgaattatttagtatttaataataaatatctttagtaagttaatatgtgcctgatataaagaaaatgttaaggcattcataagttaaagtcagaaatagcaaacgaccagatgttagtatcagattaaaacaaaacagattcaatatttttttttaaaagaattaagtggatttaaattacttccaaaatacttttgtttataggcaacaattaagagaaacaaagtgtaccagcacacagttaaactggcttttattcttcacttgagactagttctaattgatcactgtgctattgtatgatttgattgtgctgacagttacatgccactgttcccataataacaatttttcttctttgttcaaatgaattttctaattacacgtgtgatgggatgttttaattcttttcccttttcaaatccaccttcctgttgcaatgcatgatgggcaggctcaatattgtgcatgacacccgctacaagtgttggtaggtgccagctttgtttcttgattatcttaaacctatggtgtacctcacagcccctcaaaatccactgctaagtttaacttatatctattgggcaagtccatttcccttttactaacacttgtcaattaaatgccattttctgtttaattgacatggactcacataagtgttttctttacacacaacagtttcctttagtcacctttggtggattttgattggactatgagttctggtgtgtaaaaaaaatctatttcataaaagtaatatactgtatatttttataatagtaaatgagaaaaaaatactttcattcaaacagataactgtatatatgaagtaaatacttgtattt

SEQ ID NO: 6018 - DNA, 392 bp, Homo sapiens; identical to SEQ ID NO: 6014

SEQ ID NO: 6019 - DNA, 392 bp, Homo sapiens; identical to SEQ ID NO: 6014

SEQ ID NO: 6020 - DNA, 1710 bp, Homo sapiens
aagcatcattcaaccatacatccatccatcctcctatcattctgttctcccctttcctttcctctctttatccttttttccttcctcccttcctctgtccttcagttttccatccatctattcatccccccatttatctatccacccatctttccatttattcagtcaataaacattgattgtatgccacatggtataccagtatttatgtgaaggattgcaaactgatagctcaagggtaaaatctagtatctagaaatatttttgtttaagagtgtttaaatgaaaactaaatgtaaatcctttagataggacacatactgtacccttcagttccaaacgctacaattccctattgccttaggccaggttgtttcagatattttgttcaaaagagctacgttttattgaatggttgctcttgttccctgctgcactgagtgctttgcctacattatctcattttttttcacaacgcccagaaggttggcattaatattttcattttacgaatgagtaatttggagcctagtaaggtacagtgatttgtcccaagttaaatggcttttgtaaggtttagatttaagtacaacttgaactcaagtcaggctgacttggttagtctctcaatatctattacacgaagaccttaaaaatgatttgggagagtggaagtagcccttactgaacacctaactccatggtgtttcacaccttccacctcatttaaagataaatataagtattaggttaaattcatattgaagttttgtcttttcaaatttcgatatatacttgttttaaccttcccctttcaggaccagattgattatttgtagatattatgcataatttaggatctatttatgttatatatatgagttttcactcatgaaattacggcgtgtaagaaataccactttcctttacaccatttcttttttcgttgaaattaagtctagctctgaactgtgatctctatctccctgggttgagagaaataacaggcattactgggaatccaggactacatgccccagctccctctctttcctgaccttacctcaatgtgaggtcctgtacagtctagtattctcagacaggctatgcattcttcatgcttcagtcaccgctgctcactgctgatgtgatcattgtctatgcttgcaagagctcttaagacaggtactccaggggttctgtgcttgccttggatataggcttccttgtctatgccctccaggctcccatgcccttgaggacctgatgtctgcagggctattgtgaaagaacaggctacctacccagctacctgtggagctgcacactgcctgccacttcaatcttgaggaatttttttctctgccctccatcaccatttttgcttacctaccatcttcagaatcacacctcttgtctccctctctagcatatctccctcaatcagtgttggcttatgagttttaacagttctgaaaatacatttactttaaacaacttctattttggcttgtattacaactctaccaagaataaggcaacgaaaggccaggaaactcttaggtggtggtgtaggtctaagggcaggggtaggcagggttgtgtttatgcaaagaagagaaaaagatttgtcacatttagtatcattaatacatataatcatttataattatgtatattaataaattacttataattaataaaaataaa

SEQ ID NO: 6021 - DNA, 9525 bp, Homo sapiens; identical to SEQ ID NO: 6010

SEQ ID NO: 6022 - DNA, 9525 bp, Homo sapiens; identical to SEQ ID NO: 6011

SEQ ID NO: 6023 - DNA, 2731 bp, Homo sapiens; identical to SEQ ID NO: 6012

SEQ ID NO: 6024 - DNA, 12390 bp, Homo sapiens; identical to SEQ ID NO: 6013

SEQ ID NO: 6025 - DNA, 392 bp, Homo sapiens; identical to SEQ ID NO: 6014

SEQ ID NO: 6026 - DNA, 2533 bp, Homo sapiens; identical to SEQ ID NO: 6015

SEQ ID NO: 6027 - DNA, 392 bp, Homo sapiens; identical to SEQ ID NO: 6014

SEQ ID NO: 6028 - DNA, 2529 bp, Homo sapiens; identical to SEQ ID NO: 6017

SEQ ID NO: 6029 - DNA, 392 bp, Homo sapiens; identical to SEQ ID NO: 6014

SEQ ID NO: 6030 - DNA, 392 bp, Homo sapiens; identical to SEQ ID NO: 6014

SEQ ID NO: 6031 - DNA, 1710 bp, Homo sapiens; identical to SEQ ID NO: 6020

SEQ ID NO: 6032 - DNA, 17495 bp, Homo sapiens
atcccaggccggggaccgcatcttctttgtgtctgctaaggaggtgctcaacgccaggattcagaaagcccagggcatgcctgaaggaggtaatgatgagaacagatgtcctccttttctctgatgtttgagacattttgtctcgtgctgaggagtctgtcagtagaaaatccttctgagaaggggatgctgagaagagcagagaggctcttgctctttagccagtggcttggtttctggggatttcatcgttttcctctgctgccaagttgtttctggactaatgcagtacaatcctcctagggggcgctctcgcagaaggctttcaagtgaggatgtttgagtttcagaattttgagaggagatttgaggtgagtcctctgattctggtatctggcgattctgtgcctccccagctcccattggctgtgtccctggcagtgaaaaccagagtctggcccttggttgtaggcccctggtggcccccacctccctccgtgcctctgtgtgttccaggagtgcatctcccagtctgcagtgaagaccaagtttgagcagcacacggtccgggccaagcagattgcagaggcggttcgactcatcatggactccctgcacatggcggctcgggagcagcagtaagagtccaagactgcagataggtggagagagctgccgagacaagggtgctccacccctgccttgggcagttaggacacgccttgatggcagggctgagtctctgggctcccatccagagccctttccctggccaccagaccatgttagaaccacatagacagcctggtgaggagggcggctgggtgcttcatcaccccacctggtctgtgcagcacgattccctgtgttggaggtcttggcccatgccctgctgagctctgcagccattctcagagcctgaacacatttttcaaaacaacattccagccaggagcagtgactcacacctgtgatctcaacactttgggagaccaaggcaggaggactgcttgaggccaggagtccagcccagataacatagtgagatcccatctctacaagaattttaaaaatcagctgggtgtggtggcacacacctgtagttccagctacttgggaggctgaggcaggaggatcactggagcccaggagttcagggttccagtgagctgtgatcgcaccactgcactccagcctgggcaacagagtgagaccctgtcactaaagaataatatgaaaacaccttgcttctatcacacagaattgactttctcagttgtttatgttaagttaaaattttaaaaagttcagttcccttttgattcttttgcacttgtcccagtgtcactctgccctgaggcaccataatcatgaatttacattgttctatcacccaaacagtactttttacataaatgctgaggaatatgtcaggtttttacatgcttcagatgtacagatgtggcatcacactgtctgtcactgtacctggctttgctttctcaacatcgtttttccctctatccttgttagtatgtgtagtttgtttatgaatcggaactgctgtagtatattccattgtgaatatgcctcattttcctatggatggaattttagattttttttttgctattggaaaccctactgcagtggacatttgttcatgtgtccccttgtgcacctttttaagagtcttcctggggtgagttcctaggggtgtggcaattctgttttagggtacacgcgtttccagttttagtcagttttcttgatgctcttcagaacagccgtacccattcattgcatgaccagtactgtccataggccttccatttcatcagccctcaccagaacttcagacctggtcatttttgccaggccttggtagaaaatagtgcctttaaaaatttcatttacaactgggcatggtggctcacgcctgtaatcccaacactttgggaggccaaggcggatggatcacctgaggtcaggagttcaagaccagcctgaccaacacggagaaaccctgtctctgctaaaaatacaaaattagctgggtgtggtggcgcatgcctgtaatcccagctactcgggaggctgaagcaggagaatcgcttgaacccaggaagtggaggttgcagtgagtggagatcgtgccattgcactccagcctgggcaacaagagtgaaactccatctcaaaaaaaaaaaaaaaatcatttctgtgattactagtgaggttgagcttttttccctatattaattggcagaatttgtttaaacccccttaaagcgccctccctgttttgtgcccaccacctgacccacatcgaagactgaagagtgcatggttggctgcagggtcctcttcttacctgggaaggggaaggccatgcccctgggtgcgtgtgtgcagccctgccaggcaagatagcgggcagggcggcgtgggatttctggcatcccctcttgctcctctgcttagtcagacaggaacatggatttctcaccagtactctgctttcagggtttactgcgaggaaatgcgtgaagagcggcaagaccgactgaaatttattgacaaacagctggagctcttggctcaagactataagctgcgaattaagcagattacggaggaagtggagaggcaggtgagaaatgaggaggaggcattctgggaagatttggactccgagtagagtccagaagaaagcagacctcctcctcttagggacttctcagcctttcagaagaaagttgtggccctgtttcaagaatacagagctgccgtttgggttccattgtcgggttgtgtgatgctgggcatgttccctttcctctggacctccacagatcatgtgggcgtttgatcagccagtttcccagaccctctcacttcagaggctttaattccatagaggagctgaggaggctgctggtttgagaggaaggatgtgccatctgctaggatctctcctggtgctgcaggagtgaactttggtcttccttgatacttaacagtgtgcttccttttgctgtaggtgtcgactgcaatggccgaggagatcaggcgcctctctgtactggtggacgattaccagatggacttccacccttctccagtagtcctcaaggtttataagaatgtgagtcatggagcaacaggtcctcttggcaggaggcccccaaaagtgattcaacccctgttggtctgggtcagggccccccagcagtgacagtagaagccacagagacaaggcccaggcttccgtcagccttctggggtcacctggtggatgtggcctgaagggaattttgatggacatgcttctcttaacttccctcttctggtggcaggagctgcaccgccacatagaggaaggactgggtcgaaacatgtctgaccgctgctccacggccatcaccaactccctgcagaccatgcagcaggacatgataggttagtgcccatggggaactgggcagctgtggccctgggctgcccaaagatcagatgcggaggccaagctaaagaaatcaggactttccttatctgtcacttttcatgatgattcaactcgataccttcaggttctgggtacatgttctgaactcattcttgtttgctttttgagacagagtcgcactccgtaacccaggctggagtgcagtggcatgatcttggctcactgcaacctctgccaccgaggttcaagcgattcttctgctccagcgtcccgagtagctgcgactacaggcgtgaccaccacacctggctaatttttttgtatttttagtagagatggggttttgccacgttggccaggctggtctctaactcctgacctcaagtgatctatctgccttggccttccaaagtgctaggattacaggcatgagccaccggccctggccttgtgaactcattctgtacacagggttggggagcccatcttgttctactacatgggtctaccctaggctgagaattgggcctgctcctttaagtccacgtgaggcataagtgttagcagtatggcatctgagtccacacttgcctgggagagctggcctcaagtgaggcatgctcagtctcacgggccaacttgactggggtgtggttcccaggcaaagctgttcagcatccctggcagtagctggtagagccctgtctccaaggcttggtgccgctgtggtgcagggctgagctgataagcttttcctccatttctcttcctgacagatggcttgaaacccctccttcctgtgtctgtgcggagtcagatagacatgctggtcccacgccagtgcttctccctcaactatgacctaaactgtgacaagctgtgtgctgacttccaggaagacattgagttccatttctctctcggatggaccatgctggtgaataggttcctgggccccaagaacagccgtcgggccttgatgggctacaatgaccaggcaagcaaagttcctcacctcaagggcattgtggggggtcagtctgtaccctgcctccagacacgggaaccattctaaaacgggggttccctaaggtcagcagctgtggtggtgtgccccaccacacagtacaccacagacagaatttttgctactgattgacctggatttgttctaagcagtgatatttgtgaaatgacagatgctagtatttttctctaatacacattaaagtaagtatgtaactattaaaaatagacgactttaaaaataaccacctacatacgactattttaaagttcagattttaaaaacattcatctctaaaccacttgagttgtcacatgtactgccctctgtacacatcccacactcggggaagctgccaggcgggtcaggatggctcctgctcacattttgcacgtcccgtggtgctcacctgagggtctcctctgctacatctgaagctagttgtcccctttttgccttttggaaattgaagagccactctgtgtccctgttccccagactagggcaacactgagggttcacgtgaatgagagactcaatacgtccccctcacccctctcatgtttctctcctcaggtccagcgtcccatccctctgacgccagccaaccccagcatgcccccactgccacagggctcgctcacccaggaggagttcatggtttccatggttaccggcctggcctccttgacatccaggacctccatgggcattcttgttgttggaggagtggtcagtgaccagttctgctcgggaaggtgggggcggagggcaggtgggcggggcctgagggctaggttcctgctgtggcccctgcattgggccacactccacagtccactgcatactttctcctctgtgattgcatggggagcgcttactccctcaccaagtttccctcacttcctgctggacatggtcccagaccttctggcctcggtgggatcaaaggagacattgaaagaggaactcagagtagaaacatgaaggctccttggctggggcccttcagatggccctggtagtgatgggccccagaggagggtgggccacagagaggctgcactccaggctgaccatgtgctctgcaggtgtggaaggcagtgggctggcggctcattgccctctcctttgggctctatggcctcctctacgtctatgagcgtctgacctggaccaccaaggccaaggagagggccttcaagcgccagtttgtggagcatgccagcgagaagctgcagcttgtcatcagctacactggctccaactgcagccaccaagtccagcagtgagtggccctgtcggaccccagcaggggacttcctttaggcagggtcagccccatctcccttccccatctctcttcccacgtggcctggaagccactgggtcctaagcatcgtagaccctgggccttcaggtgtgcagggccagctttgaggccagtcatggggagaggggtctcccagggacactttgcgtcttgggctgggacggggtaggcctctgggccccttggtgaggaagaaatgggaaggcaagagatattcctagtaggagttttagaggttgccttgaagagcttgggctgtggatgtagttttgaagtttttgaacccagcctgatcttcgtgcacatcttaggtcaggtgggaatctattgcctaatctggggtggtggggatgaatatcctcgcttccttttttttattgtgtgtggcagaccctttgctctagacattttgcacctaattatttctctgactcttggaggtagatgttgtcttatagccatctcctttttctttctttcttttttttttaattgatcattcttgggtgttttggcagggtcataggacaatagtggagggaaggtcagcagataaacaagtgaacaaaggtctctggttttcctaggcagaggaccctggggccttccgcagtgtttgtgtccctgggtacttgagattagggagtggtgatgactcttgacaagcatgctgccttcaagcatctgtttaacaaagcacaccttgcaccgcccttaatccatttaaccctgagtggacacagcacatgtttcagagagcaccaggttgggggtaaggtcatagatcaacagcatcccaaggcagaagaatttttcttagtacagaacaaaatggagtctcctatgtctacttctttctacacagacacagcaacaatctgatttctctatcttttccccacatttcccccttttctattcgacaaaaccgccatcgtcaccatggcccgttctcaatgagctgttgggtacacctcccagacggggtggtggccgggcagaggggctcctcacttcccagaaggggtggttgggcagaggcgccccccacctcccggatggggcggcggccgggcggaggcgcccccacctccctcccggacggggtggctggccgggcgggggctgaccccccccacctccctcccggacggggcggctggccgggcggggactgaccccccacctcccggacggggcggctgctaggcggagacgcttacttcccagacgggggcggctgcctggcggaggggctcctcacttctcagacggggcggctgccgggcagagacgctcctcacctcctagacggggttgtggctgggcagaggcgctcctcacatcccagacggggtggtggggcagaggcgctccccacttcctagatgggatggcggccgggaagaggtgctcctcacttcccagagtgggcagccgggcagaggggctcctcacatcccagacgatgggcggccaggcagagacgctcctcacttctcagacggggtggcggccgggcagaggctgcaatctcggcactttgggaggccaaggcaggcggctgggaggtggaggttgtagcgagctgagatcatgccactgcctgggcaacattgagcactgagtgaacgagactccatctgcaatcccggcacctcgggaggccgaggctggcagatcactgccggttaggagctggagaccagcgcggccaacacagcgaaaccccatctccaccaaaaaaatacgaaaaccagtcaggcgtggcggcgcgcgcctgcagtcgcaggcactgggcaggttgaggcaggagaatcaggcagggaggttgcagtgagcagagatggcggcagtacagtccagcttcggctcggcatcagagggagaccgtggaaagagagggagagggagaccgtggggagagggagagggagcgggagagggagagggccatctcctttttcaaaatcaagaaactgagatttgaaaaatagtgacgtgtcctctgctactcggctgatgagcagcagagtcaggatctcttgtgcccaaaccagggtgcacagctctgtgctgttgcttctcaggccgtggtgatgctgagtgtgtttggttgttatgattattcagtctcagcagggtgtaggagattctgccaaaccaggcctggctcagggcagagctgctggcagggatatagacaggcccagctgctccctactgtgggtgggctaagccaccagtggcatcttgctccacacaccccaactgggtcccttctctctcctccccagggaactgtctgggacctttgctcatctgtgtcagcaagttgacgtcacccgggagaacctggagcaggaaattgccgccatgaacaagaaaattgaggttcttgactcacttcagagcaaagcaaagctgctcaggtgaggctggcccgtgtggccaaaggttagggctccagggtgcagcccaggcacactggggctcagctgctgggcttgcgtcttgggtgtggacacaaatttttctggtggggatttagctcattcgtgttagatgtgtaccatgggctgggcacggtggctgacgcctataatcccagcactttgggaggctgaggcaggtagatcacctgaggtcaggagtttgagactagcctgaccaacatggtgaaaccccgtctctactaaaaatacaaagattagctggtcgtggtggtgtgtgcttgtaatcccagccactcgacaggctgaggcaggagaatggcttgaacccagaaggcggaggttgcagtgagccgagattatgccattgcactccagcctgggcgacaagagcaaaactctgtctcaaaaagaaaaaaaaaatggatgtgtaccacgtacctcatggatgccagatggtgctggaggctcaacaagacacagcgtcgctgccttcaaggcacttgcagttgaaggcatgatggcatcacagtactgcgagactgcagttcacagcgccctgtgctgaaccgcagggcctacagcgcttaacatgtgctatttcactcagtcttccctatttctccattttctacatagaaatgttggggaacttgtctggcatctcaaaaaatggccaggctaggaggggagcccaggtgtacttggctccagcagcccccgcactctgattctccttacctgccactctttggacccatgaagagggcatagccccccatttacccacagagaagctggttacttggctggggactggcagagctgggattggaactcagatctccatggggtctctgtggagctttcattaataatttgctggaaagaacatcagtctgaggagtctggagtcctgggttctctccagccactcatgtttggcccaagctcttaactctcctgtgtctcattattttcatctgtaaaatgggagtaagatttcatgacacagctgcatgactgaatgtaaaagtgccctgcaaaagtcctcggcctgcccagctcatgataacatcagcacacggggaccctgcagaagtcctcggcctgcctagcccatgatagcatcagcacacggggaccctgcacttcctgccctcgcccctgacgtcagagtctgcagggtggcagagccagaggggagatggatcagagggtgtcagctccaaccctcaccggatcactgggctttccctgccctcgactgcggatgtgccccccccgcacccccacctggggacagctgcttcctagggacacactgcttgccctctggggactctcagaaagggggaatggggggaactgctgcttgtcagccacagtgacacagctgaacctggaaagggtctcctgtcagcacctcaaccccttgcttggcaagcagggaaactgagttcccgacagctcagggacttgcacatggtcctgggtgaaggaaacacagggcttgagaatcagaaaagcctaacttgtagctccctggcttattagccgtgtggccttgggaagttatttaacccctctgggcctccttttccccatctgtgagacagggataaacacgattgttggaggatgatgtaagggtgtgtgtcaagcgtccttaggatggtgcctggcgggtagtcctaatactgcctatcatcagctatcatggttacaaaagaaccatttctttgcaggaataaagccggttggttggacagtgagctcaacatgttcacacaccagtacctgcagcccagcagatagtgggcacctgaggcggagtctgcgtggagaggggcggtgctgccagccctaagtgccatgtgggctcccccaggggcacgtgtggctcctgccccctggccactgccaagagaatgaagcacccagtctcgtaccattttgagccctccagcactacttattttcccccacctttgcctgctgttgctggaagagctggctcatacccccaaaggacactttcagcgacagctatggacagcatggtaccaaggagttaagttgaggctttttccagctttctctggttcatttgattgcttgataaggcctcaggatctcagcattgcacaatgcctcatggaagcctttgagggtatcacacagacacccccaccttcctccagcctgtgcgcacctgccctccttgcagcccagcacacctgcaggtgtaagggacgattggagtttcttcccagagagtctgtcccagaaggactgtggcttgtgtgtgtccatctcgcctgttggctcagtgcttcatcccatttgcagagcctcagacacgtcttggtggtgaggctcagttacccctgggcttaggctgaggcgggccctgtgctgggggtggtagaaaggatgctgctgaggcagctggaggagtgggagtagctcagaggggagggctgttggatgtatggggagctggcagagcaggtggcagtcactgggacaaggagggacttgcctctcttctcattattgtgtcctttgctttagtgtcagtcctggacttgtgcaggcctgttttgtgtagatctgttttggaagatggcatggtctaggtggttgaaggatgtagtagaaggatggatggtggaaggtggggacgttggtggctggctgaggtgcatgggccccacacaggacagctggagaatgggccgtccacttggcctcgttctgcgaggggctcatgggtctgagagcccccacccactaggcttgattgcatccctgttgtgccctttaagagacatgtttccaccccacccccaaccttgtcccaagtgccctggactaaatttcctgtgccagtgactgcagttggccaagggacaatgtggaaaacccagtgtccatctttccaccctccctgatctccagaaccttcgactgacccccttgtctttatgctgatgttgagttttgggattgttactggttgaagtgggggcagatgcctgtcaccaaggtgttgactgtgtgagaaaagcagtttgggtgacaaatcctgtgtggcacaagttggatcgcttcctagaaataagcaacacctctcccaaaaagcagcccacaaggcaggggcccagcagcccagccatcactcatctttgaggaaatgagttggtagcctctgtgcactgtttggtggccacatcacaggtgatgtcctgttcacatacctgcttgtatttaaagccctcagtctgtcctgttgtgtggggcgaagtgatggactctgccaggtggacatgctgtgggtggatgttcccggcgtgtgccgggcctgaatggacaggggccacttcacagcatgtcagggaaaatcactgtcacacaattccaatggattttgtgctctttttgaaaaaaaaaaattctttagcgtaaacatgaattttttttcaatgtagcccctggggaatgaatgaaattttgagcttcttcaatacgtaaaattaaatttataccactgagggagagaccctttctgaaagaagtatggccaaaagcactttaatgctgctgacattgttgtttttatgttcatttgctggagcgcaagacgtgctgacacagtgagttttctctgatgtatttaaggtgatgtatttgcttgagttactcctgtatcattgctcataatattggaaactaaaataaaacctagttggaaatcctttgtgagatctgtctttttgggttcttgtacaaactcctctttgacatggccagctgtattctgaagtgaccataactttggggaagttcccactataatctggctccttattcttggaaggaatttgatactctcaaaagaacagatggtttaactgatctttaaggatcaggaaatcgagactgatttctttacagatttctctgtaactccagaccatttttcacttaaaaagtaaatgactcactgttccatcctgctttgccttctgagaatttggttgccactattcttttttttttttttcttttttgagatggagtcacgctctgtcgcccaggctggagtgcagtggcacgatctcggctcgctgcaagctccgcctcccgggttcaagcagttctctgcctcagcctcccaagcagctgggattacaggcgccgaccaccaggcctggctaattttggtattttagtagagacagggtttcatcatcttggccatactggtctcaaactcctgaccttgtgacccacctgcctcggtctcccaaagtgctggcattacaggtgtgagccaccgcttttttttctttttttttttaagggtcctcaggagtagatacaggggtagtcagtcagtttccccgcccctacagctgtcctcttggctctggtgctgcccagtgtccgccctgctcgcccacagaggccacagctcagctgatagcaacctcatccttccagattcccaggctacacacttggggcatcaccctcgagtccacggtcacacgtgctgcaccaaatctgtcacctgctgtcttccaagtctgttgaccctgcccagtttcctcacctccatcataaccatcagcccggatctaggttcctgttcctgccttgtccccgcctatcctcgccatcttgtggctgtttcaaggcagcagccaaagactttctcaggtaacaaaaaaaaaatgaatcattaccttttttttttttgcaatccacaaaacaagtagtttctgtcattaacaagatgttatgtacaacccactaaattgttcacgacagcatcatcccgggtgatgagccatagtttgaaaaagggccttcttgccttatgcaaatgctgcttagttattcccagtcaaggccagcctcattcctgtgctttctctgactacctcatctgtccactggcgaatctgagaggctggaagttttagccctctggtaacaatgtccctatttaatcacaaaaagtaggtagtcaggaatgttccactgtgtcccaagcactggggtgacagcccaggcagctctctcggagagcatctggcttcataatgtggcctcagaagcagggccctcctcgcagatgtcagctaagttgttcaccgtgtcctcaagtggatggtttcctgtgtctaagtgggactcttaggcttgagataagaacagcgaactttgagagtttagtatgtcagacatttcatacgcatgagccctaatctcaaaatccaatggtctattttccctaatttcctcaaatgaggaagttcattaattcagcaaaatatttgtgcacttactatgtgctaagcatggttctaagcactggagatatagcagtgactaaggtggataaaaatctgcccctggggccagacgcgatggctcacgcctgtaatcccaacacttttgggaggtgggcggatcacgaggtcaggagttcaagaccagcctggccaacatggtgaaaccccatctctactagaaatacaaaaattagccaggcttggtggcgtgcacctgtaatcccagatactagggtggctgaggcaggagaattgcttaaacctgggaggtgggggttgcaatgagccgagatcacgccattgcgctccagcctggcaacagagggaggctccctctcaaaacaacaacaacaacaacaaaaatctcactcactgattagtaacctttttcagttacaaagaaaaacaacatactcgctaaactccctaacatcaggagccatcaggcaaattatctcaagtcttgatttacaaaccaaacccttatgcctctgattacacaggggaccggtctgacaaactttttttttttttttgaggtaggtttttgttggctggagtgcagtggcgcaatcacggctcactgcagacttgacctcccagactcaagtgatcctctcaccttagcctcccgaatagctgggattaaaagtgtgcgccaccatgcccggataattttttgtttttttgtagagacgagggatctcactatgttactcaggctggtttcgaactcctgatctcaaatgatcctcacaccttggcctcccaaagtgctgggattataggtgtgagccaccatgtctggacacaaatattctttttctttttttaatttaatttttcaaatagagaatgtatgttggctgggcacagtgcctcatgcctgtaatcccagcactttgggaggctgaggtgagaggatcgcttgaattcatgagtttgagaccagcctgggcaatctggcaaaaccctgtctctacaaaaaatacaaaaattagcccagcatggtggtgtgcactggtagtcccagctattccgggggctgaggtaggagaatcacttgaacccaggaggtggaggctgcagtgagccgagattgcatcactgcactccaacctaggcaacagaatgagaccccgtctcaaaaaaaaaaaaaaaaaatagatgggatcttactgtgttgcccaggctggcctctaattcccaagctcaagtgatcctcctgccccagcctcccagagtgccggaactacaggcatgagccatcacacccagccaataaacattcttttctgataagcaactgcagaacttaagccagtttcagccagcttacagaagctgtgaacaacctgtttagccaatgcacatgagctcacctcctctcataaatatgtatacagcttttccctcaaacctgctaaatatgtatgaatatgggccctgtgaggcataaaacccaacctgtcctttctctcttggaagagagcaccttcagtgcatgctgcaaaccatctcttcctggtttgcaaacaagtatcaacaataaagtgctcctttctactatttagccaccctggtgatcttctagacaacattatgcgtatttctgctaggaacattagtgttcaaatctctgtgtaggcagatgttttcattttttgtaggtagatatctcaggctggacttgctgggccatatggtaaatttatgtttaacttctacagattttgtgaagtggttatactgtcttatatccccaccagtagtgaatgtgggttcatatatatatatagttttttttttttttttttttgagacagtcttactctgtcacccaggctggagtgccgtggcacaatcgcggctcactgcaacctccgcctcccaggttcaagccattctcctgcctcagcctctcgagtagctgggattacaggtgcccaccaccacacccggctaatttttttctatttttaatagagacggggtttcaccatgttagccaggctggtttcaaattcctgacctcaactgatccgcccgccttggcctcccaaagtgctgggattacaggcctgagacgtcgtgcccggcctcatttcattttttagagcatcacaaactacctctccagctcatcttgctagagttactgcataatccatgcattcctgccaaggatcagccatcttcttgagtcggagggcttcctgctagctcggtgcctggtgttatcaccctcggctcttctggaggtagaggggctacctatcttcttttcattcttttttttttttttttttaatttgagacagagtttcactcttgttgcccaggctggagtgcaatggtgcgattttggctcaccacgacctccgcctcccgggttcaagcgattctcctgcctcagcctcccgagcagctgggattacaggtatgcgccaccatgcccggctaattttgtatttttagtagagacggggtttctccatgttggtcaggctggtctggaactcccgacctcaggtgatccgcctgcctggacctcccaaagtgctgggattacagacgtaagccaccgcgcccagccaatttttgtatttttagtagagacggggtttcgccatgttgcccaagctgatcttgaactcctgacctcaggtgatccacccgcctcggcctcccaaagtgctgggattacaggcgtgggccactgcgcccggccccagtttttctaagttatatagtttaggtttcacaactagatctatgatccattctaggttaatttttgcatatgggtttcttttttttttttttaggatgagtgtgtggatatccaattatacctacaacatttgttgaagacaccatctcttcttgttttcccaagtttccacacacattattgataaaataaatttttttggggggggtgctgggtgtcgctgggctgtaactccttacctcaagccatctgcccacctcggcatcccaaagcgctgggattacaggcgtgagccaccgccccgggccgaaggcattatcctttctccactgaattgcactttcatttttgtcaaaaattaattgctcacatatcggaactctattctgttgcattgatccatttgtctacctggacgccaataccacactttctttcttttttaaattaatttatttattgagacagggtctctcagtcagggtggagtgcagtggtgcaatcaaagctcaccacagcctcagcctcttggactcaggtgatcctcccatctcagcctcccgagtagctggactacaggtacgtgcctggctcattttttgtagagacggggttttgccatgttgcccaggctgggtatcttttttttttttttcttttttgagatggagtcttgcgtcttgctctgtcatccaggctggagtgcagtggcgcgatctcggttcactgcaatctctgcctccctagtagctgggttcaagcgattctcctgcctcagcctccctagtagctgggattacaggcgccggccacctcgcccggctaatttttgtatttttaggtttactggcgtgagcaaccgcggccggccccaatactacactttcttgtttactgtgtagtccttatcttctggcgcaaagcgggcactcgctaaaaacctgaatgaaagtataaagcaggccgggcgcagtggctcatgcctgtaatcccagcattttgggaggccggggcgggcggatcacgaggtcaggagttcgagaccagcctggccaacatagtgaaaccctgtctctactaaaaatacaaaaaaaaaaaaaaaaaaaaaaaaaa

SEQ ID NO: 6033 - DNA, 12580 bp, Homo sapiens
aatcaagacggccggccgaggcccctggaacggctcaggcggctgcggctgctacggcggcgcatgctaggggattctgccgggtgagtgctgggcggcaggactggggtggggcggaagggctcggcaggaggccccacgtgcattcccgcgaggggctcgggggccgcagtggaaaagaagggtaggctgcatctgcctctgcgggggtcccgcctcggcgtccgcccgctcgccctctgttacttctgcggccccggtgtttctggagcgtcgctttcccggtgtctccgctcagcttttccctttccaaagcgcggccggggccaggggagggcaaggcctgctgtgccctttgaccccgtgcgaaaacggcgaccctctgactataggggtgtggcccagagccacttggccagttaggggtgggggccgggatctttgtcctgcggatcaaacagttggcccctctggactgcatctccgtgccccccggccctgcggggtaatatacgtgtgtgggggaggttccggggtagtcggctactctgtgctccagaccttgcacccgatcctgaggatccttggaggtggggggcaagggctgggaggaggaggcggagttttcccaggctcccccacacttccagggaaaggctttccaagaaccctgaactcatggaccctggagtcaaattttggttcagatctagcctcttgctagctgtgtgacttggggcaagttgcttaacttccctgagctttggtttcttcatatgtaaaaagaaagtgaaggaggaagggagggcaggaaaggaggaagaatcccttttgaagcctgatttgtgttggactcaccagttataaagcaagcttgtccaaaccactgcccaggaggcggaggttgcagtgagccaagaaaaaaaggaagcatgcccttgccccagccattttggtaataatagacgtttattgaatgcttactgtataccactgtaagcactgtattaagtaagcactgtactgagtgctttgttttttgtattttgtgtgtgtgtgtgacagtcttgctctgtcacccaggctggagtgcagtagtgtgatctccactcactacaacctccgcctcccaggttcaagcgattctcctgcctcagcagcctcctgagtagctgggattactggcgcccaccaccacacccggctaattgtttgttgttgttgctgtttttgagacggagtctcaccctgtcgcccaggctggagcgcaatggtgcgatctcggctcaccgcaacctctgcctcccgggttcaggtgattctcctgcctcagcctcccgagtagctgggattacaggcgcgtgccaccacgcccggctaatttttgcatttttagtagcgacgaggtctctcgccacgttggctaggctcatctcaaactcctgacctcaggtgatcctcctgcctcagcctcccaaagtgctgggattacagacgtgagccacttggcctgttttttgttttttttacagtgatgcaaccatggctcactgcagcctgggtctcctgggctaaagctatcctcctgagtagctggggccacagacaagtgccaccatggccagctaattaaatttttttttggccaggcactgtagctcatgcctgtaatcccagcactttgggagaccgaggcaggcggatcacaaggtcatgagatcgagaccatcctggctaacacggtgaaaccccgtctctactaaaaatacaaaaaattagctgggcgtggtggcaggcgcctgtagtcccagctactcaggaggctgaggcaggagaatggcgtgaacccgggaggcggagcttgcagtgagccgagattgcgccactgcactccagcctgggcgacagagcaagactccatctcaaaaaaaaaaaacaaaaaaacaaaacaaaaaaaaatgtttctacaaatgttgtccaggcttaacatgctttctttaattctaacaacaatcgtatgaggtagatactgttgtcgtccagcagatgaggaaactgaggcacagagaagttaaataacttgcctgaggcagtacagttaaagagtgtcgaatgggggtctctggcaccacagggcaccctactgagccccgtgtcctgctgtcttgacttcaggtagaagagctgggcctggaacccagccctgaggacatcctgcggcccaggggcaagtgacacctgctgagagaggcccaggatggtggaggctgaggaactggcacagctgcggctgctcaatctggagctcctgaggcagctgtgggtggggcaggatgctgtgcggcggtcagtggccagggcagcctcggaggtgcgtgcccgccttgggaaccccagaggaaggggctacctgaccttcaggccagcatccaggcttctgggctcatcttgttcaatacacccattttactgatgatgggacattgagggctggggagggaagagactggccttggtcactgctgaggccggagcaggatgaggatgcttgccttggtgcctggcgtaggcccggtgggtaggttctggcagccactccctgggtgacccggcccctctctccagtcaagcctggaatccagcagcagctacaactcagagactccatcgaccccagagacgtcctcaacttccttgagcacctcctgcccacggggccggtcctccgtgtggggcccaccagatgcctgtcgaggggacctccgtgatgtggccagatcgggggtggcctctctcccacctgccaaatgccagcaccaggagtccctgggccgaccgagaccccactcagcaccctcgctgggcacctcaagcctgagggacccagagccctcagggaggctgggtgatccaggaccccaggaggcacagaccccgaggtccatcctggctcaacagagcaagctgtccaaggtaacgtgggagagcgggacatctgctgatgggaggagcttccttgggcctcagtttccctatctgacacatgtgcttgtgggtagcctcccttgcagaataagaggctcctgggagatactgtgagttgggtcttgctcagcctaaatgctcgctaggtggtagctgtgagtatctcatacagtgctttgagaagaggccaggatttgttcacagccacacataaagtggggccaaacgtttcccttcttgctcttgtgcccttggctgagccctgggctgcaagtcagggtgtaagttaagacacagtctctctgtccctcgaattgcggcttcctctgggccaggcctcttggcttagtccttgtccctctgtgcttccttcctcagcccagggtgaccttctctgaggagtctgcagttcctaagaggagctggcgcctcaggccatacctgggctatgactggattgcaggtaaggcgtgctgttgccctgcacacactttgcctgggagtgggaggtggaggcctgggatcctccatgctcctgtctgagcctccacccggtgctgttgcttgtttctctgaccgtgccatcctccgtggggagcaccctcttttttttttttttttttttttgagacggagtctcactctgtcccccaggctggagtgcagtagtgtgatgttggctcacagcaacctccacctcccaggttcaagtgattctcatcccttggcctcccgagtagctgggattacaggcgagcaccaccacgcccggctaatttttgtattttaagtagagatggggtttccctgtattggccaggctggtctcaagctactgagctcaagatatccacctaccttggtctcccaaagtgctaggattacgggagtgagccaccgccccccacagccaccttctttgttttcttatttatttatttatttatttatttatttatttatttttgagatagtctctcgctctgtcgcccaggctggagtgaagtggcgcaatctcggctcactgcaagccccgcctcccaggttcataccattctcctgcctcagcctcccgagtagctgggactacaggtgcctgccaccacgcctggctaatttgtttgtatttttgttttttttagtagagacgggatttcaccgtgttagctcgcctcagccttccaaagtgctgggattacaggcatgagccaccatgcccggctttttttttttttttctttgctttttaagagaagacaggccgggcacggtgactcacacctgtaatcccagcactttgggaggatgaggtgggcggatcacgaggtcaggagtttgagaccagcttgaccaacatggtgaaaccccgtatctactaaaaatacaataattagccgggtgtggtggcacgggcttataatcccagctacttgggaggctgaggcaagagaattgcttgaacccgggaggcggaggttgcagtgagccgatattgcaccactgcactccagcctgggtgacagagtgagactccgtctccaaaaaataagcaagcaaaaaaaaccagatgagcagcagtgagaagaagggggaaagagtagaacaaagagtttggtctgtcactgactgtgagtatacaattgcgataactcactaccttcacgccagcctctgagcaccttctgagccgtatctgctctctcaacctcaggcactgagacggtgcatctgttgaatgaatgaatgagtcccagctgccgtatgtttgaacatttgttatgtgccaggcccctgcacaacttcataccaatgccagctcttttcacgttattgtccagctctccccgacagcaacctaacctcagctgccttctggctggtttccccctggcctatgtcccattgctgtcctttgcatgtgtatgtgtgtttgtgtaaatacataacataaaatttaccactttagcattttttttgagatgaagtctcactcttgtcatccaggctagagtgcaatggcgtgatctccgctcactgcaacctccgcctcctgggttcaagcgattcacctgcctcagcgtcccgagtagctgggattacaggtgcctgccaccacacccggctaatttttgtatttttagtagagaaggggtttcaccatgttggccaggctggtctggaactgacctcaggcgatccgcccgcctcagcctcccaaagtgctgggattacaggcgtgagccactgctcccagccacatgtagcgttttttaagtggactgttaagcggcgtcaactatgtctacactgttgagctatcattactaccatccacctccagaactttttcatcttcccaaaaacttctctccccattaaataattactcccattccccctccctccagccctggacagtcaccattctactttctgtccctatgaatttgactcctctagggacctcatataagtgaaatcatatagcctttgttcttttgtactggcttattttatttaacataacggcctcaagatttattcatgttgtactgtgtgtcagaattcccttcctttttttttttgttttttgttttttgttgttgttttttttgtttgttttgagagagagtcgcactgtgtctcccaggctggagtgcagtggtgtgatctcggctcactgcaaccttcacctcccgggttcgagtggttcttgtgcctcagcctcccgagtagcaggtattacaggtgtgcgccaccacacccagctaatttttgcatttttagtagagatggggtttcactgtgttggccaggctggtctcgaactcctgcactcaagtgattctcctgcctcggcctcccaaagtgctgggattacaggtgtgagccgctgtgcctggctggaattcccttcctttttaaggctgagtgacattctgttgtgtgtagatgccacatgttgtttatctgttcattcagggatggacacttgggtgctttccatctcttgactgttgggaataatgctgctggtgacatggttgtgcactgtcacttttgacatagcagccagagggaatttttaaacatgggaatcagatcatgtcactcccctactcaaacctccccatgggcttttcccagcacttactgtaaaatccaaaatccctatctagacttacgaggcatgatctggcctctactggccccatgatgtgacctcccgtctttcttccagcctcgcggcctcctccttttttatttttatttgttttctctgttgcccagagtcaagtccagtggtgttatttctgctcattgcaacctccgcttccttggttcaagcaattcttcctcagcctcccaggtagctgggattacagacgtccactaccatgcttggcttatttttgtatttttagtagagacggggtttcaccatgttggccaggctggtctcgaactcctgacctcaggtgatctgcccgccttggcctcccaaagtgctgggattacacacataatggggtggccacaggcatggcaggaccagaaaggaggccacgaccaggcatggtggctcacgcctgtaatcccagcaatttgggaggccgaggtgggcgaatcacttgaggtcaggagttcgagaccagcctgagcatcgtggtgaaactctgtctctactaaaaatacaaaaattagccaggtgtggtggcgggcacctataatcccagctactcaggacgctgaggcaggagaatcatttgaatccaggaagtggaggctgcagtgagcagagatcaagccactgcactctaacccgggcgacaaagtgagattctgtctcaaaaaacaaagacaggtgtactgtggagttgctgagagcaactggtggcggggacacaggccctgcccttgagtacttcttgaactctcagctcactgccctccttcctggttctgggaaaatggaagcgcctgtcccagtacctgctcttggtccatgcgctctgctcccctgcctttgccgaggtgactgtccatgctgccacctggaccctggccctgctccagcgtgctccgcccctctgcttctggctcctccagggtttccttcctgtgatcctctccctctctgtcctgcatcctcatcctgccccttagcatgagcatgaacgtgcaggaagcattctgggagctggttgtatctcatgctccctgcaccaggcaccgctccgagctgtgcttcctgttcctcccgctgactcctttgcccttcatgataagcttattaggtaggcaccaccatggtgcccattcacagatgggaaggctgaggcccggtgagacagaatcttaccagcagctcacatccagtcggggtaaagccgctgtctgttatttctcatcccgatgccacattcctacctttagcccacatttgcttccagtgactgcctgttttctcgataacaaaacttcctcttcaaaagggctgtctagcctcgttgccttcaatttctctccactactattccttttctttttctttttttttttttttttgagatggagtctcgttctttcacccaggctggagtgcagtggagcagtgatctcagctcactgcaacctccgcctcccaggttcaagtgattctcctgtctcagccacctaagtagctgggattacaggcatgcaccactacactcagctcatttttgtatttttagccagagacagggtttcgccatcttggccagtctggtctggaactcccgatgtcaagtgatctgcccgccttggcctcccaaagtgctgggattataggcatgagccactgtgtccagcctccactactatttcttaaatcgggcttcagctcccagcatttcatcaacatggccctcagttgggtcatcagtggcctccgtggtgccaactccccagcttagccctcatccacatcttcctttgagtagcaggggacacagtggtcactcctgaagcactttctcccctggacttccagccacttgcttcccggttctcccccatctctgttggtgctccttcccaggcttctggggaaggaaaggtccttgttctgactgctacacccctaggcctgggactcggtcttctgactcctcctctctatcttccctctatgatctcccaaacgctgaggtgtttggacactttctctacttctccatttgtatctctagcccgcacctctcctccgaattccagacttgtatatcccactgtcttctccacatcaccatgaagttattaaccttctgtccgaaatcaaggtcctgatttccactgctgtgctcctcctgcagtctttcctgtctccataaatggcaactccaaatactaaataggtcaggccataaacttgctggatttaccatccagctacatcctgatacacccaacataagttgaaaatactgtttaggccgggtgcggtggctcacgcctgtaatcccagcactttgggaggccgaggcaggtggatcaggccaggagtttgagaacagcctggccaagatggtgaaaccccgtctctactaaaaatacaaaaattagctgggtgtggtggcgcacgcctgtaattccagctctgtaggtggctgagacatgagaatcgcttgaacctgggaggcagaggttgcagtgagccgaggtcgctccactgcactgcaccctgggcaacacggtgagattctgtctcaaaaaataaaaaaagaaacatcctaagtcgaatcatggtaagttgggggctgcccctacctctccccagctgaatcctaaccgatgcctctgcttcccctcaacttgaagcagccagaggaggagttctgtaaaaatatgtggctgatgtggttgtgtccctcccattccccagaccctccctgggcttcttaacctcatctcctccaccctcgctgccttcctgccactttcccctcctggctgttcctcagctgaaccatgcacatgcccaccccggggcctttgcgcttgctctttcatctccctgcgatgtccttcctgggaggtctctgtggcttctccatgtctctgctcagggtcatctcactcggagaggccttccctggtatggctgcccggccatactaggctctgacgctgctctcttgctttctggcaggtatcagcattcagtcttgtatcacgggtttttttttttttggtggctagttcatctcttgccaccttacagtgtaagcctcattaaggccaggggctttgtctgtctagttcctggcacatgaaacagcatctagccctgtcataagggctctgtcgatattttttccatggatggttggctatgcatcagggtagacagacactgaaaccaaccaacagtcccagtgactggaggggccctcctggcctgtttgaggcacagtagggatgaagcaggtggcctggggtgccagggctgatcgtctctccaagccttggccggtggccacacagcagcccccagcccctctcccgtcagctgcctggtgctttgcccacaccagggtctctggacaccagctcttccatcaccagccagcctgaggccttcttctccaagctgcaggagtttcgggaaaccaacaaggaggagtgtatctgcagccatcctgagtgagcaggggcgggcgagggtgggcgagggcggctgagcggctccatcccccggcctgctcatccccctcgccctctcagaccccagttgccaggcctgcgtgagagcagtggcagcggcgtggaggaagaccatgaatgtgagtgcgggccctcggctaggccgctgagtagtccagcctcgcgctgccctggcctcccctgccccagagcagtcccatttgaggtttggggcctggggaggcccctgagatgttgagactcatggagggaggcctgcagtctggacagggtggccaagccctggtaggggtggagtgagctaaggcctggccaccgaattaggggctgccctgtgtggcaccatcccaccctccccagcagtgcccctgtgctggtgggactccatcccagctcctgagggccccaggaggatgtccctccccaccccttagggcgtgggccccaggttctgggaggaaaggggttaggaggaaatgggccgaagggcttcccagagggattggcagcttgtgtggttgggggccgctgagggcagcacggagcctggggacctgggttcctggctcagggagagctgtggcttctcatgggcctcgcaggcgtgtactgttaccgtgtcaaccggcgcctgttcccggtgcctgtggatcccggtaccccctgccgcctgtgcaggacaccgcgagaccagcagggccctgggaccctggcgcagccagcgcacgtcaggtgagtgaccagagtattgggacaccttgggggacagagcctgaaccactggttttaagaaaagatgggcctgggcgtgggcccccaaccgctgggaggctcctcaggggtcccccactgcccccctgcgcagggtgagcatcccgctgtcgatcctggagcccccgcaccggtaccacatccaccggcgaaagagctttgacgcctctgacacactggccctgccccgggtgagcagccacgtggggctggatggtgatgagggcggggctggctcagactggcccagatccccagggagggtcacagagcgagactgggctcgacaagggtgagcgcccaagtctctggagcacagcctgggcctcttccatcacccacacctgtacctaagggaggtaggacccccgctccacgtaccccggtgcttccagggtgatctgcctgcaggctggcatgacatgaatgggtcctgtttattgcgcttttgtgtactgcaggcacagtccttagggggcttatctcatggagcccccacagcagccaggagtgtaggcactgctgtacccccaccctgcaggtggggagaccgaagcagagggggaggcgccttggtggaggagctgggattcgaacctaggtctctgtgctgctgctgctgctttttttttttttttttttttttgagaccgagttttgttcttactgcccaggctggagtgcattggcatggtctcagctcactgcagcctccactgtagtcccagctacttgggaggctgaggtgggaggatcgcttgaacctgggaggcagaggctgcagtgagctgagatctcgccactgcactgcagcctgggtgacagagtgagactccatctcaaaaaaaaaaaaaatgtcctttcctgtgtctccaggtcgggatggggtgccagtggcaactccccctgactcctaaattgagagtagggcagctggggtcagaggaggagaaggatgcagaggaaagtcagtttgctggtccgtaaaatggacataacagcgccatcctcagggatgttggtggtgaggtggggctgttgagtgaagcaatccatgcaggtgcttggagagcctacagcaggaagtaccctgtgaatgtcactgtcaccgtcctatcctcctcccatttcagctctcagggccccagggatggctggatctgccaggataagaaaggggagagctggggtagtcttgtgggtagacacaggccctgccttggtgggggcctccttcctaatggggggcacagttcctccctgatgggggtgtgcccagtcagcggggagcttgtcccaggtcaggcacttttaactccttgccttccacagcactgcctgctgggctgggacatttttcctccgaagtctgagaaaagctcagcccccaggaacctggacctctggtcctctgtctccgctgaggcccagcaccagaagctgtccggcaccagcagcccttttcacccggtacggtccagatcgcatcctagcctggggtgccccctagagggacagagacctcgcagcaggcctggggactgcagagcctcctggggggtaggattgaggtggggaggatggagcctgggagtgtctctctgcagggtccagccctccagccctgaccctagccatccctcggaactcctctgctccctgccgcctgccctgctccacccaggaaggccaccctgactgcaagatccaggagggaatgtggctggaactggggatgacctgtccctttcaagtggcccccctgagacttccctattccccatccaggcctcaccaatgcagatgctgcccccgaccccgacctggtcagtgccccaggtccctcggccccacgtcccacggcagaagccctgaggactgactcctgggggagaacagcattcccgccgcctccagcctctcccctctggcaggcgcacccaggagatggaatcccctgcccgcccagctcaggcccagctgtcctaggttgggcaggtgggtggacccaagcttgtctgctgcctgagttccagagagggaggaccctggggtggagggtgagggattctgtggaagtttgtaaataaagctcagtgctctgcagctcaagtcc

SEQ ID NO: 6034 - DNA, 34364 bp, Homo sapiens
caaggagatgccactcttgaacattccacaaatttagactcctcaccatccttaagttcagtgactgttgtgcctctgagggaatcgtatgatccagatgtaattcctctgtttgacaaaagaactgttttggaaggtagcacagccagcacctcccctgcggatcactctgctctccctaaccaaagtctgactgttagggaatcagaagtccttaagacaagtgacagcaaagaaggtggtgaaggtttcacagtagatacaccagcaaaagcaagcatcactagcaaaagacacattccagaagctcaccaggctactttattggatggtaaacaaggaaaggtaatcatgcctcttggaagtaagttaacgggcgtgattgtggaaaatgagaatattaccaaagaaggtggcttagtggacatggccaagaaagaaaatgacttaaatgcagagcccaatttaaagcagacaattaaagcaacagtagagaatggcaagaaggatggcattgctgttgatcatgttgtaggcctgaatacagaaaaatatgctgaaactgtcaaacttaagcataaaagaagcccaggtaaagtaaaagacatatcaattgatgttgaaagaaggaatgaaaacagtgaggtagacaccagtgctggaagtggctctgcaccctctgttttacaccaaaggaacggacaaactgaggatgtggcaactgggcctaggagagcagaaaagacttctgttgccactagtactgaagggaaggacaaagatgtcaccttaagtccagtgaaggctgggcctgccacaaccacttcttcagaaacaagacaaagtgaggtggctttgccttgcaccagcattgaggcagatgaaggcctcataataggaacacattccagaaataatcctcttcatgttggtgcagaagccagtgaatgcactgtttttgctgcagctgaagaaggtggggctgttgtcacagagggatttgctgaaagtgaaaccttcctcacaagcactaaggaaggggaaagtggggagtgtgctgtggctgaatctgaggacagagcagcagacctactggctgtgcatgcagttaaaatcgaagccaatgtaaatagcgttgtgacagaggaaaaggatgatgctgtaaccagtgcaggctctgaagaaaaatgtgatggttctttaagtagagactcagaaatagttgaaggaactattacttttattagtgaagttgaaagtgatggagcagttacaagtgctggaacagagataagagcaggatctataagcagtgaagaggtggatggctcccagggaaatatgatgagaatgggtcccaaaaaagaaacagagggcactgtgacatgtacaggagcagaaggcagaagtgataactttgtgatctgctcagtaactggagcagggccccgggaggaacgcatggttacaggtgcaggtgttgtcctgggagataatgatgcaccaccaggaacaagtgccagccaagaaggagatggttctgtgaatgatggtacagaaggtgagagtgcagtcaccagcacggggataacagaagatggagaggggccagcaagttgcacaggttcagaagatagcagcgaaggctttgctataagttctgaatcggaagaaaatggagagagtgcaatggacagcacagtggccaaagaaggcactaatgtaccattagttgctgctggtccttgtgatgatgaaggcattgtgactagcacaggcgcaaaagaggaagacgaggaaggggaggatgttgtgactagtactggaagaggaaatgaaattgggcatgcttcaacttgtacagggttaggagaagaaagtgaaggggtcttgatttgtgaaagtgcagaaggggacagtcagattggtactgtggtagagcatgtggaagctgaggctggagctgccatcatgaatgcaaatgaaaataatgttgacagcatgagtggcacagagaaaggaagtaaagacacagatatctgctccagtgcaaaagggattgtagaaagcagtgtgaccagtgcagtctcaggaaaggatgaagtgacaccagttccaggaggttgtgagggtcctatgactagtgctgcatctgatcaaagtgacagtcagctcgaaaaagttgaagataccactatttccactggcctggtcgggggtagttacgatgttcttgtatctggtgaagtcccagaatgtgaagttgctcacacatcaccaagtgaaaaagaagatgaggacatcatcacctctgtagaaaatgaagagtgtgatggtctcatggcaactacagccagtggtgatattaccaaccagaatagcttagcagggggtaaaaatcaaggcaaagttttgattatttccaccagtaccacaaatgattacacccctcaggtaagcgcaattacagatgtggaaggaggtctctcagatgctctgagaactgaagaaaatatggaaggtaccagagtaaccacagaagaatttgaggcccccatgcccagtgcagtctcaggagatgacagccaactcactgccagcagaagtgaagagaaagatgagtgtgccatgatttccacaagcataggggaagaattcgaattgcctatctccagtgcaacaaccatcaagtgtgctgaaagtcttcagccggttgctgcagcagtggaagaaagggctacaggtccagtcttgataagcaccgccgactttgaggggcctatgcccagtgcgcccccagaagctgaaagtcctcttgcctcaaccagcaaggaggagaaggatgaatgtgctctcatttccactagcatagcagaagaatgtgaggcttctgtttccggtgtagttgttgaaagtgaaaatgagcgagctggcacagtcatggaagaaaaagacgggagtggcatcatctctacgagctcggtggaagactgtgagggcccagtgtccagtgctgtccctcaagaggaaggcgacccctcagtcacaccagcggaagagatgggtgacaccgccatgatttccacaagcacctctgaagggtgtgaagcagtcatgattggtgctgtcctccaggatgaagatcggctcaccatcacaagagtagaagacttgagcgatgctgccatcatctccaccagcacagcagaatgtatgccaatttccgccagcattgacagacatgaagagaatcagctgactgcagacaacccagaagggaacggtgacctgtcagccacagaagtgagcaagcacaaggtccccatgcccagcctaattgctgagaataactgtcggtgtcctgggccagtcaggggaggcaaagaaccgggtcccgtgttggcagtgagcaccgaggaggggcacaacgggccatcagtccacaagccctctgcagggcaaggccatccaagtgctgtttgtgcggaaaaagaagagaagcatggcaaggagtgccccgaaataggaccatttgcaggaagaggacagaaagagagcactttacacctcataaatgcagaagagaagaatgtattgttgaactcccttcagaaagaagataagagcccagagacagggacagcagggggcagtagcacagcaagttattcagcaggaaggggcttagaggggaatgctaactcacctgcccacctgagaggaccagaacagacgtctgggcagacggctaaggatccctctgtcagcattcgctatttggcagcagtaaacaccggtgctataaaagctgatgacatgccacctgttcaagggaccgtggctgagcattcctttcttcctgctgagcagcaggggtctgaagacaacttgaaaaccagtaccaccaaatgtattactggccaagaatcaaaaattgctccttcccacacaatgatccctccagctacttacagtgtagctctgttggctcctaaatgtgagcaggacttgactataaagaatgattatagtggcaaatggactgatcaagcatctgctgagaaaacaggagatgataacagcacaaggaaatcattccctgaggaaggagacataatggttactgtgtcttctgaagaaaatgtgtgtgacataggtgagaatctgtacctaattgcaaattttaatatttacaaggatgattgtacaacagagtgcatttaggacagtcttccaaaagatggttttggttccagaaagataaaatatctataaatttttttctcatatcataatgttgcaaaataactctcatcaaacttgaaggtcaaacttctctaaaagctacttgtgtttaaaagtttaaagcctttggcccatttctcatgtgtggggagagaaaaagcaggaggctgaggcatgggaagtccacatgttatttacatgactgctgcaacttactaaacctttttgacctacaggttttttgtcaatcaaaaagaagaataccctaccacaacccaatgaaagcaatacattttttttttaccaccctcattttacaaacgaggaaatagggtcagaaaatttaaatagcattcatggtcctcgggtgacttttagaggaaaaatcagtttctgagcctccatttcttgttgtataaaatggggataataagacgggatgataatacaaaggcaaacacgattccaaccctcatctgatcataggtttgcagtatttgtttgttcagtctgttagttcctttgaatcaaaggagcatgttatttttaactgagcttatttttcaggtgaaatgagtttctagtttagaatatatttgaaagtgaaaagaaacatttttccctgctgacagattttggacagtgctggtcttttagaaatagttaataactttcaaagatattatctcagtcatgccttataccgtccaacttcagatactttataccagtccagattggagaaaagtggacagtgacactttaaagcatgacaattgcatagactgggattaagcacaggatgctgtaggaacaaaagggtcctcatgggctggacttgaagggacagaggaattcttttccactctggctatataaattgtagcatcctggacttttaactgaaatagaccttagccatcatctaacccagtctcaggaagctgaggctaatagatttagtcttgttcattatagagacttaggagactttaagaaatgctccaagggttgaaacaagtaactttacaagtttctgttgaatttagcctggagtaaattgaatgctccagaagtttttatgactcaatcattgctacaattactcattcctccttttttcctgaagaagtgaaaatagaagggtttccacagaagcttctacacaatctaaagaaggatataagaggcaagaccagagtagaactgaatctctgcacctgagaaaattttttctttttgtctacctcacagtttaactttgtgttcaatttttctgtgttcagtgtgaagcaagtaaagtgaatctgttaataaatcacctttactgagaatagaccttagtgactcagaatatttttaaggacaaacttgatggagatcactgcagaaaaatacttggaaatgaagatgtctccacagataatacttttgtcattctttctgggcagttatcttactgtgcaaataagaatttcactcacccaaaatgagcaaataatccctgcctttcatccagattcttttatacaacatattccttttgatcattttctactgacagcaaaataaaccagaaaaggaaggtgcaacagcatgtcagataaccacattccattactttttgaccccagatgtattttgcaagcaaattcttaaactgtactaaatggcttgaattttattaggcaatgaagagtctccattgaatgttttgggaggattgaaactgaaagccaacttgaaaatggaggtatggcttataattcagctgtgctgaactgtaagtgattaaatactgtttcatcacatatacacatatatatacttatgtggtatataggtcctgttctcattgtacttatgatatttagtgttgttattgccatatcctgtggggggaaagctaagaacctcagtaatcttagtaaatagtgctatcatcagttcatttactcaagccagaaacacaagagtcaccctcagtttctccgtcatcccacatttaatctatcgccatttcttacaggttccatttccaaaatataacatgagtccatctatttctgtttctacagtcatcaccctaggctaagccactacttcagtagcctctccattaggcttagttcactccagccctcctccagtgtgattcacacagtcctgcaggtagtcattagaaacataacttaggccctgtcattgctctgcttaaaatttgtggtggcttcccatcatgcttagaataaaatctgcttttttttttttaagcatggctttggtgctttacacaatttagtctccatatcctctttctagcctgatctgaaggcaccatccaagtatatgtgacaaaacagcagtgaacatgggggttatgaacactacagaggaaacacaacttgcccaatagtagcaataggcaggtagacaggagggcttgcaaggaggacactggaatagaattttgaaagtagagtggaaatttcccagaaaagaaagaaaagagccttccaagcaaagagaatgttgtgttctagactcagagacaggagggcacgtggtgtgtctcaggcgctgcagtggttcacggtgagctgtgatgagacttgagcctggaagggagtgggagcccatcaggaagagtcttgtgtggtgtgctgagttggggtttttacctttaaagcaatagaatacccattgatggatgaaatacgagattaaattgattttttacttggctttgtttttaaaggttgatgtatttatttttaagttttgtgtactcttgaaaataggcttttatattgtttcaggatgctgggtttttttttgtttaattcacttgaggttagtcttcttgtaaaaaccctggttaacttatttttatggtgctttggattttttaggcttatgtgccttcagaggaagagaaaaatggtgaaattctggcaccaccagaaagtctgtgtgggggaaagccaagtggaataggtgagctctttagaatggttgttcacattgtttttgtttttgccttgcatgtggttttacctttctaaaaatcaatagctgatgcatagtaacatacaggctctattaacttgcctctcactttttaaaatagattagggagaattctttactattttatttttaacatacacttttcctcatgaaatgtcaatcaacattatgtagggtaattgtttaaatctgattacccccaaataataatgcaaaacgaaagttgttttggagcaaactcttgctctatcccagaaatgtttctccatacccctgcctgtccccagatgctattgcagcttacttccaaaaggctagtctgaggataagggcccactttacaccatttgctcttgtctcttgctcaggcttttccccagtggctgcacagatactgctctcagcttgtataacctcatctcagtctctctgtgcaacattcttcactgtggactacagattttaagggagatcctcaatatcagaaaggataaaggcaggagctcttaaacgttttggtctcaaggaccaaaaattactgaaaaattaccgaagaccccaaagagattttgttatatggcttatacctgttgacatttgccaaataagaaattaaaattgagaaaagtaaatattaagtcactattaattcaatataattaactcactataagttaacaactcttttttcatgaaaaatggctagattttccaaaaaacccaattaagtgataaaagtgacattgttttgcatttttgcaaatccctttaagtctggcttaataaaaaacagctatttctcgtatctgttttcacattcagtcctgttgctgtttattgttttgattaaagtaaatgaagaaaatccaacattacagatagacggttgggtttttgttttttgttttgttttattttgttttgttttgtttgagatggagtctcactctgtttgccaggttggagtacagtggcgtgatctcggctcactgcaacctctgactccctggttcaagctatcctcctgcctcagcttcctgagtagctgggattacaggcacacaccaccatgcccagctaatttttgtatttttagtagagatggggtttcaccatattggccaggatggtctcgatctcctgacctcgtgatccgcccgccttggcctcccaaagtgctgaggttacatgcatgagccactgaaagccactgcgctcggccaatggttgggttttagtagccttttcagataattatgggtacatcttagcctctggaaaattccattgagcactcatgagtctgtaagacaaataatgttagtttggcccttgtggattccttgatggaaagcctcaggaattccccagagaggctggaccatactggcttaaggaaatggaaatgagaagaactgtgacagtgaggaattatttctaatttgtattacaaacatgattgtgtattttcttctgtttcccacaatatttttttctaagtactaggaactatagagtatgtgaccaaatttaagccagtcctcaatttttttccacaatgttaaaatgtccatgcaagtcaggtggagtaaacagtcagggtgatttttgttgtaaatacttataacaaaaaactctataggcatttgcttaaagggactttattagctcacaaaactgaaaaattcaggtaaagcataatccaagaggatgcagatagctccaaagacacatctagtagaaactccattttatgtcttcttcctcatcccctgaataagggtcattgctttctcattcatagcctctacttttagctttggcttaccattcctggccaaaaacctgagacttattctgatttagcataagtacatgtgtccaccctaaacgaattactgtgaccagaggaatgtagcttactagttgacttaagtcaggtgctgtgttcctggatccacatggtattccagaccacagtctgggctcttgggaaaggtgccaggagggcaactgtaatgtctactgtagttggattggctctttaaattatttccctgacaaacatcaagtctgctacctgtgagtactagggaaatcaacatggaaatgactgatggaagtaagtcattcactgaaatcaacgtgcaaataagtaaggtactataataaagatacgtacttgactgtgggagtcagcttccctgaggtagggcctcagggaagacttgtgttggctcaatcaatctcttcccccaccccatcttctttaattatagaaagtaaaatatacagaaatgcataaaaagtttcccactccctatgagtaaccaccttcagtacaataaaattatatttatattgttatagaattttttttcactcgatcatgtattgcaggcacccatcattactttattagcatatacagatccactttctttgttttaatagctaaataatcatccctaataccaattttaggtcttttaatggcctcggggtttctactgttacagggctgcaacgaactttcataatgcatatcactacatgtgttttaccaagtattttcataaaattggattgggggagggagggtcaaagaatatacaggttaagtatccctaatccaaaaggcttggggtcagaagtatttcgaatttcagatttcttagggtttgggaatatgtgcattatacctcattgagcatcccgtatctaaaaattcaaagtcaaacttccagtgagcctttcctttgagagtcatgttggtactcagagaatttcagattttggagcatttcagatttctcatttttgaatttgggatgctcaacctgtatacgttttgaatttttataagtacttgttactcatttgaggctaaatattgaataatgagtaggtatgcattaagtgtacaaggcaaagagaagggcagtagatgtggaatgattcagattaagtgaatagtgcatataaatcctcacccatgactatctggggaggtttggggagtgggagcagttgaggaccttcttacacaaaaccatctgaaagggtctcagaagactcgtaagaagtgtcagccagtcctggaagaccacaccaagacttggtaagtcatttatactgacatgttaaaaccctgaagatgactaatctattcaaaacttggaaagatacattaattaaaatgtgcatgggtgttttatactacaaataattaacgtctcatttgttaattgtcaagaagctaacatttttggattctgaagtccgttgttcccacagttatatttcagataactttactgtgtttaggtacagttcagtaagagatctacttacgtaaaaggaagttgtttaaaagaaaaatgtgtgttctgtcattgttgagtagaaacagtagactttgtacttcatgtttccaaagcatataaacagaccattgctgttggaggggataggatctaacttttcatttgacgctattattttaaatgaaccagtgttatactgcagcttaacagctacattaaggtcttttactttttttctaagcttcagatcaccaacatagttaaatcaccatagtgatgtaatataccactgccgttattataaaaaatgcaggcaacattaatttatgttgtctttttctggtagtatattctggtagtacaacatggattgattgtgggaaataactggtcagatttttataatttatgaaagcagctaagccacttggtgacataggataggttccctatcctaaaaatcttcaaatttgtttctctgcatttcagaaacaatattcagtttctttacatctcatttttatttttgaacagctgaactccagagggagcctttgttggtgaatgaatcactaaatgtaagtcactgtaatggttttgatttttgtggttattgggttttttaattttatttttttggagagctattgaggaggagccatctgaaggggttgcctgtgtatttctgtagtagccaggaggcatttggtagtgtactcttcatttgagttcagcatcctgacagcagctttcactagctcttttccatgttcacctatacccactgataaagaactttgaactttctattgtttattattataacgggattgaaaattagattttgatgtcttaaatcatcctggtgctatagacaaaatagattttagtttgagaattaaatttcactttatgtttttagaaagcttttctcaagatactaacctgtaactgctatgtgtacatattttttcccagatgtggctctcataatcccgttcattcttgaaagagtcttgtttttggtctttctgtcttaatgtatttataaggaaccttgtattgtaccaggagtgaacattttataaaatgtttccaaatgtgcagacaactgcattctttccaatgctcctagaggaattggggtactatcagtgaaccgcgggatcagagtacttcctcatcaagcactctgttttgtagctagaaactcatacaccatatgctgaataagaagaaagagaaaagcaccacttggtgtggttcaagtttgccatccaagagttaaaaagattatggctgggcacagtggcatggcctatagtcccagctactgaggaagttgaggtgggaggatcatttgagcccaggagtttgggtccagcctgggcaacatagcataattttttatttaaaaaaaaaattttttttttaataaaatacactttaaaatttaaaaagactttaaatggggttggagcttaccgagccagctggcatgttctccatcctacctcagtcccttgagtccaccagcagctgtcttttccccagtcgagcataaatgtcctttccaaatttgtgcaaaagtctgtagctaggacttaggatattataggatattctgagcctttcccctcagtttaaaaaaagaaaaacagtagaattgataagatttgccaaataggaaatcttattacagaatcctatagagtttttaaataaagaaaaaagaaaatcatgcaggatttggatgggaagggaaatttatggaattcagaaaatttttctcttatttattcttactcttttgccattggctgctttaaggacaggcagaataagcacaataatttgttaaactgaaattttttcaaaaagaagatgctgcatgcttttgagcttctgggtgaaattaaaaagaatatgtaccccaattccttttggcatttgtacaaatagccaggttatgtaaattaccttctctcttctttctttttgcctttaaatttttgtgagactatccataaatatcttttatattgtatatttaggttgaaaattcaggcttcagaacaaatgaagaaattcatagcgaatcttataacaaaggaggtaagttaatgaatttcatagttatagttttaatattatagttaacatttattgagtgtggtctgtataccaggccttgtgttaattattttacatactttctctcatttaattcataaaaattcagtaaagtgatagttaacagcatcaggagtatagttgaggagaacgagtcttaggccaggtgacttattccaagccatacagcttaaaagtgatgtcttgctttaaatagctactagaactttgccattaatctcccagttgactcaatccaacataaatacaaaacgaatagccccctgtggattgcaagtacccaactgtgaaatgtgttaacttctgacaggcagtttaggatggtagcatatcaaggatgtcacatttatgtgggtcttctcccaggggtgaggtctggtggccacacaacccgtgcaggctgccaactctgaacagaaaattcccttctcaaacagaacatagaattttcttgatgcctactaattttgttaatttcctattataggagtggggagagaggcttatttacttagacagttatttttataatgtataccatatttcaaacaaaagtaaagcagtaataaacacctatgtgcccccaacctagttttgccctatcttacaatttagtatatttgcttcacataccttttaaaaaatgttaacagttatggtggaatccccatttaccccttcccaatcccaatctctttccttttaatcccactccaaaaggaaccactattctgcattaattatatataggtccataaacaatatgtaacctatgttgcctgctttaggtaaatatgtggtctcacgttacataaaccctccccaccttatttgctcattcagcagcgttctaagattttgttctgttgatttatattaactctaattattttaattgcttttgaatataccacagttagtattttttgcttcatttgtacattattttgcacatgtaggtattttgaaacttttcccaattacaaagaatgctactgtgtatgttctcatacctttcccagtgcttatgtagtgtacttgtaattctgggtatggaattgctcagttataggcacctcttcaactttactgcatgtgctaaattgaccccaagtggtgtaccagttgtcactccacaccatctgccatatttggtattgtttggtgactgtttgttagcctgatgattatgatgcaatgattcattattttcagtgatgcttcttaatactgtgttgctacacaaactggggggaagggccttgaagtcttctgtgtaaagtccagtgttgttaccccagacatgttactgaccttcttgaaccccattccctcacatctacaagtggaaaaaagagaatttaactgacagagttgtgtggaggatcccatcaaaaatcatttgtgactatctaccacaatgccctgtatataactggtactcaataaagttactaactcagttttctcccagccccctaacacatacctaagtaagtattggaatataaaaatatttaagatttttttttcttttttgtatttattactcagagatatccagtggtagaaaagacaacgcagaagccataagcggtcacagtgttgaagcagatcctaaagaggtgcattttaataaactcaagtgtttgatattttatacataatattttcactgtacacaaagaagggctttagaaaggctttatttctttgtataaattaaatattaaatgggtatactgagagttccacatgtcacttttacctgtatatgccctttcaatgtttaggcaatttggcagttcccaggactgtttggaagtgcccacgttgtacagtcagaatggtttttcatgcacctttcatcaaccataagaagtccatttttaataagccactaagacagtagaaaaatactaattgtgatgtgccatcagttgtaagatatatatagcttgacttcagaaatggtgaaatgataaataatttttttaaatgcgttttagaattattgaaatatagtatgtagctagaaacagcatgtgttgtatgaatttgcattcaaacccagaaaagagactgaagtttacaaaattagtctaatccaaatctaaatatcaagtgttctagatttttttttctttttttttttttttttgaaacagtctccccctgttgcacgggctggagtgcagtggtgtgaacgcttctcactgcaagctccgcctccggggttcacgccattctcctgcctcagcctcacaagcagctgggactacaggcacccgccaccacgcccagctaatttttttctgtatttttagtagagacggggtttcaccgtgttagccaggttggtcttgatctcctgacctcgtgatccgcccacctgggcctcccaaagtgctgggattacaggtgtgagccactgcacccggccaagtgttctagatttttaaaaaatttatatatcaacttattccaaaggttagaatctagtacagtgtgctcctctttcagtttatttgaatcaagattctatggcctttgatatagtcattcttaattccaggttgaagaggaagaaaggcatatgcctaaaagaaaaagaaagcagcattatctctcttcagaagatgaaccaggtatttatatttatgtttctgttttagacatctttgaaaatcattatttttatatccaaaagagtgagccaaaaacatagagaatttttgaggatagtaactctctactttacaagtcttgaggctaatttgtttctagactggcttgatacctccggagtcctttctggaccccaatctagaaactagattgcttcctgcagaagacccaaccgctggatctcagacaaagacaggctctctctggaaccacaccctggagcccagccaggtgccactacagtctgtattttatatcataagcagataccctacagagctagtgaagcactttagtccaaaagtgcctctaacacccattctgtgcttcatactgttgattttctcatggtctgtaacggtgccctctagtagaactacagtgatagaagtcttgtacatttattttgtctaatacagaagctactagccacatgtcactattgagcacttgaaagtggtcagtggaaatgaaagactgaatttttaattgttttttaattattttatatttcagtagccagatgtggttagtgactatcatgttgaacagtgcagtgacctttaatacttgacacaaaggagaagttcaatacttattgaatgactacatgagaaagaatgagtgaagaatgaaatatttatattttatattatttggtagcaatttaatgagttcctgatgtattcaggtactatccatggtacattatacacattcccatttaatctttacaataaacctgtaagttaggtggtgttgtcatcttatagataaagagattaaggttctgaaaaattacgactttatcttcaccacataaatctgattccaaagcccatggtctcaattactaagctatacctcttaggtggtaactcatttagaaagttaaagtatctctggaaactatacgctaagcccttcccatagaacccactacttcattggtgtcatgtgaacatatggggatttttgtattttgttttatttttactttgccagggcgaaaggcaagtgttcagtgctcaaatcacatgatattataaatatagagtaacttttggcttctctgtatcacaggcctaagaaagaaggctcaaacagtcttaaaatagaactatgcatttcatttttcatttagcttttgttcctttgtgattctgtctaaactgatttacagatgataatccagatgtcctggattccagaatagaaacagcacaaaggcagtgtcctgaaacggagccacatgacacaaaggtattttttccacatattagttttaagttttgggtgggggtagggaggcctaattacagcattgtaaatacttagtataatatttttttcattttactatccctctttaaatgtctctaataataatcactttattataaaaggtgtctattttttagtctcctcccaaaaatcaaatgttgcactttataattcttaaactgcaagatcgtgttaattattacaatttagatataacattgcttaggtttttgttcagtagtagtattgatttcttgaggtttctaaatgctttcttccaaaagtataatgtgctttatcacagatatacttgcaccaaaatattgaaatacagttattattagtactctgctctctagcttacctcctgtattagtctgttctcatgctgctaataaagacatacctgagactgggtaatttataaaggaaagaggtttaattgactcacggttccgcatggctggggaggcctcacaatcatggtagaaggcaaaggaggagcaaagtcacgtcttaacatgacaacaggcaagagggcatgtgcaggggaactcctctttataaaagcattagatctcaggagacttattcactgtcaggagaacagcacaggacaaacctgccccccgattcaattacctcccactgcatccttcccactacaagtggggattatgggacctataattcaaaatgagatttgagtggggtcacagccaaatcatatcacctcctgcctctaaaatctgggtactctaaggattggcctcacccattgccttttttcctatggttttattttcatcttatgactcacagaacctcctcacaaatttgtatttgtgttctgccgtctcttgttgtaggcccagattttttcattccctactagatacctcttcttgggtgttcttccatttctgagactcagtactctaaaatttctcattatctgtctaaactagttccatcttttcctctctctttctctaatttatatttttataaattattagacgccttattccaaaagtgtttaagtccagttatgaaaatatttgagctgacttccagttctctaaaaccagactttggtctctttttttccccagtaaccgaagaactaaataaaaagtaggaaaaggtttaataacctaagagggaaagtggcatattgtcatgaattttagttggttctgaccaaaggaagaaacaggctcttaaactatccctcaccctgccctgtccaaaatcaaaaatcctgagacaatacttctaaatttgaagaaaagcagattgaaggggtatcatttcattttctcttaaatttcgtgattttttaatgttaaatttaaataaaatcaatttattttcattaagcagttttatagacacagtattttcagttactacagaagaatgttacatggaaagctgtctgcaatagcatttatttaatatcatcttaatattagtaatttttggacagtaaattgggagtgatttcatcatttctgttaaagttttctgtgtagtaaatatgtgccattttataaaatcaataaagtcattattctaaaatgtgtatagtaagaccaaaagaccaaaattgaatacgtgaaaaaattccaggcactggaaaaataaaagcaggaaataaaaagtgagttgcgtgcgtgtcatcaggatctgattaagtgcttacaggaccaagtgttggctctgaaagagccagttcaaaaacagaaatgcagttcgtccaatggtttgaagacttttgtgcaggacatcttcagcccactatatgaaacagataaaagtgtagatgttctggctgaaatgagggagaagaccccaaaaacttctgcctgctcctaaactcgctccaacacacacacacacacacacacacacacacacacacacacactctctctctctttctctccccgccacacacgcacacatgctgactctctccatctcacacactctgtctctctctctcacacacacacacacacagagcacttgaagaggtcctgagctgaaaatggcagtgcagcatgagtgtctcagtgaagcctcagtgttgatgtgctgataacagagcaaataggtttctccttggctttcccaaacgagttgaccttccatcctctaaatcaacaccctcccaaattggatgtacgacaagccatcagaatgtgagaagaaatggtagaaccacgatttatatatgccttttatctaaaaatcttaaaaagtaatctctactaatatttactgtatagattgttggccctggtgccatcactgaaagtgagctctcctctgacatcacctgttagtcttgcacattattgcatgtcttggacctagttatgtagtactgtcaaagtaccttaagggtagctgggagtcccacaacacagaggacttgagaatgagcccctcacttgtttgttcactttcagcattatatgacttaatagtttacagatgctcaactaaatgaatttgcagagtttgtttaccttgttttaattgaattgaccctcccaataccgacactggtttgaggtttcggcaaaaataaccacaacaaaaaaccccataagacaaagataatatttgtaatgcagatacaaacaaataataagagaaatggctgagctgacacttcttttactaggaagtagcagaagctctgtgtcatcctcattgttaggtaaaaaagaatgaagatctaatcatatctgacatgaagtgggccagaaattccactgtttcagtagactgtgtgaaatgtggaattgcttttatatccatccccttccagtccctgaaaggctatatcaaaacccaatgacattgaatgcatccaagtagggaaatcgggggtgagggcatttcattatagacccctttaaattttgaaccacaagaatatatttctattaaaaaataagtaaaattaacattaatagaaatgaggatttacaattttttataatgggccattaaagtaaaattaaagctttagtttcctatttcatcttgatcttattctactttatgtatttttgtttatatactatattagtattatagttgaaacattttggcatttcatgctgagaactttcttgccactatggggggataatttaattgctgaaagatcactgctccaagtcagcccatctggatacccagaaattccctttggcacctcccaaattattgcttccccacatctctcccctccatcactccacaaagataaatatctgttgccagtatctgtccattcttcctttggagtttgtcttaaaaagacaaaatccaagtagagggaggagaagaacaatttctattttgcaggaaagaaaatggccttgatatgttgtacttgaaccttatctcatgcttttctgttctcagaatgtttattttttttatggtctcactagcagcaataatagttacacttcaaaaacattttccaaaaactatccttaaaaagagctaggaagtttttttgaaatagaaaggcaaacttgtgtggggaggatgaatggacgaaggcttcagtttgaagaaggttctagtctttttcaacttctctataggaagagaactccagagatttggaagaattacctaaaaccagttctgagacaaatagcactacctcaagggtcatggaagaaaaaggtgagtaaaatatctgcttgggtaaattgactgagccttcaaagcagccagcgtgtctctcaaccgaaacgtctattttgctcatttacttttcctgtgtaataaagtgcctcatgcttaagattaatagggctagggaatcatttttaatttggatcctgctatactcaaagtgtgctgtttactagtcacccaaactcaggcttgttaattttgatggtagaaacatgaaaatggagtgtgtggttatgtgtggctgcagctgtgtaggtcacctgggtaaaggtggggaaggctgaccatggtcactagcattgaacaaagttcttccttttctacagatgaatatagcagcagtgaaactactggtgaaaagccagagcagaacgatgatgacaccataaaatctcaggaggtgagatgtgcttttcgtatttgtttgttcacaattatttaagcactaaccaaattaaattcattaaatactgttatcttgagtttttcttaagtactttgaagaagctgcggtttttttagtgcaatggaacaccatttcatacagtgcattttatcagtgtcattttgattaatttttttctcttcatctttgtttcttcaaaacatttgtatgagacccacttatgtcatagccagataggatcagcttagtgctctacgtcagcggcaatgtcaggttcctggcctggcaatgctgagctgccaggccaggcacatggcagcaaacaggaggctgtctgagccatggagtccagctaggatgaaataggaacagcagcagggtgtgcagaaggcatgcagggaatactcgaggggacctagttcatgaggcaaggtcatggattcctggaggctgcatgcacagacagagcatcccagccctgcctgctgtaagcccatagattttcagggagcctgtggagcagagaattgcagtggcttgagactgagcaccataaatcaagagacacagcctgtgcactagccgggtctagataaccattgccaggtttgcccattgttaaatcatttgttattgttctgtctgtatgatatattcagtggacccctttattttttataagggtatcatttggtcacaactaacttgggccaaatcccaaattaaatggacatacatacttattacagaagtaaaaggttacactttgattacttcattgtctcaaaatcctcatggctccattaatttatgacagttagtgatatttatcaggttgaagaagcaatggtgagatcagtaaataaaacactaagccctacatcacatatttttaaagtgacaaagctaggatttgaggtctcttagacaggaactctaaatctgatttttgagaaaactttatataataaaggataaaattttttttcttattgctgttgttgttttttatttcccccttaggaagatcagccaataattattaaaaggaaaagaggaagacctcgcaaataccctgtagaaacaacgttaaaaatgagtaggtacttggtgtgttttcagttcacacacaagaaattttcgaaccgattttctaagtgaattttttttttttagaagacgactccaaaacagatactggcattgtcactgtaagtaattgcaaaacatgacaatttcaaatacttgctcttaacctgaaaaacggtataatgcaatatctagtattttgaactttattttttttacttgaaaagctttaaaagactgagtaaccattcatatattttgattactagtatctttgtgtaaacagagttacattagttgttcttcattctgattccattctaattcaggagtttgattatttaaaaattatctagggatttaacttcttgtggccacccttggttaaaatatacaaattagctattttataagattttgagatagtggcttctttatagagacttgtgagttgtcttaccatcttactactttctttggaattctttttgacctaaaatattcactgagttcagtgcaggaaactccttagtgatattttatgtttgaacgttctttatctttgaccctgacgtatacccaccaaaatcattgtatcaggattccatcgcatgcatttcaatggattattataaggaggacattacaagaagagcattgtaaggaggacagacgtgtgttcactgacctaacaaaacaacatgggattcaagcctcagctttgtcacttatcccgagacctgtgacttagggccaatcatgggaccctctggtgactcagtttccttgaatgtgaagtggtatgatgcctgcagtacttatctcatagaattattataagacaaaaccagagaagcacatgtgaatgcatttagcaacatgtaaaatggtttgccttgggaaacattaaccacagtggccatgctgcattgcctcacttctcatcctgtagcatcacaaaagggaagttacttattggaaagtctgtatttagaagctcaggcatccatgtttgctaggtatacttaatcaattacagaaaataggtctcaaatacgcctatgtaaataaagatcctataccacctttacatcattgattgcatttctatgtgatgattataaactgctgatttaaaatttttttttgtttgtttatttaaacataggtagaacaatctccatctagcagcaaactgaaagtaatgcaaacaggtatgtacctaccgcattcctctgtgtgttatctgagggaggggcaggagaggctggctgttggagaaggtttggaacttccattctgcctctcattgaagtgggtggcccccttggtaaaaataattgtccttgtatctgggagagactgtatctattggcttacagagcccaggactcaagaattgaaattgttttgactatttttctcctcattccaaggagaagaatatattccaaaatgttgataatgattagctctggagggtggaataatgggagcattccatattatttgtcaatattgcttgcattttccagatattttttgcaatgtatatgtatgcattttgtggtctaaaattttttacataaaacaagaggtgccattagtgagctttgaagtgttgatatcaacaacaaagattaatgtgacagctattttgtatcaaataaatagtatggtcagactgagaaagtacatattctcatcagcaaataaagcaaataggtaatatatagttgtttccacatttaactatgtgtgatcgtacttcattttttcttgtgtcttggtaaattaaggttcatttattttttgaaagaggaaggagattatgcacgtttggtcttaaccagtttttattaataattttgtagtattttgaatccatacaagaaatctttataacttcagtcccctttaaggactccaattaaagctgtgttattcagaatgttttctgaatgtgggtaaaatgatgaccattttaagacagtcctctttgttgacatttctattgggttaactttttcatcttcattggtattttaaacttgcaaaaaaggacaactactaccgtcactaaaaagaagtacctttgagtttttgagtgcctgatgaacatccccataatttcagcttcaactagtgcattgaactaatctttacttttcttaccatgatacagtctcagaaaattgtaacatctgcagaaagcaaatgcataaagaatgtatgtatgcaccctacaaacaggtcataaaatgtacttttttagctaccatgatgtatttggagtcaaaagaattctacctgtcactctacttgttagttatgtgactctaaacagattactcaagcctggtttgttcagactataggctgggatcataatacttgcagagctacactgaaattgaaaagtccatattagccaggtgtggtggctcacacctgtaatctcagcactttcagaggcctccacaggagaatcactggagcccaggagttggaggctgcagtaagctataattgcaccactgcactctagcctggccaacagagcaagaccctgtctcataaaaataaaacaaaagtaccagttatatatccttattcaaaatgcctaggacaccagaagtgtttcagattttgaatttattcagattttggaatatttgcatttcccagttgagcattcctaatcaaaattcaaaatgctgcaatggcatttcctttgagggtcatgttggtgctcaaaaagttttggattctagaacattttaaattttggatcatcagattagggatgctccgcctgtatatcattccaacttgcagttactggtacatattgtgggctccttatatgcccccttttttcttcttttttggggtcagaacatttaagctgaaagggaataagagtagtctaacccagccgggcgtggtggctcacacctgtaatcccagcactttgggaagccaaggcaggcagatcacctgaggtcaggagttcaagagtagcctggccaacatggtgaaaccccgtctctactaaaaatacaaaaaattagctggacatggtggtgggcacctgtaatctcagctactcaaggaggctgaggcaggagaattgcttgaacccaggaggcggaggttgcattgagccaagatcacgccactgcactccagcctgaatgactgagtgaaactctgtcttagaaaaaaaaaaaaagtagtctaatccaacttcttattttgcagctgaaaaaactgagggtcagcaaatttaaataaaatctgaaatgaaaacttatgtttcgtgactcacaatccaatgtgatctctgctaggtattctgattctatctttgcttgactgatacaagataatgatgaaatgtataacaatgtattaatactgatacattgacagacaagccaggctgattgttgaaatttaaatttacagtaataaaatattaatgcagagatttcccttttcttaaagatgaatccaataaagaaacagctaacctacaagaaagaagtataagcaatgtaagtgttaaatttcttatcaagatatgttgtttagaaatcaacttaaatgctcagctgaccacccttttgactttaattttattgcttctaggatgatggtgaagaaaaaatagtaacaagtgtgcgtcggagaggaagaaaacccaaacgttctctcactgtatcagatgatgctggtatgtttctagcaaattcttaataagtcttattgtttcaaaaccacctttttaaagagtttttctttgaatgaggaaaaatccaatgggtacagctaatattaatattatataaatatgtgtgaaataggtctaatcccgtgtcagaaatggtacatcccagatgcttttctgagtacatgtcaattttttatgaacgctggctgtgaactgcatatgtaaactatccaaaatgtgtttgagattaagttaaacagttgtgaattgcaagtgctgaaacaaaaaggaagtggaaaaccatttctctgcctccaagtccctaatatcctaagttctaaactccatgactctctctcttggaagtatctttgggaattgtaaaatccaggtgttacccttctatttgaacagaatcctcagagccagaaagaaaacgccagaaatcagtttctgatccagtggaggacaagaaagagcaggagtctgatgaggaagaggaagaagaggaagaggacgagccttcaggagccaccacaagatccaccaccagatcagaggctcagaggtaatgggggcagcacagagctgccagagaccttcaccagcttctccatctgaaaattgctctgggttttctgggattctctttgaactgaatcattcatgctgcagtggaagttcttccctttcatttttattgttagcagtgggcacatagttcttggagaacacattttctgtcctaaaccattttgggggattgcctcaaagtctttaccaggttttaaatgcctatttggtggaacccattcaattccttacaaatatattttttgagcatctgccatccttcagatgtcgtattgagcaccattcatgaatatggacatacataaaacatcatccctgctctcagcatacttaattcaacccagaaagcaggaggaaccaggcccacgcaccgtcatcacatgcatctcaccagtgctatgcaataggttgatcataggaaagtgcccaaatttgaccatttttgaggtaatttcatatatttcccaaaatgtgttctctcaaaccctattgtagccagaaacctctgagaaaaagagtaccacggtcagatgagtttgggaatgtcattgaattctctctccttcctcagttacatgttcattaaaatattaagggtttggcaaactccagggctgggcgcggtgactcacgcctgtaatcccagcactttgggaggccaaggcaggcgaatcacgaggtccggagatcgagaccatcctggtcaacatggtgaaaccccgtctctactaaaatacaaaaatcagccaggcatggtggtgagtgcctgtaatcccagctactcgggaggctgaggcaggggaattgcttaaccgtgggaggcggaggttgcagtgagctgagatggctccactgcactccagcctggtgttagagcaagactccatctcaaaaaaaaaaaaaaaaaaaaaaaaaagggtttggcaaactcctaaaggaaagaagcctgttgaactttgtttaaacaagcattatttgctgataccacttttctgttgttggcctatatcattatacctgttcacatcatccagtgttcctttccccatggcacatttgagaaatggtacataactgtattgtctcatcctaaccgttaatcactttcccaaacatgaatattttccaggctgagcacggtagctcatgcttgtaatcccaacactttgggagaccaagatgggaggatcacttgagcccaggagtttatgagaccagcctgggcaacacagggagaccccatctctacaaaaaaattagaaaattagctgggcatggtggcatgcacctgtagtcccggctacttgggaggctgagatgggaggatcgcttgagcccaggagcttgaggctgcagtgagctgtgatcgcaccactgcactctagcctgggtgacagtgagactctgtctctgaaaaaatatatatttttttaatttttaattaatgtgatttacaagctattaatcttggtatcatcttgtttaatttcattattcaagattgatcaaaaagttcaggaagatttatttcaaaaataacactaacagcataatataatagtatcttgtgtttacataaagaactaaaatcggggctgggcacagtggctcacacctgtaatcccagcactttgggaggctgaggccggcggatcacgaggtcaggagttcgagaccagcctggccaatatggtgaaaccccatctctactaaaaatataaaaaattagctgggtgtggtggcacgtgccagtaatcccagctacttgggaagctgaggcaggagaatcgcttgaactcgggaggtggaggttgcagtgagccgagatcacgccattgcactccagcctgggtgacagagtgagactccccgtctcaaaaaaaaaaaacaaaaaaaaacaaaaacttaaaatcaatctgtttctaattcctccagacttaacacagtattagccatttgtgccatggtttgatttctcaaagaatcagattttagagccaaaggactctagaagctcacacggctaaagttataaggtggtctcatatttgtttttttaggtggagcagctcacataaatagaaaagaagtcacagaatccaaattgctgctgctaggagagggtgagggtgctggagcccaacacccatgcatttgggtatagcatccatcccaccagaattactgcttccctttaaaacagttgtggaaagtagggctcaactcagagaaagttccataggccttctagccatcttcgagtgagtgtctagaaattgctctcagatttgccttttataaattctttaaaaataaatcttatttgatttatatggttctgtaatcacctggattatcaaagctcttccttcatgcactttataatataaacttttgatttacaaatgagttgttttctctctagtttagattccttggcattggttgatcagtcccagggctctggtgtcttcataattttacaaattgtctgagttgggtgggctctcagtggtcatgtagtaccaatagccagtcagtgcctgagtcactgcacctgcagctcctctgaaagggtcttcctgcttttgcatggacctcagtggcagggaaagccacatcctccttagcattctctgacttgtgttcagtagaagccggcctccctgtggcttctactcttgattctagttcgactttcagaaccttctgtctaattttgccttacatatttgagggcagcttccaggtcttctctgcttgcttattgagccccttcatcatccctgtttgtgctcatcagttacctttatcctcttttagaagcaaatgtgcagctgggcgcagtggctcatgcctgtaatcccagctactcaggaggctgaggcaggaagattgcttgaggctgggagttcgagaccagcctaagcaacatagcaagaccctcttaaaagaaaaaattaaattaaattaataaaatataaaagaggccacgcacagtggctcacgcctgtaatcccagcactttgggagtccaaggctggtggctcacttaaggccgggtgttcaagaccagccttgccaatatggtgaaacctcatctctactaaaagtacaaaaagtagccgagcattgtggcagactcctgtaatcctagctacttgggcagctgaggcaggagaattgcttgaacccgggaagtggaggttgcagtgagaagagattgtaccactgcactccagcctgggtgacagagcgaggctctttctcaaaagaaagaaagaaagaaagatagatagatagaggctctttctcaaaagaaagaaagaaagaaagaaagatagatagatagatagatagatagatagacagacagacagacagacagacagatagatagaagcaaactctgtataccaagtgtggtctaatgaatccagaagaggactgttctaccttattttctggatattgttcttcagtgtgcatcctcattactgagcctcaaattgaaaaatacaccagctaaacaagttcctttttcagagtttttactggaatcagaattccttatctgattcttgtgcagttgactacttgggccttaacacttagccttgtgaattgtactttcgttaatcttggccctttattctaccctgatgagctcttttgtaatctttattttgtcggccagtatattttctatttttcgcagatacatcttttttctaaatcacaataaaatatcatgcacagtaagaacaaagatagtgtcacacaagcagaggtagttgtagatgacattaagatcgacttatcagcagtggtcaggaaaaccaaccatttttctgattttagttcctattgttctgacttgcccacaaggagcctcatacttcctacagagttccagggactggagtattcagtgctaccattgcccagtgtttctataatctgtttcagaaagcaacatagcaagccatctgcacgtgcaacatccaaacttggcagcccagacacagtttctcctagaaatcgccaaaaattagcaaaagagaagttacctaccagcgaaaaagttagtaactctcccccattaggaaggtaagtccctgcttacacttcaagccatttttaaccccctaagactatttttggtacaataatgctttcttcctaatttcctttaagattttgtctcaccaaataactgtttttggggatcattggtttccaagaagaacaggaagggctgcagaaggtgtctgtgtggcctcaccagtctggccttgccgcagtggactgccacacaggcttgtccttgacacctgtgagccttatctgccttctcccatccaccaagaccaaaggcaaggcagtgtggtaaagcatttaacagcccagaatcatttctgttttagctagagcattggagaggtgatgaggtgataaagcttcctctttcaggcacggcccctgccagcttacacctttcactgcagccttactggtcttactgcttcccagaggtggtcctgagccttcctttcttgcctttgcttgagccagtgaggagtgtcctcaccaccagcacccctagtaagtcagatcctttccgtcccgcttcagcccattttcatctcttcttgctgcacttctggtcagtactgggcacttgagatgccacatagcattggtttggtatattccttttatttacccctctgagctctaggtttctttcttgagataggaatttgtcatactttctatacattatcatattcaaaaataaaagactcttcactgtacacaaaaactgttttgacctcttaccacattttcatcttcacagcatacttgtatgtatgtgctgttttccgcacattctagaaacgaaagcaaactatagtgccaggcagtttcacatacatgctctcatttaaccctcagtgagtgaattgtaatagttactcttattttatatgtgagggaaagaatctcaggaaggtttccatgcatactactcaaaattgaacatgcagtcaaatcacttgaggctgttggtaaaatgcagatcctgggtctgtaagtctaggctggggcctgagagttggcatttccaacaagctcctcagtgaccaatgcccctcctcacagaccacattctgggtggactagaagggcctggataaactacgaagctcacatggctggggagaagcagcctgactcagagcttctgttggctgccacttggcccccagcacaatactgcgcacggcacctttactgaagaggtgttcattgagtggctggtggctttccatggaaacagtttgaaatggattatcaacaaacacattttcagtcattgtcaacacatgtcaaaaccacatcatctgcaacaatttttgactcagtttatttacttttgctgtcaaacaagaaacggaagacgtgtcttcatatcactaagagtcccatttctccatctcctgcaattttggttttccaactctttgattcattgacaggacatttactgcccgcttgccatgtgttgggcattgcactaggcactggagttagaaaaatgaataaatctcagcagctgccctagagaatcatcgtgtctaatgggggagatatatgtgtataagactttcaaacttttttggcaacaacccactataagaatattttgcaatacagctggtgctcacattcctgctgctgtaactgaaacaaaatttcatgagtcaaatttaatagatgtgatatgagtggtattttctgttgtgtcctattaacatgttgttttaaaatattgattgtaacttgcagtttgaaaaaacacagcagatgaatcacaatggtaaatgctgtggtaaagacctaaagtcttcatatcaataaagtcacatttctctgtgggggattccaaagatggggcatcttgctttgtgatgtggaaggtgcaggactacaggcccagatggtgcacaagtagaaggcagaactataaaaggctctggatgattttctcctgaaagcatcagagacccaagaggaacttcatacatctctaggacagtaacatgattaattggagtttccaacaaataattttaatcacagactatatcaacagggtatgctggtgatagggagattggttagaatgttcttctgaaattcccgtgccttttctaacacaggtattttctgtaatactgtgctacgaaacatgattttgcacttggtccaacctagattgcagtcctgctgtgttcttgctagttgtttgaacttgggacagtctgtatattggtgggacccgctgttgatgtctttgttttctagatgaaagaactagggcccagagaaggaagtggatttgagcaccatcagcacctagagtgtggtagagctggaaccagagcacaggcttcaaacttctcttccagtgtcctgtgtttgtgtgtgaggttgacagcaaataaccagttagttcaagctcttcgcgaggtagctccttttcatgtataaatgttactgggtttttctcttcttagctgtcaagttcaaaactcttctgttttttaaggaactcccaagttatttgaagcagctgcttttaaacctcaccattgccttgactttgcttaatgcagatcaaagacacagctctccccttctatcaagcgcaagagagaagtcagccctcctggggcccgaacaagaggccagcaaagggtggaggaagcccctgtgaaaaaagcgaagcgataatcctgaccactgctgccctaggcttatggaggaacacggtggagaggaaagagacatgccttggtggccataggcttctctttaaccaggaaaaagatatgcatgtgctgtaagtccctaggtgcaagctttttcttgttatgttttaaacagctttataaactattgttcatagaagatattatgtacatttatttcagataaaggacaataagtttactttgtatctgaactcaaaacaaagtagttgtatattttaacattcaaaattgggatttcccaatgtgacacatcatgaatgcaaacccctccagcccatcagacgccaggctgcctactggtaatctgtgtatagtatataaacatgtaaaaataggttgtattttactctatgtatgatgctaatcaatgaacactttatttattttacagagaaaacttatctgtgaactttactatatatctgtttattttactttattttttttttaaataaaaagggttttaaatgctatgcagtcattagtagaaaattttttaggactctgcctgctctgtaactatcttaatatgatctggcagaaactcgcatgtatccaagtaaagtagtttagctaaagaaaggttcttcattgcttttctgttcacagttgtggctctgttttttaagaatgtaacttgtttttagattatacttgcatctgtgactttactaccagccacgttgacacaaaacaggttctggttcaggtaaagttgcgtcagtcacctgcagcagaaatccctcttcattcctcttctctgtgttcattcctcttctgtgctgttctgaagcttctaccaatactctttccatattgtctttttcagtgaagagaaatgcattcaagattaggtccctcctgtctatccagtttcaggattttatgttgttttatacacagttatttcagtatagaaactggctttattgccaagtgtttttttaaacatgttttaactctcatatgagcaaactgtccaacttcagtttttcataagattaaacttcttacgatcaaatttgtctcttgcaatgatgtgatgagttgccaaataattgagattattttaaaatgttttgttcatattcttgttttataattaaaatttacattcagtgtgtatgggtttttttttttattttgactcttaatgtaaggtggatatttctgtcattttacatggtttcttactgagattttatatataaattataaaatgtttaccaaaa

SEQ ID NO: 6035 - DNA, 323 bp, Homo sapiens
aagagtggtgatatgacattgatccctgaacaagagccaatggaaattgattctgagccaggtgttgaaaatgtgtttgaagtatctaaaacccaagacaaccgcaataataattctcagcaagacattgactctgaaaatatgaaacaaaaaacttctgccactgttcaaaaggatgaattgagaacttgcacagcagattcaaaagcaacagctccagcttataagccaggccgtggaacaggagttaatagtaattctgaaaagcatgccgatcatagaagcaccttgaccaagaaaatgcatatacaaagtgctgtgtc

SEQ ID NO: 6036 - DNA, 640 bp, Homo sapiens
aaattgtaagcgttaatattttgttaaaattcgcgttaaatttttgttaaatcagctcattttttaaccaataggccgaaatcggcaaaatcccttataaatcaaaagaatagaccgagatagggttgagtgttgttccagtttggaacaagagtccactattaaagaacgtggactccaacgtcaaagggcgaaaaaccgtctatcagggcgatggcccactacgtgaaccatcaccctaatcaagttttttggggtcgaggtgccgtaaagcactaaatcggaaccctaaagggagcccccgatttagagcttgacggggaaagccggcgaacgtggcgagaaaggaagggaagaaagcgaaaggagcgggcgctagggcgctggcaagtgtagcggtcacgctgcgcgtaaccaccacacccgccgcgcttaatgcgccgctacagggcgcgtccattcgccattcaggctgcgcaactgttgggaagggcgatcggtgcgggcctcttcgctattacgccagctggcgaaagggggatgtgctgcaaggcgattaagttgggtaacgccagggttttcccagtcacgacgttgtaaaacgacggccagtgaattgtaatacgactcactatagggc

SEQ ID NO: 6037 - DNA, 606 bp, Homo sapiens
gttatatttttgttaratcagctcattttttaaccaataggccgaaatcggcaaaatcccttataaatcaaaagaatagaccgagatagggttgagtgttgttccagtttggaacaagagtccactattaaagaacgtggactccaacgtcaaagggcgaaaarccgtctatcagggcgatggcccactacgtgaaccatcaccctaatcaagttttttggggtcgaggtgccgtaaagcactaaatcggaaccctaaagggagcccccgatttagagcttgacggggaaagccggcgaacgtggcgagaaagkaagggaagaaagcgaaaggagcgggcgctagggcgctggcaagtgtagcggtcacgctgcgcgtaaccaccacacccgccgcgcttaatgcgccgctacagggcgcgtccattcgccattcaggctgcgcaactgttgggaagggcgatcggtgcgggcctcttcgctattacgccagctggcgaaagggggatgtgctgcaaggcgattaagttgggtaacgccagggttttcccagtcacgacgttgtaaaacgacggccagtgaattgtaatacgactcactatagggc

SEQ ID NO: 6038 - DNA, 628 bp, Homo sapiens
aagcgtaatatttgtaaaattcgcgttaaattttgtaaatcagctcattttttaaccaataggccgaaatcggcaaaatcccttataaatcaaaagaatagaccgagatagggttgagtgttgttccagtttggaacaagagtccactattaaagaacgtggactccaacgtcaaagggcgaaaaaccgtctatcagggcgatggcccactacgtgaaccatcaccctaatcaagttttttggggtcgaggtgccgtaaagcactaaatcggaaccctaaagggagcccccgatttagagcttgacggggaaagccggcgaacgtggcgagaaaggaagggaagaaagcgaaaggagcgggcgctagggcgctggcaagtgtagcggtcacgctgcgcgtaaccaccacacccgccgcgcttaatgcgccgctacagggcgcgtccattcgccattcaggctgcgcaactgttgggaagggcgatcggtgcgggcctcttcgctattacgccagctggcgaaagggggatgtgctgcaaggcgattaagttgggtaacgccagggttttcccagtcacgacgttgtaaaacgacggccagtgaattgtaatacgactcactatagggc

SEQ ID NO: 6039 - DNA, 640 bp, Homo sapiens; identical to SEQ ID NO: 6036

SEQ ID NO: 6040 - DNA, 513 bp, Homo sapiens
gagtgttgttccagtttggaacaagagtccactattaaagaacgtggactccaacgtcaaagggcgaaaaaccgtctatcagggcgatggcccactacgtgaaccatcaccctaatcaagttttttggggtcgaggtgccgtaaagcactaaatcggaaccctaaagggagcccccgatttagagcttgacggggaaagccggcgaacgtggcgagaaaggaagggaagaaagcgaaaggagcgggcgctagggcgctggcaagtgtagcggtcacgctgcgcgtaaccaccacacccgccgcgcttaatgcgccgctacagggcgcgtccattcgccattcaggctgcgcaactgttgggaagggcgatcggtgcgggcctcttcgctattacgccagctggcgaaagggggatgtgctgcaaggcgattaagttgggtaacgccagggttttcccagtcacgacgttgtaaaacgacggccagtgaattgtaatacgactcactatagggc

SEQ ID NO: 6041 - DNA, 612 bp, Homo sapiens
ttcgcgttaaatttttgttacaatcagctcattgtttaaccaataggccgaaatcggcaaaatcccttataaatcaaaagaatagaccgagatagggttgagtgttgttccagtttggaacaagagtccactattaaagaacgtggactccaacgtcaaagggcgaaaaaccgtctatcagggcgatggcccactacgtgaaccatcaccctaatcaagttttttggggtcgaggtgccgtaaagcactaaatcggaaccctaaagggagcccccgatttagagcttgacggggaaagccggcgaacgtggcgagaaaggaagggaagaaagcgaaaggagcgggcgctagggcgctggcaagtgtagcggtcacgctgcgcgtaaccaccacacccgccgcgcttaatgcgccgctacagggcgcgtccattcgccattcaggctgcgcaactgttgggaagggcgatcggtgcgggcctcttcgctattacgccagctggcgaaagggggatgtgctgcaaggcgattaagttgggtaacgccagggttttcccagtcacgacgttgtaaaacgacggccagtgaattgtaatacgactcactatagggc

SEQ ID NO: 6042 - DNA, 640 bp, Homo sapiens; identical to SEQ ID NO: 6036

SEQ ID NO: 6043 - DNA, 640 bp, Homo sapiens; identical to SEQ ID NO: 6036

SEQ ID NO: 6044 - DNA, 654 bp, Homo sapiens
aataccgcatcaggaaattgtaagcgttaatattttgttaaaattcgcgttaaatttttgttaaatcagctcattttttaaccaataggccgaaatcggcaaaatcccttataaatcaaaagaatagaccgagatagggttgagtgttgttccagtttggaacaagagtccactattaaagaacgtggactccaacgtcaaagggcgaaaaaccgtctatcagggcgatggcccactacgtgaaccatcaccctaatcaagttttttggggtcgaggtgccgtaaagcactaaatcggaaccctaaagggagcccccgatttagagcttgacggggaaagccggcgaacgtggcgagaaaggaagggaagaaagcgaaaggagcgggcgctagggcgctggcaagtgtagcggtcacgctgcgcgtaaccaccacacccgccgcgcttaatgcgccgctacagggcgcgtccattcgccattcaggctgcgcaactgttgggaagggcgatcggtgcgggcctcttcgctattacgccagctggcgaaagggggatgtgctgcaaggcgattaagttgggtaacgccagggttttcccagtcacgacgttgtaaaacgacggccagtgaattgtaatacgactcactatagggc

SEQ ID NO: 6045 - DNA, 647 bp, Homo sapiens
  SITE (29): n equals a,t,g, or c
cgcatcaggaaatgtaagcgttaatattntgtaaaattcgcgttaaatttttgttaaatcagctcattttttaaccaataggccgaaatcggcaaaatcccttataaatcaaaagaatagaccgagatagggttgagtgttgttccagtttggaacaagagtccactattaaagaacgtggactccaacgtcaaagggcgaaaaaccgtctatcagggcgatggcccactacgtgaaccatcaccctaatcaagttttttggggtcgaggtgccgtaaagcactaaatcggaaccctaaagggagcccccgatttagagcttgacggggaaagccggcgaacgtggcgagaaaggaagggaagaaagcgaaaggagcgggcgctagggcgctggcaagtgtagcggtcacgctgcgcgtaaccaccacacccgccgcgcttaatgcgccgctacagggcgcgtccattcgccattcaggctgcgcaactgttgggaagggcgatcggtgcgggcctcttcgctattacgccagctggcgaaagggggatgtgctgcaaggcgattaagttgggtaacgccagggttttcccagtcacgacgttgtaaaacgacggccagtgaattgtaatacgactcactatagggc

SEQ ID NO: 6046 - DNA, 640 bp, Homo sapiens
aaattgtaagcgttaatattttgttaaaattcgcgttaaatttttgttaaatcagctcattttttaaccaataggccgaaatcggcaaaatccsttataaatcaaaagaatagaccgagatagggttgagtgttgttccagtttggaacaagagtccactattaaagaacgtggactccaacgtcaaagggcgaaaaaccgtctatcagggcgatggcccactacgtgaaccatcaccctaatcaagttttttggggtcgaggtgccgtaaagcactaaatcggaaccctaaagggagcccccgatttagagcttgacggggaaagccggcgaacgtggcgagaaagsaagggaagaaagcgaaaggagcgggcgctagggcgctggcaagtgtagcggtcacgctgcgcgtaaccaccacacccgccgcgcttaatgcgccgytacagggcgcgtccattcgccattcaggctgcgcaactgttgggaagggcgatcggtgcgggcctcttcgctattacgccagctggcgaaagggggatgtgctgcaaggcgattaagttgggtaacgccagggttttcccagtcacgacgttgtaaaacgacggccagtgaattgtaatacgactcactatagggc

SEQ ID NO: 6047 - DNA, 640 bp, Homo sapiens
aaattgtaagcgttaatattttgttaagattcgcgttaaatttttgttaaatcagctcattttttaaccaataggccgaaatcggcaaaatcccttataaatcaaaagaatagaccgagatagggttgagtgttgttccagtttggaacaagagtccactattaaagaacgtggactccaacgtcaaagggcgaaaaaccgtctatcagggcgatggcccactacgtgaaccatcaccctaatcaagttttttggggtcgaggtgccgtaaagcactaaatcggaaccctaaagggagcccccgatttagagcttgacggggaaagccggcgaacgtggcgagaaaggaagggaagaaagcgaaaggagcgggcgctagggcgctggcaagtgtagcggtcacgctgcgcgtaaccaccacacccgccgcgcttaatgcgccgctacagggcgcgtccattcgccattcaggctgcgcaactgttgggaagggcgatcggtgcgggcctcttcgctattacgccagctggcgaaagggggatgtgctgcaaggcgattaagttgggtaacgccagggttttcccagtcacgacgttgtaaaacgacggccagtgaattgtaatacgactcactatagggc

SEQ ID NO: 6048 - DNA, 571 bp, Homo sapiens
aataggccgaaatcggcaaaatcccttataaatcaaaagaatagaccgagatagggttgagtgttgttccagtttggaacaagagtccactattaaagaacgtggactccaacgtcaaagggcgaaaaaccgtctatcagggcgatggcccactacgtgaaccatcaccctaatcaagttttttggggtcgaggtgccgtaaagcactaaatcggaaccctaaagggagcccccgatttagagcttgacggggaaagccggcgaacgtggcgagaaaggaagggaagaaagcgaaaggagcgggcgctagggcgctggcaagtgtagcggtcacgctgcgcgtaaccaccacacccgccgcgcttaatgcgccgctacagggcgcgtccattcgccattcaggctgcgcaactgttgggaagggcgatcggtgcgggcctcttcgctattacgccagctggcgaaagggggatgtgctgcaaggcgattaagttgggtaacgccagggttttcccagtcacgacgttgtaaaacgacggccagtgaattgtaatacgactcactatagggc

SEQ ID NO: 6049 - DNA, 640 bp, Homo sapiens; identical to SEQ ID NO: 6036

SEQ ID NO: 6050 - DNA, 639 bp, Homo sapiens
  SITE (88): n equals a,t,g, or c
aattgtaagcgttaatattttgttaaaattcgcgttaaatttttgttaaatcagctcattttttaaccaataggccgaaatcggcaanatcccttataaatcaaaagaatagaccgagatagggttgagtgttgttccagtttggaacaagagtccactattaaagaacgtggactccaacgtcaaagggcgaaaaaccgtctatcagggcgatggcccactacgtgaaccatcaccctaatcaagttttttggggtcgaggtgccgtaaagcactaaatcggaaccctaaagggagcccccgatttagagcttgacggggaaagccggcgaacgtggcgagaaaggaagggaagaaagcgaaaggagcgggcgctagggcgctggcaagtgtagcggtcacgctgcgcgtaaccaccacacccgccgcgcttaatgcgccgctacagggcgcgtccattcgccattcaggctgcgcaactgttgggaagggcgatcggtgcgggcctcttcgctattacgccagctggcgaaagggggatgtgctgcaaggcgattaagttgggtaacgccagggttttcccagtcacgacgttgtaaaacgacggccagtgaattgtaatacgactcactatagggc

SEQ ID NO: 6051 - DNA, 648 bp, Homo sapiens
gcatcaggmaattgtaagcgttaatattttgttaaaattcgcgttaaatttttgttaaatcagctcattttttaaccaataggccgaaatcggcaaaatcccttataaatcaaaagaatagaccgagatagggttgagtgttgttccagtttggaacaagagtccactattaaagaacgtggactccaacgtcaaagggcgaaaaaccgtctatcagggcgatggcccactacgtgaaccatcaccctaatcaagttttttggggtcgaggtgccgtaaagcactaaatcggaaccctaaagggagcccccgatttagagcttgacggggaaagccggcgaacgtggcgagaaaggaagggaagaaagcgaaaggagcgggcgctagggcgctggcaagtgtagcggtcacgctgcgcgtaaccaccacacccgccgcgcttaatgcgccgctacagggcgcgtccattcgccattcaggctgcgcaactgttgggaagggcgatcggtgcgggcctcttcgctattacgccagctggcgaaagggggatgtgctgcaaggcgattaagttgggtaacgccagggttttcccagtcacgacgttgtaaaacgacggccagtgaattgtaatacgactcactatagggc

SEQ ID NO: 6052 - DNA, 624 bp, Homo sapiens
tattttgttaaaattcgcgttaaatttttgttaaaccagctcattttttaaccaataggcggaaatcggcaaaatcccttataaatcaaaagaatagaccgagatagggttkagtgttgttccagtttggaacaagagtccactattaaagaacgtggactccaacgtcaaagggcgaaaaaccgtctatcagggcgatggcccactacgtgaaccatcaccctaatcaagttttttggggtcgaggtgccgtaaagcactaaatcggaaccctaaagggagcccccgatttagagcttgacggggaaagccggcgaacgtggcgagaaaggaagggaagaaagcgaaaggagcgggcgctagggcgctggcaagtgtagcggtcacgctgcgcgtaaccaccacacccgccgcgcttaatgcgccgctacagggcgcgtccattcgccattcaggctgcgcaactgttgggaagggcgatcggtgcgggcctcttcgctattacgccagctggcgaaagggggatgtgctgcaaggcgattaagttgggtaacgccagggttttcccagtcacgacgttgtaaaacgacggccagtgaattgtaatacgactcactatagggc

SEQ ID NO: 6053 - DNA, 509 bp, Homo sapiens
gttgttccagtttggaacaagagtccactattaaagaacgtggactccaacgtcaaagggcgaaaaaccgtctatcagggcgatggcccactacgtgaaccatcaccctaatcaagttttttggggtcgaggtgccgtaaagcactaaatcggaaccctaaagggagcccccgatttagagcttgacggggaaagccggcgaacgtggcgagaaaggaagggaagaaagcgaaaggagcgggcgctagggcgctggcaagtgtagcggtcacgctgcgcgtaaccaccacacccgccgcgcttaatgcgccgctacagggcgcgtccattcgccattcaggctgcgcaactgttgggaagggcgatcggtgcgggcctcttcgctattacgccagctggcgaaagggggatgtgctgcaaggcgattaagttgggtaacgccagggttttcccagtcacgacgttgtaaaacgacggccagtgaattgtaatacgactcactatagggc

SEQ ID NO: 6054 - DNA, 654 bp, Homo sapiens
aaatacgcatcaggaaattgtaagcgttaatattttgttaaaattcgcgttaaatttttgttaaatcagctcattttttaaccaataggccgaaatcggcaaaatcccttataaatcaaaagaatagaccgagatagggttgagtgttgttccagtttggaacaagagtccactattaaagaacgtggactccaacgtcaaagggcgaaaaaccgtctatcagggcgatggcccactacgtgaaccatcaccctaatcaagttttttggggtcgaggtgccgtaaagcactaaatcggaaccctaaagggagcccccgatttagagcttgacggggaaagccggcgaacgtggcgagaaaggaagggaagaaagcgaaaggagcgggcgctagggcgctggcaagtgtagcggtcacgctgcgcgtaaccaccacacccgccgcgcttaatgcgccgctacagggcgcgtccattcgccattcaggctgcgcaactgttgggaagggcgatcggtgcgggcctcttcgctattacgccagctggcgaaagggggatgtgctgcaaggcgattaagttgggtaacgccagggttttcccagtcacgacgttgtaaaacgacggccagtgaattgtaatacgactcactatagggc

SEQ ID NO: 6055 - DNA, 546 bp, Homo sapiens
  SITE (20): n equals a,t,g, or c
ttataaatcaaaagaatagnccgagatagggttgagtgttgttccagtttggaacaagagtccactattaaagaacgtggactccaacgtcaaagggcgaaaaaccgtctatcagggcgatggcccactacgtgaaccatcaccctaatcaagttttttggggtcgaggtgccgtaaagcactaaatcggaaccctaaagggagcccccgatttagagcttgacggggaaagccggcgaacgtggcgagaaaggaagggaagaaagcgaaaggagcgggcgctagggcgctggcaagtgtagcggtcacgctgcgcgtaaccaccacacccgccgcgcttaatgcgccgctacagggcgcgtccattcgccattcaggctgcgcaactgttgggaagggcgatcggtgcgggcctcttcgctattacgccagctggcgaaagggggatgtgctgcaaggcgattaagttgggtaacgccagggttttcccagtcacgacgttgtaaaacgacggccagtgaattgtaatacgactcactatagggc

SEQ ID NO: 6056 - DNA, 654 bp, Homo sapiens; identical to SEQ ID NO: 6044

SEQ ID NO: 6057 - DNA, 1232 bp, Homo sapiens
gcaaagcctcttctaagaatagctgtgaagggagctggaagctatgagatcagaatgaataataatttttgcatttcacacaaaagccaggtaggaagtaaagcataatgggggcctcttggatgccaggtgtttaacacctgatggcatctaatcctcacaaaaaccttcactggtgccaccatgcccagatgagacatgagagggtctgagaggctgaggaacctgcccgttgtctcaccacaaatgctgacccagccaactgctcaccctggccccccgcccccagcccccaaacccagtcctttctacaacctgctctctctccaaatagcagtagtcagaggctgtgctgaggcctcccagaaacctttcccctatgtggatgtaaccttctcgagacctgcttttggagttcaacctgtgctgaaggggcagagaaaaatcctatggcaggaggggcacttgagataagcctcataggaggagagaagcttctccctgtgtggaaggaggcagcacacaggccacagagaggcgcagaagggacaactgaggccaagagaggcggaaggtccccagacgggttttctaaaatatctttctctgaatagcatttttacttaaatttgatatgcaaatgcagataattggtattcatgtaaatatttactgcttaaaacagaaagttacttgtaataggccaggcacagtggctcacgcctgtaatcccagcactttgggaggctgaggcaggcagatcacgaggtcaaaagatcgagaccatcctggccaacatggtgaaaccttgtctctactaaaaatacaacaattagctgcctcaggaggctgaggcaggagaatcacttgaaccagggaggcagaggttgcagtgagccgagatcgcaccactgcactccagcctggtgacagagcaagactccatctcgaaaaaagagaaagttacttataatagaaagcctgttcaaatgtggcaagtgcaacgtattcttttggaggctctaaacccaagcctgcaggtccctgatacgtcttctttgccatctagtggtagccattagaactgcatgtgtgggcccggcgccgtggctcacgcctgtaattcccgcattttgaggggccgaggtgggtggatcccttgagcccaggagtttgagacagcctggacaacatggcaaagccctgtcaaaaaatacaaaaaattaaaaaaa

SEQ ID NO: 6058 - DNA, 1232 bp, Homo sapiens; identical to SEQ ID NO: 6057

SEQ ID NO: 6059 - DNA, 2249 bp, Homo sapiens
ccaggtggaaagcaagtacctggccggtctgagaaggctgcaggaggccctgggggacgaagccagcgagtgctcagagctgctgaggcagcttgtccaggaggcactgcagtgggaagctggggaggcctcatctgacagcatcgagctgagccccatcaggtgagcctggcggcccaggaagggctggtctatgtgagctggcggctcctccccagctgccttgctgccaggtcctgccaaccatgtacaagtcctacacagcactacctcctctgatcttcacatgcattagtgtgcggctgcagctgagatggttcacgctcagaggaggcagccccctgccatggccctatagtacatttgcggcacaggctgcctccagagccccatgctttccatttatctaggctgcctcccaaatgtggctgcctcccagatgtgcctgtcagagaggggacgaggggagacaagcaggccatctcctctgcaccaaggccttgctgagcacagtggacatgggcagttaaatataacagaaaggagggtggctatgctcgaaggcccctggaggctgagtagtccagtggcaggagctcgagctttggagccagccctggccctctcaccgtgtgacaattccctttacctttctgagcctcgtactcagcctccataagatatgtgcaaagagctgggcacagtggctcatgcctgtaattccagcactttgggaggctgagatgggcagattgcttgaggccaggagtttgagcccagcctgggcaatatattggaatcctgtctctacaaaaaaaaaaaaaaaagaagagtggtggtgcacgcctgtagtcccagctactcggaaggctgaggtgggaggatcacttgagcccagaaggtagaagctgcaatgagctgagattgcagcactgcagtccagcctgggcaacagagtgaggccctgaaaagaaaagaaaagaaaggaaggggggaagggagggaaagaaagaaagaaaaagaaaggaaggaaggaaggaaggaaggaaggaaggaaaggaaggaaggaaaggaaagaaggaaggaaggaaggaaaaaaaaaagatttaggcaaacacacctgctttgcaggatcattaggattaaatgagatagtgcaggcagggcacagagtggaggtgagtcaacattgaataaatcaaaggccttctggaacgggtccccagctgtcccacctgtctgtcattggtgctgtctgttccccgtccacccctgcgcttactggctgtggtaagtggggttctgtatgcacagtgcaggactccttgggcctaaggctgcatggagtaataagagggtcctttatatttgcatagaattagtaaatatctcttgggcatttactgtgtaccaggcactatctaggcccccagcatcttacaacagaggatctcgttgggtctttaggaggcagagcagggattcccatatgcattatacagattcgcaatctgaggttgggagaactgaagtgacctgcccagagctgtgtggttaaccctcagtgaaggcagggcaggaacctggcctggggtcctccctgtcaccaccaccccttatctagggaagggctctgcaaggtgttgctaacgtgcacttttgctggcagtaagtatgatgagtacggcttcctgacggtgcccgactatgaggtggaagacctgaagctgctggccaagatccaggcattggagtcacgatcccaccacctgctgggcctcgaggctgtggatcggccgctgagggagcgctgggctgccctgggcgatcttgtgccctcagccgagctcaagcagctactgcgggcaggagtaccccgtgaacaccggcctcgtgtctggaggtggctggtccacctccgtgtccagcacctgcacactccaggctgctaccaggaactgctgagccggggccaggcccgcgagcaccctgctgcccgccagattgagctggacctgaaccggaccttccccaacaacaaacacttcacctgccccacctccagcttccccgacaagctccgccgggtgctgctggccttctcctggcagaaccccaccatcggctactgccagggcctgaacaggtaagccaccaaagcccagtgaaggtgtgatctttaccttttggagcgcaggtccccaaccctcagactgtggacaggcagccatctgtggcctgttaagggg

SEQ ID NO: 6060 - DNA, 2249 bp, Homo sapiens; identical to SEQ ID NO: 6059

SEQ ID NO: 6061 - DNA, 7071 bp, Homo sapiens
gtggggctggtgtccgagcacttctcgcaggccccgcagaggctgtccttctacagctggtacggcagtgccaggctcttccgcttccgcgtgcccccagatgctgtgcttctacgctggctcctgcaggtctcccgggagagcggcgctgcctgcaccgacgcggagatcaccgtgtaggtggctgcccgcccgcctgcccaccctcccgcgcctggccaagccctgtgcctgaacccggtgctgctctcccgtctccaggcacttccgttccggcgcccctccggtcatcaacccgctgggcaccagcttcccggacgacaccgcggtacagccctccttccaggtcggggtgccgctgagcaccacaccgagaagcaatgcctccgtcaacgtttcccacccggcccccggggactggttcgtggccgcccacctgcccccctcatcccagaagatcgagttgaaggtgaggggggctgccctccgggatggaggcagagaaccttgcggcgatggcctgtccctgccgttcacctctttggggtggtcctcgctctaggctccacgctgcactctggggccagccctgctccctgcatgccgggggcgtctggtgagaccatgccctcacacctgcattctctgacaccgcccccgcccacacctgttctttccctagggcttggctcccacctgtgcctacgtcttccagcctgaactgctggtcacgcgggtggtcgagatttccatcatggagccggacgtgccccttcctcagaccctcctctcccatcccagctacctcaagtgagcgggggcctggggggcagcccggctctgccctccggccccttctcagattcggtggagtgggtgcgagagcctggccctgagtcctggggttgggctgggaagtggtccagatgcctggcccccaccagagtgggctgaggaacagcagagcctgggcacgctgcgtccctgggctgaggaatggcagagcctgagccagctgtgtcccctcgctgcagggtctttgtccccgattacacgcgggagcttctgctggagctgcgggactgcgtgtccaatgggagcctgggctgccccgtgcgtctcaccgtgggcccggtcaccctgcctagcaacttccagaaggtgctcacctgcaccggtgccccctggccctgccgcctgctgctgccctcaccgccctgggaccggtggctgcaagtgacagctgagagcctggtggggcccctcgggacagtggctttcagtgctgtagctgccctcacaggtgggccgcacaagggctggagggatggccctgcccctccccagatccccagactttcctccagccaaaccccttgtcctctcggcagcttgcaggccacggagcgtgaccatccagccccttctgcagagcagccaaaaccagagcttcaatgcctcctctggtctgctgtccccgagccccgaccaccaggacctgggcaggagtggcagggtggaccgcagccccttctgcctcacaaactacccagtcacgcgggaggacatggacgtggtgtcggtgcacttccagcccctggacagggtctcggtgagggtgtgttcggacacgccctccgtgatgcggctgcgcctgaacaccggcatggacagcgggggttccctcaccatctccctgcgggccaacaaggtacctgctgtctgcaagcggcctgtggcctgggctcgggcagggcgccgggcaacccctgcagcgcctcctcatttaccttggcacgggacaggcggcacagtgacaccagcaggcacgggccaagacaggggcccatgttggggggcctcccctgctgggcagccttgttcctgtcaacaggccccggggctgtggggtagctcgggtcagaggtggggtggaggcaggatgtcccagggcccggggaggaaggtcccggtgcaccgtgggcctgcaggagtctcagagaaaggcaccagcaccggccgggcgcggtggctcacgcctgtaatcccagcactttgggaggccgaggagggtggatcacgaggtcaggagattgggaccatcctggctaacacggtgaaaccccgtctctactgaaaatacaaaaattagccgggcgtggtggcgggcgcctgtagtcccagctactcgggaggctgaggcgggagaatggcatgaacccaggggcggaggttgcagtgagccgagatcgcggcactgccctccagcctgggcgacagagcaagactccatctcagaaaaaaaaaaaaaaagaaaggcaccagcaccaggctgagctggcacgtggggcagatgaccccactgcggccaggggctgctggagctgagccggcaccgcctccctttccagacagagatgcggaacgagaccgtcgtagtggcctgcgtgaatgctgcctcgcccttccttggcttcaatacttcgctcaactgcaccacaggtatgatgggcaggcgtcaccgtcagcgtggccccggccagccccccgccccggcctcctctgatggggccctctggctcccctgcagccttcttccagggctaccctttgtctctgagcgcctggtctcgcagggccaacctcatcatcccctacccagagacagacaactggtacctctccctgcagctcatgtgccctgagaatgctgagtaagtaaacctagggcagagacgggggccaggcaccctgtcatttcactcaggaccacaggccgggctgcctgaggttggcgttcggagtgacccagctagaggggtgcttcctccagggctgctgaaagctgggggccctaatgctgcgttctcatgtctgtcagcctgttgggagcgctggtggcagctgggctgtcagatcactgcaccagctttcctgtggccccttcctcaaagggactgtgagcaggctgtggtccacgtggagaccaccttgtacctggtgccctgtttgaacgattgtggaccctatggccagtgcctcctgctccgcagacacagctacctgtatgccagctgcagctgcaaggcaggtgagtgccagggccccgcccgccccgagacgctgctgctgttggcttccagtgctgtgctgtgcctttcccctgggggagcgccgcaaggggctggagagagacccttgcagagcaatgcaggggcaaagcctcctccccactcccccattccccaccaacaatccgtctgcctggcacaggcaccaggtatccccggggggtggtactgcctcctgaccttggaccccgcccgccgtgcctaccctgcttgctcctgggtgaggaaggggcttctctgcagggtcctgggtgaggggtgggccctgaggttcagcagtgcccccagcctccgcgtcggggttttgtgaccgcaggctggcgtgggtggagctgcacggacaacagcacagcccagacggtggcccagcagagggcggccacactgctgctcacgctcagcaacctcatgttcctggcccccatcgccgtctcagtgcggcgattcttcctggtggaggcctccgtctacgcctacaccatgttcttctccacggtaggctggcccctcctgcagggatgtggggtgggagggcaggaccgcgctcatggagcctccccacagttctaccacgcctgcgaccagcccggggaggcggtgctgtgcatcctcagctacgacacgctgcagtactgcgacttcttgggctccggggcggccatctgggtcaccatcctgtgcatggcacggctcaagacagtcctgaaatacgtgagtggccctcgacgtggggtgtgggctccgggggagcagggcccccaagtgcagcctgcgaaaggcagtaccgtgggagaggccggacctggcgttgggcacggcccctggaaacctcacatctcggccgagcatggtggctcacacctgtaatccctaggccgagcatggtggctcacacctgtaatgccttggccgagcatggtggctcacacctgtaatcccaacacttgcaggaggatcccatgaggccaggggttcaagagcagcctgggctgtacaaaaaatcgaaaagttagccgagcgtagtggtacatgcctgtggtcccagccactcgggagactaaggtgggaggatcgcttgatcccaggcattggaggcgttggagtgagccgaggtcacagcactgcactccagcctgggtgacaaaagaaaagaaaagaaacctcatgtcttctgtgatgccacacggagatgcgggtctgagaccccgcaggcagttgtgagggggcagtgccagctgtttggaggatgccaggaaggaaggtggtaggcaggggaggccaggccccctgccttcgagaagcccccacccatgctccctgggtccttggggccaatgatgctttggggactctctgtggcagctggccctggcaaggggagactcatgccctgggcttgtgagctgcatgctctgccctcccatctgctctgggaactgcaggctgggtactgccccaagggggtgcccatgggagccccacagccagggcagaggggaggctgggaagcaccagggtcctgcagggctgagtgcggggcctgaacctgcagataggcagagaactgtaggctgtgggcagaggtgtctgatggagactggggggtgggagcccctccccatggaacagtgggtgggagactgaagccaccctgatgggggacttctagaaacccagtggtacagggggctagtgagtgtgtgggtgcagagcggccatatgcgtctgtccagtttgtgtgagcatcgtctaatcccccagagatgcctgcctggccacattcacctgtggatgcaatacagaagctgaaggaggggcatgtccctgccggctggcagagctagtcagaggctggcagagctggtctgagggtggcagcagctccgagggggcaggcagaggtgctgtggggccgtggggtacgcgtgctcctgctgggccttgagccctcagagacgtccctgcagtcatccctgtgtcttgcgcaggtgctgtttcttctgggtacactggtcatcgccatgtccttgcagctggaccgcaggggcatgtggaacatgctggggccctgcctctttgccttcgtgatcatggcctccatgtgggtaaggagccgggctggctggcactgctgcccaggtgctcggagaagagagcctggccccttgctctagccacgttcctggtcctgctccaaccagtgaatgcccatatctgctgggggttgccatggcacccacagaggcccagcatggctgtgtccctgaggcctgggcctgaggaccagtggccttgagccccctcgaagcagcccacccttgtcgttctgctgcccagacctgggcaggcccccagtaaccaccgtatctgggccctgggagctgcagccgcggccccacctgcactgatacctgcgtggctgttttctccaggcttaccgctgcgggcaccggcgccagtgctaccccacctcgtggcagcgctgggccttctacctcctgcccggcgtctctatggcctctgtgggcatcgccatctacacctccatgatgactagcgacaactactactacacccacagcatctggcacatcctgctggccgggagcgcagccttgctgctgccgccacctgaccagcccgccgagccctgggcctgctcgcagaaattcccctgccactatcagatctgcaagaacgatcgggaggaactgtacgcagtgacgtgacactggcctggggacagctgctgctctgatgacctcttcagccaggagctgtatcgagggggaggcgcctggtccagccctggacagattgatttccagctgaataaattggcctagataccctcttacttcctcctactgaggagagggccacccctccctcacacgcacctctcctcgccagctgcctgctcgctgctgagatccctctgcagatcccagctgctgtctgcagtggcccctggggcctgggcttggttacttggagaccacaggtgcctgtgcgagggtggggctgtgtgctctgctggcctgtgggtggctagagatggggagaaggactccctatggtcctgttccctggcgaggctgtggtgagacccatggcgcccaggagccctgagcccaccactggggccgggagctgtggactccgagacccctgctcctggcccctgtgtggccctgatgccagcctgcctggggcatggaggatccccctctgctgctgtggtcaccatagggacgggagacggaggtttcccccagagctgatgggcactggggatgcaggctcccgccccgcccctccctttttcctggctctggagccttgggtccctgagaagagcttccttggactggggtgctctgctgctctgggggtttggcccagaaggaacccctacccagccctgtccacccaccccagcgttcctgggcccccctctgggagcttcctcttggtcccaggagctgcggtggtgtctgccccctgcactgggctctgtgccctgtgggtgttcaggagactggactgtctctgctcctcatgcaaaccttgtgggggaagcaatgaccaggagcagcacctggcccctccctgaggcctgtgagtgtctcggatccgccctggagaagtgagtggctgagacccgggtggggccctcctacccttggctctgggggcttcccttctgggtcttgtccgggatatggccttcctgaaggtcttacctcccccagccgccctgcacttgaccaccaaagcaatctctaagcttataaaggagaaacatatatatatggggttttttggagtaaaggaaaattctaagatattaagacatatttttatgtagatctgatctatctgtgtttggtgaatttaatattctacattgatttttcaaactaaacgagtttttaca

SEQ ID NO: 6062 - DNA, 3158 bp, Homo sapiens
atcggcttccggttccggtgggctctgaaccctgaaaggtgggcgcgggcaggtggggtgtgggggggcgccggggcagaaggggaggggcaggtgggtgcgggacaggggccggagtgagaaccgggggccggggtagggggtagcgggtgagagccgggggccggggtagcgggtgagagccgggggccggggtagcgggtgagagccgggggccggggtagcgggtgagagtcgggggccggggtagggggtgagtgccgggggcctggccaggctgcgactgactgcgagcccccacctcccgccaggctcgcgatgcctctacacaagtatcccgtgtggctctggaagcggctgcagctgcgggagggcatctgttcccgcctgcccggccactacctgcgctccctggaggaggagcggacgcccactcccgtgcactataggcctcatggggccaagttcaagatcaaccccaagaacgggcagcgggagcgtgtggaggacgtgcccattcccatctactttccccccgaatcccagcgggggttgtggggcggcgagggctggatcctgggccaaatatatgccaacaacgacaaggtgggtccgcaggcggccttcaggggctcctctcagggcttggctgtgccggctctgtgccggacgcccggggtacctggagagacctgggtgggccctggggattacagcctggaggcgacacatctccggcaaaggagcacgctgagtgaagaaccgcagttctggcaaacaggactgataaagtaggggtgaggtggggtgactcaggccgggggagcaaccagaggccgtggggagtcggggtaaagttaggatggggaggaggcctgtgtgatgagcagagcaggtgggagaggcgagcagagcaggtgggggaggcgagcagagcttcgaggctgcttgtggtggacttcctggcgggactgctgaagcctgtggggagacttgtgtcacctccaggttggaatgtgacaacctgtaaactgtggggtcgcacatgtttctgaaacacatgcagcaaccatgtgaccagggcgggaacgcccagcttgttggggagcagctgacttctgggtacacagtcaggacccgggtcgggctggggcggcactgggctgggggccggcccagttagctctaggtccccagtctgacagcagtggttctgtgatggagcctccgggggggaggtgagggcagttgcctgggccccccttggtatgtaagagaaagcagcagtactcatggaggctctgttgcaccctcagctctccaagaggctgaagaaagtgtggaagccacagctgtttgagcgagagttctacagtgagatcctggacaagaagttcacagtgactgtgaccatgcggaccctggacctcatcgatgaggcttatgggctcgacttttacatcctcaaggcaagcggggtggggcgagtcagtgcacacagggtctgggatgggccagtcagactcacgggagccccaggtcagcatcacaccggggcacgctgacatctgcacaggagggtcactgggaaagcgtgagtggggccatgcccctttctggccagcaccagtggggtttcctgccttcaggagaggctgtcgctctgtgggtggctgacttgcccgtggggcctgagcgagcacagccgcccctttccctgcacttggacttgcttctgtgctgatcccaccccccaggctggggtgctgaggcggccccacccgggccttctctgtcctgtcctgggaccaccagcggctagagaggagccaggtgggttggctggaagggtaggtggggccctgccaccagcacctggccccatgtgagccttctgccagaccccgaaggaggacctgtgctccaagtttgggatggacctgaagcgagggatgctgctgcggcttgcccggcaggacccccagctgcaccccgaggaccccgagcggcgggcagccatctacgacaagtacaaggtgagggtttccgtcccgctccctacacctggggactcgtggcccggccctgggcctcactgccctttccatctctgcctgcctaggaatttgccatcccagaggaggaggcagagtgggtgggcctcacgctggaggaggccattgagaagcagagacttttggaggagaaggtgagtgtgtgagcaccagccgatgctgcctgcccagagcctggtgttcagggtctgggagtgtgctgccttggagagagcctgcacaaggggctggtgcactgggtgggcttggggaagagctgctgctctgcattgcccacccagaggagcatggcccgctccctcccctccaagtccccaccctgttctgtcccaggaccctcagtaggaggagtgggttcctgcactgagggtttgctcggccaccagcatcccagggtctggagcctgaggtagctgtcaggacagggagcccctgatggcatggcagctggctgcccctattccctctgtttatccatgaccacagggatgggacaggggtatgtgtgtgcctccggcatccccaagggagggggttcctcatctcaccgacaggactctgccctccagggcctctcatgccccggttcctctgggcggcagctgctgatcccatccccgtcggaactccagctgccctgggcttccctggcctcaccatgagcccctctctccttcaggaccctgtacccctgttcaagatctatgtggcggagctgatccagcagctgcagcagcaggcactgtcagagccggcggtggtgcagaagagagccagtggccagtgaccacacagctcctccatgcctgaccaacaggcccagctttccctgccaggccctttgcactgaggacacagatcccggggagctgtgagggccaccggtgggcagtgggtggatcctggtttcgtgtgctgcccatgcaccttccagcccggggccagcttggcagggatccccaggaggcctgggccgcccagaggctcctctcaggctgggccccgacgtttgcggcagtgttccttgtgcccgtggggccgggagcgagtaaagtctgggccaggctgtgtgtgtgtatcttt

SEQ ID NO: 6063 - DNA, 1533 bp, Homo sapiens
tttaaactactgcatcaggaaatattgtaaaacagttttgccttgaatatttgtgatgaaatctacgatgatcttcaagattctcttaattttgctaatattcagctgatcagaatttgtttttaaaatgtctggctggtgggtacttcccactgacaactgcttattgcttacagtatgtctgccttgtcaatgaatgaggttcagggtgcttcctagggatcagagtcagtaccatttttctctttcatctacagctgatcagatgtttattttacttacattaaatgaatgatggagatccaaagtgaatattatagaatattattctaggatcaacatcttttgctttgaaaaatcaacatctcttggcttttcctcagccaacccagcaaacagagattatcagactctgttgattttttactttcatttggcattggcctttttcttactgaaattaaaaaggctaatgatttgcctggtttctgtctctgacctttgcaggtctattttcttaatttttagatactatatatctgaaactttttttaatgtgtcaactttttaatggatagaaaatagacacgaatagtgattatgtgttcatttttcaattttccagaataactgaagtgaagtgatggactccgatttggagagtagtaagacgtgaaaggaatacacttgtgtttaagcaccatggccttgatgattcactgttggggagaagaaacaagaaaagtaactggttgtcacctatgagacccttacgtgattgttagttaagtttttattcaaagcagctgtaatttagttaataaaataattatgatctatgttgtttgcccaattgagatccagttttttgttgttatttttaatcaattaggggcaatagtagaatggacaatttccaagaatgatgcctttcaggtcctagggcctctggcctctaggtaaccagtttaaattggttcagggtgataactacttagcactgccctggtgattacccagagatatctatgaaaaccagtggcttccatcaaacctttgccaactcaggttcacagcagctttgggcagttatggcagtatggcattagctgagaggtgtctgccacttctgggtcaatggaataataaattaagtacaggcaggaatttggttgggagcatcttgtatgatctccgtatgatgtgatattgatggagatagtggtcctcattcttgggggttgccattcccacattcccccttcaacaaacagtgtaacaggtccttcccagatttagggtacttttattgatggatatgttttccttttattcacataaccccttgaaaccctgtcttgtcctcctgttacttgcttctgctgtacaagatgtagcaccttttctcctctttgaacatggtctagtgacacggtagcaccagttgcaggaaggagccagacttgttctcagagcactgtgttcacacttttcagcaaaaatagctatgggtgtaacatatgtattcccttc

SEQ ID NO: 6064 - DNA, 9692 bp, Homo sapiens
  SITE (4436): n equals a,t,g, or c
ccacgccagctaatttttgtatttttggtagagacagggttgcatcatgttgcccaggctggtcttgaatgcctgagctcaagcaatctatttgccttggcctcccaaagtgctgggattacaggcatgagccaccacggccagccttctcatttgttttttttataaggaagctatctcttcttccctccccaactagggtattctttttccctttcgtcactttgctcatgtactgtattccttcaacttcattaatgaatccatttggaagcagtgaaaaaggcaactcagaaagctaagaagaaatagatagaggaatactcagagctatctgagtattttctttagtttgttagctctttggagctttgaaactggaaagacccagggagtgatgtggagaaagagactgagcttgtaagacacaggagcagtgagctaagggagatggagtagtggggacaaattctggcacattctgtctacactctgggtagatagaggagggaggatggagcacccatggtgggggtatgttggtgacagcattttcccaccagccagtgtaacaagtggctgatttgggggaaagatggcataaacaaatgagagaatgtgtttactatttgatgtagatgggttatttgcttcatttttcaaatcagtgtatataatcaagaatattcagcatgtttgaatagactgtcagagctggaactctttcattaacatctctggcacctttagttttagccctgaacattttatcttaaaattaaacattaccaaatgccttagtttatttcatttattaaatttatattcttatttgttatttatatcagcttccaatcagaagactatacaacctcctagggtaagttaaagtttattaaatgaattgtgaatgatcatttgagggattagactgaggaacttggtaattgagatattttgctatctgttttgtctcacgtcaaattaagagaatggtgaagtcattgcatgacctttgcatgaatgggtccagttctattttaaaacctgtgtttggtcattttagtgtcaatgggatggaataaatgatttcttaagattgtactgacttctcacacccaaaactggaaagtaggaataatggctatattatctctgcaatcagaaggaagctgattccaatatatcacctcacctgttggattcattggatgtgcatacacagaatgacaatttcaggcttaaaaatgaggagaaatctatactaagttgacatcactgataattataatctataaaataaatgtaaatattgctgaaaacatctgttcggagttatgattcgatcctctcccatacaaatgttttataaacattttttcccttaaaactgtgcttaaggtttcattgtaccttagataccttattaagccatctgaggaaattgcaagaaaggagtaattttaggagggcataaatgaagagaaaagcatatttataaacatagacttatcacagtgacaggcccaagaggtatgttgtggacataagctctggaaaggattatattgtacttagcttcctataacggagtgatgatagatgtatctggaatgccaaagagagtcttctgtctgtggccggaggtagaggtcacatatgcttctaagtctgacaagcctcattgtgcctaaagggcaggtggggcgggtatgtgtgtctaccacaggggtatattctagaaagattggtgccatagctatgttggtcacaagaggccagcaacttaactggacctgtgaatcctaacacattttctttcccagttactgagttcaatttgcgatacttaaagatgattctgttttgcttccacctcttcactgtgttatttattctgttgttgctatttatgcttgcactttcatatttttagaagttagaatttcttgagctgagagtggtgaagtgggaaattctgtttagaaaaataatattaagagaataatacagttattattaaactattaacccgacttggcaagctttgctttaacatttacaggcttatttcgttgttttgttttttcttttttttttgactgtaggatttactgcttactacgtaatttaaatattagcatatataagttttactataaaatgacatgacataaattatatttttatgtaaatatattttaaatatttttcagaaagctgtagaggaaccccttaatggtatgtggttatttcactcttaatcctttaccagatcataatttgatctggcccgcaaaacagttagaatgccctgtctatgccttaggaagaatctaggtttttttcctctttttttctttccttggcatctctactcttgattattcatcaagaattatgggctgggtgcggtggctcacgcttgcgatcccagcaccttgggaggccaaggcgggcagatcacgaggtcaagagattgagaccatcctggccaacatgttgaaaccctgtctctactgaaaatacaaaaattacctgggcatggtggtgtgtatctgcagtcccagctactcgggaggctgaggcaggagaattgcttgaacccggaaggcagatgttgcagtgagttgagatcatgccaccgcactccagcctggtgacagagtgagactctgtctcaaaaaaaataaaaaagaattatgaatattacttttataatattctcaccactgggaaaaatgcactattctgtgtctaagtagctgcttaccttaaccaagtgatatttgggcaaggggatcgttgccttttgctactggttgagacgaagcatggcaccccctagtagagaaggatcccaattacttccaatttgtgatgtacacattttagaaagatacaggctattgccacagagatagaccaaaacatctcattttctttctttgtaaacctagatctgatttcccaactaagtctgtttcctttgtgaatgctgtgggtatgatccacagaaaggctacataatgaaatgatagctttacaattaatttggctgtagagttgtagactagttagcatatcattgcatatttgtttatttagaaatgatttccaattgtggaacctcactaactgcctgcttggcttgttactaatcctagcattcaaagaatcaaaaggaatgatgaatgatggtaagtataaaatgcacttaataattatagatcagttaaaacatggacattggaaaacaaaaaagcttcttgaaaatgtggctcttttttagtaaaagggacactgtcagatgataaaggttcacatttcttgatgtatacaacttaaatctactttgctaaaaattgcaaaactactactgtaaaaactgtagggtgtcacgaatcagactccagtcatatggctcccagcaaagagaaattaccactttttgtaaaatgtttttcagattccgtgtctggtgactgtaactttaagatgccttttataaggcacataaataatctggcacaaatctttatcattttgacagagtttcttttatgcttgtgttggtgattttgttgcatttaaccccatggggacttaacatctctgcttttccaatcaggagcttggttctaaccttttgggagatgattaaagagagaggttgagagagagagagagagagagagagagagagagagagagatgtttcgtcctcagcttttgcttccattttttttttaagaactctgggctaataacttctaatctttatagaatatttcaaagaaatatatttgttcttaaagatacataggtttgagatattgagtgctacaagcatttattttggttttaccttaacatattatgattcctcagttttgttggcatttagtaattatgtttatgtttttatcttatcaaaaaatgtcttcttacctttgatatttataatcactcctcggtcatgtaaatagtttgctttatattttactgttttaaagtctgtgaccttacctgccctcttctgtagcaaagtgcagcatttaactcaggaagctatattccccccaagtgtcattaatatttgcataagattaaaaacactccagtcggccgggcgcggtggctcacgcctgtaatcccagcactttgggaggccgaggcgggcggatcacaaggtcaggagatcgagaccatcctggctaacacggtgaaaccccgtctctactaaaactacaaaaaattagccgggcatggtggcgggcacctgtggtcccagctacttgggaggctgaggcaggagaatggcgtgaacccgggaggcagagcttgcagtgagccaagatcgtgccactacactccagcctgggtgacagagcaagactccgtctccagaaaaaaaaaaaaaaaaaaaaaaaaancactccagtcatgcattggtgaacaaagtttaaaacaacgtgtattcagcatggagtcacagaatgatcctacttttgtatgtttgtgtcacagcctttaaaagcatgtcttgttatataagccattaccctcctaaaaaagactatagttcacaggaataagttaaaagacataacaaaacataaaatgactagtaccaggaattgtgaccatggtttgttctggtaactgtggcatggcatggtttgttccaggaattgtggcatggtttgttcatgtttacattctgatgtcctattttttttttttaatttctatgtcctttccttttccttggtggtgtcattgttctgtagctgtatgaagaaactaaacttttctccattttcaggaaagcaatctaagaatcttgagtgcctcttcctttgttaatttctcttaagatgtgacttttttaaactactgcatcaggaaatattgtaaaacagttttgccttgaatatttgtgatgaaatctacgatgatcttcaagattctcttaattttgctaatattcagctgatcagaatttgtttttaaaatgtctggctggtgggtacttcccactgacaactgcttattgcttacagtatgtctgccttgtcaatgaatgaggttcagggtgcttcctagggatcagagtcagtaccatttttctctttcatctacagctgatcagatgtttattttacttacattaaatgaatgatggagatccaaagtgaatattatagaatattattctaggatcaacatcttttgctttgaaaaatcaacatctcttggcttttcctcagccaacccagcaaacagagattatcagactctgttgattttttactttcatttggcattggcctttttcttactgaaattaaaaaggctaatgatttgcctggtttctgtctctgacctttgcaggtctattttcttaatttttagatactatatatctgaaactttttttaatgtgtcaactttttaatggatagaaaatagacacgaatagtgattatgtgttcatttttcaattttccagaataactgaagtgaagtgatggactccgatttggagagtagtaagacgtgaaaggaatacacttgtgtttaagcaccatggccttgatgattcactgttggggagaagaaacaagaaaagtaactggttgtcacctatgagacccttacgtgattgttagttaagtttttattcaaagcagctgtaatttagttaataaaataattatgatctatgttgtttgcccaattgagatccagttttttgttgttatttttaatcaattaggggcaatagtagaatggacaatttccaagaatgatgcctttcaggtcctagggcctctggcctctaggtaaccagtttaaattggttcagggtgataactacttagcactgccctggtgattacccagagatatctatgaaaaccagtggcttccatcaaacctttgccaactcaggttcacagcagctttgggcagttatggcagtatggcattagctgagaggtgtctgccacttctgggtcaatggaataataaattaagtacaggcaggaatttggttgggagcatcttgtatgatctccgtatgatgtgatattgatggagatagtggtcctcattcttgggggttgccattcccacattcccccttcaacaaacagtgtaacaggtccttcccagatttagggtacttttattgatggatatgttttccttttattcacataaccccttgaaaccctgtcttgtcctcctgttacttgcttctgctgtacaagatgtagcaccttttctcctctttgaacatggtctagtgacacggtagcaccagttgcaggaaggagccagacttgttctcagagcactgtgttcacacttttcagcaaaaatagctatggttgtaacatatgtattcccttcctctgatttgaaggcaaaaatctacagtgtttcttcacttcttttctgatctggggcatgaaaaaagcaagattgaaatttgaactatgagtctcctgcatggcaacaaaatgtgtgtcaccatcaggccaacaggccagcccttgaatggggatttattactgttgtatctatgttgcatgataaacattcatcaccttcctcctgtagtcctgcctcgtactccccttcccctatgattgaaaagtaaacaaaacccacatttcctatcctggttagaagaaaattaatgttctgacagttgtgatcgcctggagtacttttagacttttagcattcgttttttacctgtttgtggatgtgtgtttgtatgtgcatacgtatgagataggcacatgcatcttctgtatggacaaaggtggggtacctacaggagagcaaaggttaattttgtgcttttagtaaaaacatttaaatacaaagttctttattgggtggaattatatttgatgcaaatatttgatcacttaaaacttttaaaacttctaggtaatttgccacgctttttgactgctcaccaataccctgtaaaaatacgtaattcttcctgtttgtgtaataagatattcatatttgtagttgcattaataatagttatttcttagtccatcagatgttcccgtgtgcctcttttatgccaaattgattgtcatatttcatgttgggaccaagtagtttgcccatggcaaacctaaatttatgacctgctgaggcctctcagaaaactgagcatactagcaagacagctcttcttgaaaaaaaaaatatgtatacacaaatatatacgtatatctatatatacgtatgtatatacacacatgtatattcttccttgattgtgtagctgtccaaaataataacatatatagagggagctgtattcctttatacaaatctgatggctcctgcagcactttttccttctgaaaatatttacattttgctaacctagtttgttactttaaaaatcagttttgatgaaaggagggaaaagcagatggacttgaaaaagatccaagctcctattagaaaaggtatgaaaatctttatagtaaaattttttataaactaaagttgtaccttttaatatgtagtaaactctcatttatttggggttcgctcttggatctcatccatccattgtgttctctttaatgctgcctgccttttgaggcattcactgccctagacaatgccaccagagatagtgggggaaatgccagatgaaaccaactcttgctctcactagttgtcagcttctctggataagtgaccacagaagcaggagtcctcctgcttgggcatcattgggccagttccttctctttaaatcagatttgtaatggctcccaaattccatcacatcacatttaaattgcagacagtgttttgcacatcatgtatctgttttgtcccataatatgctttttactccctgatcccagtttctgctgttgactcttccattcagttttatttattgtgtgttctcacagtgacaccatttgtccttttctgcaacaacctttccagctacttttgccaaattctatttgtcttctccttcaaaacattctcctttgcagttcctcttcatctgtgtagctgctcttttgtctcttaacttaccattcctatagtactttatgcatctctgcttagttctattagttttttggccttgctcttctccttgattttaaaattccttctatagctagagcttttctttctttcattctctcttcctgcagtgttttgcatacatcagaagctaggtacataagttaaatgattgagagttggctgtatttagatttatcactttttaatagggtgagcttgagagttttctttctttctgttttttttttttttttttttgactaatttcacatgctctaaaaaccttcaaaggtgattatttttctcctggaaactccaggtccattctgtttaaatccctaagaatgtcagaattaaaataacagggctatcccgtaattggaaatatttcttttttcaggatgctatagtcaatttagtaagtgaccaccaaattgttatttgcactaacaaagctcaaaacacgataagtttactcctccatctcagtaataaaaattaagctgtaatcaaccttctaggtttctcttgtcttaaaatgggtattcaaaaatggggatctgtggtgtatgtatggaaacacatactccttaatttacctgttgttggaaactggagaaatgattgtcgggcaaccgtttattttttattgtattttatttggttgagggatttttttataaacagttttacttgtgtcatattttaaaattactaactgccatcacctgctggggtcctttgttaggtcattttcagtgactaatagggataatccaggtaactttgaagagatgagcagtgagtgaccaggcagtttttctgcctttagctttgacagttcttaattaagatcattgaagaccagctttctcataaatttctctttttgaaaaaaagaaagcatttgtactaagctcctctgtaagacaacatcttaaatcttaaaagtgttgttatcatgactggtgagagaagaaaacattttgtttttattaaatggagcattatttacaaaaagccattgttgagaattagatcccacatcgtataaatatctattaaccattctaaataaagagaactccagtgttgctatgtgcaagatcctctcttggagcttttttgcatagcaattaaaggtgtgctatttgtcagtagccatttttttgcagtgatttgaagaccaaagttgttttacagctgtgttaccgttaaaggtttttttttttatatgtattaaatcaatttatcactgtttaaagctttgaatatctgcaatctttgccaaggtacttttttatttaaaaaaaaacataactttgtaaatattaccctgtaatattatatatacttaataaaacattttaagctattttgttgggctatttctattgctgctacagcagaccacaagcacatttctgaaaaatttaatttattaatgtatttttaagttgcttatattctaggtaacaatgtaaagaatgatttaaaatattaattatgaattttttgagtataatacccaataagcttttaattagagcagagttttaattaaaagttttaaatcagtccaa

SEQ ID NO: 6065 - DNA, 16423 bp, Homo sapiens
tttcttttttaagcacttaaatatagatccggtggtatggatgagaaaacaattgctttacttgttgctggactagtgatcactgtcattgtcattgttggagccattcttttcgtcccaggtaagatgtgcagttcctaggcaggaacgcaggaggtagatgagtgcattccaaggtgaggagggctgcattagtttcctagggctgttggaacagatgaccacaaactgggtggcttaaacaatagcaattccctttccatgctggaggccataagtctgaaatcaggacgtcatcagggccacactccctctcaaggctgtatggaagaatccatttcttggctcttctagcttctggaatttgctgaagaatgacagtgtttatcattccttagtttgcggcagcataactccaccctctgcctctctggtcacattgcctcctccttcctctatgtctttgcctctgtgtttttgttaaatctccctcagcctctctcttatgagcacatttgtcattggaattagagcccactcatataatccagggtaagctcctcctttcagatccttaacttcatcatatcttttgccatataatgcagtattcactcttttgctgtattaggtaatattcacaggttttagggattaggaggtagaaataattttagggccatcattcaactcactacagaggcaaacttcattggccaagacatgaaagtagaatgaatgtgggaaccaagtctggaaattggcagttgcatttggaggatgggaatgtgagtgggaaatgaggatatgtagcacatgtaaagaaaagcaaaggaaggctgggactcaacctaataactatagcacaccatcgtttgtggagaagaatgcagtgcaggtgtaatatttaggaacatgggcttggcagctctattggtatctgaagttagtgaagacagcaggaagaaggaggtgaattcagaagacaacttgaaggaacaattgatttgactttggggcatactgaatacagcagatgaagggaacagtaaaagatgaatacacagtttctcactggaattctgtaaactagttaagaaggaggcagagccaattcaaggtttcagcatgttgaaacttaaatgttgagatttagatgtcttaagtttggtcttaatcaaaaaatagtcactaattttgtgtgaggttttcagggaaacgtatatttttaaaattttcacagttgtcaagcacagaatttagattagtacatttaaaaagtatgtaggaaaatattttaaatgtttttatttattgacaggtgaatattcattaaagaatgctactggccttggtttaattgtgacttctacagggatattaatattacttcactactatgtgtttagtacaggtgagttttcattgttacagtatgattttgtctacctttttcatttacaaaacagcagttttggtgaaaatgctcatataaattttttacaactcaataagagtaggtttattaaaagatttttcatgctattcttagtgacattttcccattcatattaattttaaggttattctaggttagctgttttgtaaaaagtgactttcatatgtatttgatgccaatcagcataattttaaattatgccatataacttcttaatgattattttcatattctaatttcagttttttgaagttataagtggatgttaaacgcagtctttctcttcttttgctaagcttctgcttctgcattaagaagactggttctataaaatggaattatgaatcacaaatagtagaaacatatttgttttaattattagcaaaccttaatactgtagttttaagagatggtatggaaatccaaactataatcagtatcattttcactgcattttgaaagtagatcactaccatatttagttattactattaaagagtcacatttaacacttggtcttagagcctatctctggctcgttgtacattggaaaggtattagtttgttataaaatgacatctagagatagagagcatgatgtttacagtcaggtatttgcataatggttccctcagcaagagcaattccatgtgcatgtggagaagacattcataatagccattcatattgtaaaatgcacaagtgtggtaaaagcagcattgttctaagatttagggtaaaaacttccagtccagcttagctgactgtgaaaattaaaggctgccgaatgtgtgaatttggagctgactacttgtgtggaagggttagatcactgagttaacatctaccgtcaaacaatgaactccagagtcagtctttggtcttaggagatccctgattataccaaatgcaagtggaagttattgctttttaaatactcttgacatgcttctgttacatccttttccttcctccagcgattggattaacctccttcgtcattgccatattggttattcaggtgatagcctatatcctcgctgtggttggactgagtctctgtattgcgggtaagagtcatctttctgtagacctaatttgggttacttttggacagagctcttcttcctttttctttttctttctctctttttaaaaatatatagacttgatttttttttttagtgcagtttttggttcatggcaaaattgagtggaaagtacattcacatggatatttttatgtggacataagttttcaattccatttgggcaaataccaaggagtgcaattacgggactgtaaagagtatgttgaaataaactgccaaactctctgtatcaaaatagctgtaccattttgtattatcaccaccaataaataagagtttttgttcattcatatacttgacagcatttagcattctgagcttttctttttaaacttccaatttaccccagtggtaatagtgctttcctcctcgctacaaagatattagctgtatatatggcttggtggctgattgttctagcacccaaactgatatgcctgtatttgtggaagagcttttaaaataactgggctcaaattggttggagccttagacttgaaacaccagttcccatttcttgatatgataaggtatgtgttatgcaaaggagggctttgttcttctaataattttgagtcattttactggttaagttaataaacatatatggataatttttgttttttgatcgttagaataactctcttaaaacttgggattattactgttttttagtaagttatttcatatgcttttctaatacagaattttatttgtttttacagcgtgtataccaatgcatggccctcttctgatttcaggtttgagtatcttagctctagcacaattacttggactagtttatatgaaatttgtgggtaagtcaatcttattttcattaacctatgccaataatttcagatatatcacttagaaaatgctttttagtttgttcttccagtttaggaccaaaaatgagaaaatacaattggagtgattcgaggataattaaagagggtagaagacatataggatttttagttggttcttccagtttaagaccagaagtcagaaaatacaattggaatgatttgagggtaattaaagagggtagaagacatataggattaatgaaaatttggtttccaaagtagtttaaaggaaaatggctttatctattagaatgtgtacctttttatactaagtaaaaggggagagatctttgaggatccattttaagtaatagaataggatttttaattgttccagtgtttctgtgatagagctgtcctgcacagacctgtttgtttgtcacttgctctttttcttgcagacatagacaccccagacaggaattaaaattcacaatctatcaattttgttcatttaaagagcagtgacctctaatgcatgactttaaaacagttctagttaaaaccaatataatgaaaacattgagtttcaaaatttaggcttttactccttttaaaatcaattattagtaagtatggaatttacttcattgtttctaacttgtatatttaatctgccaattttcaagtaacatttctgcataaattcttattttttattgagatatatgtacacagagagatattttcaattgtgcctgaaactaatgttatcttacctaagctcaagatgttcccaataatgtaatttatattagtttccgttttttaaaaaaattatatttttatgaaataaaacatactcttaaccacctatcaaaataatcaaaagttataaattaatggagtaaaaaaatagtgtttctgctttgctttaggtaaactttgctgtatgtgtttctaaaacttaatacgaaacttgaattgttatagtcaaataatttctcatatgactcacataatagtttcaaaaaacttttacctttatttctgaactttggttcttgatgattgttaattgaattcaattctgtcatatattctgtgtctttctttaattaatgcttattagataaataattaaaatacttaactaatatctgcgtatccttagcatatgagttcataagtcttagttgttgctcaatgaaattttctaattttataccacataatgccataaaatacaatggagacatctaaagcagaatggaattcatgtggtagctacagtgaacatcttgaatgttggtgcatattctatttttgttacatcttccaatcaccatgtgtctggttctggaagatgacactcctggttttgttgctccccacaaatgcctgagaatagtgtgtgatttgcagtatccatacaactctggtgaagtagtatgagatacctttggctgacgggcagcacgctcttattttttcctcactatctgggttgtcctcccttttactcccatgccaccccatgccttccatatctagcatagaatgatcttcagtacagttgccagcaggtctggtgacaatgtctcaagtggaactaagcattgtctatctgccacctccttaacttcactctcctgccttctccatcacttacgttcctccaagcctgtgaaaccactgtactgtacctgtcactgttctgacattaaaattaaaatgacttaaatcttgacaagtaccccaaattattttttctttgtcataggttagcatataagtatactatatgctaaaatttatgctatatgtttaaaatttagtgcaattttattgatagtgtcctaattttattgatagtatcctaaattaactttttaaatcaacttgtctgatgccagggttcagagggacacctacagtcagttgaaaggcaagaagagacaaggtacaggaaagttgctctttagataacatggtagactaggaggaacattaatatggtttgcttatataatctgactgtgtaaatctgaatctatgtaacattaaggttgcaaatttgagcgtttatattaggaagttaaaattttaagtgtctccaaaataatttttactcattgcacgtgttctgttttagaaaagcctaatgattgtgttttgatttaaatgcaataaaatcctcaaatagttaaaaatccaagctttctcttcaagaagaagttaatgtcgctatgagatttttaacttttataatttttattatttccaactttaaatttgtagccttaatttgctattttaaagagtaggcctttcactttctacaactttctgtgaaagtgactttcactttctattttttaactttttaaactgtgttgtattttttttcttttattggaagcattttaattttataagatgagaaaaaggactgggcacaataacttaatgtgaaagcatagaaaagattacaagaacctaaccaaactcactaaagttgggcttgttgtttgtagagaacgtttatataattataaggatcaatactttctcatttttaaagccattaccagttagttcaatataagggcatatagtgttttgatacaaatcaatctggtagcagtaagtaccatatttaccacaacatcccagatttttagaatgatgcatatgcagaactatacgtagaatttatatctatgtatagatacatattcagatattttcttgttcaatttaaggagaggtaaatttggtatcaatagaaaaaatgtttctgaaaaatttaaaccctggaaatgtatttatggcatggagtcagatgtttcagggagagaagaacaaatcaagaagcattgcaagtatgctcatatggaatgcttaaggcttgtggttaaaaaatatatatatatggctgtcaatgtcttaggctcatggtagcagcagaaatcgtaataattcttttgtcacatgggttatatccatattggagagaattaactcaggtgaaattaacttgtacactgtttggttttataatatttagagggatcacaactgactgatgtccctttgaagtaccattcttcataaatctttttttttcagaatgggccagccaactgtgacatcccttggatcggagatttagaactagaaagtattctttctacattattagggaagaaaaggagttacttggcggttagcaatattctattttgttttgttttgtttttagagacagggtctcattatgttgaccaggctggcctcgagctcctgggctcaagcaatgctcccacctcagcctcccaagtagctgggactacaggcatgtgccactacacctggcagtgtttattctgataaatacatttatgagctcaaaaatgtaactctaaaaccttatctctgaacttccatattaccatcagaaatttagatagttgtttagttctctttttctttgtagaacatagatataaggcatggtttcattgaagtcagttgtatatacatgtaactatcctgatgttcccaaataaagctctgtatttctgcttagtttattggggaggctgctaaatgtagtgcatcccaacccattttaccctgttctactttaaaaagaggttggcttcttgtttggatacaaggaccaagtcactcccccaggttcctccacagtaagggaggcctatttaaagccgcccatggcactaacagaaactggactcctatgagctcagatacataactgggcctcacaggggtgggacagtatgtagtctaggaattggaaggatccattccatatcaaagaactgaagcatcgtgttgccctctcagcagcaagagtaaggtgatgcccctgtcagttatagttcctgagttcctctgtctttgattctttgcctattagccagctagctcaccctcttgtttatgccactgttttttatcctattcatgccttctcacagacaacttttcttacctacagctttggactcatccttgtctcctttctgtttctttttcactttcccttcccatcaccaactttctgggtttttttctgtttcttcttagagtccagtggcagggagaaacttgtcagtccagtctgttgccatttttcctgtttgagaaagactcaccagcttttggctggctcacagattggctttccttgggtcaggacccacccttttccctgccagctttggaagcttgacagaattcgagtgtgcagtggtggtaaataaatagtaaggaacacagagcagtcctggaggcgtgcctccatctgctgatgagaaaatccagtgctgtcatccagcccaggtcccagcggaatgggcctctctgttcagtaggatccccctcctgctgagtggttcatggcatgtttctgttcaacgcttttccatctgtaggattcttattctgtatttatttgtttttttgggtttttttattttttgagatggagtctcgctctgtcgcccaggctggagtgcagtggcacgaccccagctcgctgcagcctctgcctcccaggacgagggagatcctcccacctcagccttccacgtagctgggactacaggcatgcaccacaggcatgcaccaccacgccagctaatttttgtatttttggtagagacagggttgcatcatgttgcccaggctggtcttgaatgcctgagctcaagcaatctatttgccttggcctcccaaagtgctgggattacaggcatgagccaccacggccagccttctcatttgttttttttataaggaagctatctcttcttccctccccaactagggtattctttttccctttcgtcactttgctcatgtactgtattccttcaacttcattaatgaatccatttggaagcagtgaaaaaggcaactcagaaagctaagaagaaatagatagaggaatactcagagctatctgagtattttctttagtttgttagctctttggagctttgaaactggaaagacccagggagtgatgtggagaaagagactgagcttgtaagacacaggagcagtgagctaagggagatggagtagtggggacaaattctggcacattctgtctacactctgggtagatagaggagggaggatggagcacccatggtgggggtatgttggtgacagcattttcccaccagccagtgtaacaagtggctgatttgggggaaagatggcataaacaaatgagagaatgtgtttactatttgatgtagatgggttatttgcttcatttttcaaatcagtgtatataatcaagaatattcagcatgtttgaatagactgtcagagctggaactctttcattaacatctctggcacctttagttttagccctgaacattttatcttaaaattaaacattaccaaatgccttagtttatttcatttattaaatttatattcttatttgttatttatatcagcttccaatcagaagactatacaacctcctagggtaagttaaagtttattaaatgaattgtgaatgatcatttgagggattagactgaggaacttggtaattgagatattttgctatctgttttgtctcacgtcaaattaagagaatgttgaagtcattgcatgacctttgcatgaatgggtccagttctattttaaaacctgtgtttggtcattttagtgtcaatgggatggaataaatgatttcttaagattgtactgacttctcacacccaaaactggaaagtaggaataatggctatattatctctgcaatcagaaggaagctgattccaatatatcacctcacctgttggattcattggatgtgcatacacagaatgacaatttcaggcttaaaaatgaggagaaatctatactaagttgacatcactgataattataatctataaaataaatgtaaatattgctgaaaacatctgttcggagttatgattcgatcctctcccatacaaatgttttataaacattttttcccttaaaactgtgcttaaggtttcattgtaccttagataccttattaagccatctgaggaaattgcaagaaaggagtaattttaggagggcataaatgaagagaaaagcatatttataaacatagacttatcacagtgacaggcccaagaggtatgttgtggacataagctctggaaaggattatattgtacttagcttcctataacggagtgatgatagatgtatctggaatgccaaagagagtcttctgtctgtggccggaggtagaggtcacatatgcttctaagtctgacaagcctcattgtgcctaaagggcaggtggggcgggtatgtgtgtctaccacaggggtatattctagaaagattggtgccatagctatgttggtcacaagaggccagcaacttaactggacctgtgaatcctaacacattttctttcccagttactgagttcaatttgcgatacttaaagatgattctgttttgcttccacctcttcactgtgttatttattctgttgttgctatttatgcttgcactttcatatttttagaagttagaatttcttgagctgagagtggtgaagtgggaaattctgtttagaaaaataatattaagagaataatacagttattattaaactattaacccgactaaacaagctttgctttaacatttacaggcttatttcgttgttttgttttttcttttttttttgactgtaggatttactgcttactacgtaatttaaatattagcatatataagttttactataaaatgacatgacataaattatatttttatgtaaatatattttaaatatttttcagaaagctgtagaggaaccccttaatggtatgtggttatttcactcttaatcctttaccagatcataatttgatctggcccgcaaaacagttagaatgccctgtctatgccttaggaagaatctaggtttttttcctctttttttctttccttggcatctctactcttgattattcatcaagaattatgggctgggtgcggtggctcacgcttgcgatcccggcaccttgggaggccaaggcgggcagatcacgaggtcaagagattgagaccatcctggccaacatgttgaaaccctgtctctactgaaaatacaaaaattacctgggcatggtggtgtgtatctgcagtcccagctactcgggaggctgaggcaggagaattgcttgaacccggaaggcagatgttgcagtgagttgagatcatgccaccgcactccagcctggtgacagagtgagactctgtctcaaaaaaaataaaaaagaattatgaatattacttttataatattctcaccactgggaaaaatgcactattctgtgtctaagtagctgcttaccttaaccaagtgatatttgggcaaggggatcgttgccttttgctactggttgagacgaagcatggcaccccctagtagagaaggatcccaattacttccaatttgtgatgtacacattttagaaagatacaggctattgccacagagatagaccaaaacatctcattttctttctttgtaaacctagatctgatttcccaactaagtctgtttcctttgtgaatgctgtgggtatgatccacagaaaggctacataatgaaatgatagctttacaattaatttggctgtagagttgtagactagttagcatatcattgcatatttgtttatttagaaatgatttccaattgtggaacctcactaactgcctgcttggcttgttactaatcctagcattcaaagaatcaaaaggaatgatgaatgatggtaagtataaaatgcacttaataattatagatcagttaaaacatggacattggaaaacaaaaaagcttcttgaaaatgtggctcttttttagtaaaagggacactgtcagatgataaaggttcacatttcttgatgtatacaacttaaatctactttgctaaaaattgcaaaactactactgtaaaaactgtagggtgtcacgaatcagactccagtcatatggctcccagcaaagagaaattaccactttttgtaaaatgtttttcagattccgtgtctggtgactgtaactttaagatgccttttataaggcacataaataatctggcacaaatctttatcattttgacagagtttcttttatgcttgtgttggtgattttgttgcatttaacccatggggacttaacatctctgcttttccaatcaggagcttggttctaaccttttgggagatgattaaagagagaggttgagagagagagagagagagagagagagagagagagagagagagagagagatgtttcgtcctcagcttttgcttccattttttttttaagaactctgggctaataacttctaatctttatagaatatttcaaagaaatatatttgttcttaaagatacataggtttgagatattgagtgctacaagcatttattttggttttaccttaacatattatgattcctcagttttgttggcatttagtaattatgtttatgtttttatcttatcaaaaaatgtcttcttacctttgatatttataatcactcctcggtcatgtaaatagtttgctttatattttactgttttaaagtctgtgaccttacctgccctcttctgtagcaaagtgcagcatttaactcaggaagctatattccccccaagtgtcattaatatttgcataagattaaaaacactccagtcggccgggcgcggtggctcacgcctgtaatcccagcactttgggaggccgaggcgggcggatcacaaggtcaggagatcgagaccatcctggctaacacggtgaaaccccgtctctactaaaactacaaaaaattagccgggcatggtggcgggcacctgtggtcccagctacttgggaggctgaggcaggagaatggcgtgaacccgggaggcagagcttgcagtgagccaagatcgtgccactacactccagcctgggtgacagagcaagactccgtctcaagaaaaaaaaaaaaaaaaaaaaaaaaaaaacactccagtcatgcattggtgaacaaagtttaaaacaacgtgtattcagcatggagtcacagaatgatcctacttttgtatgtttgtgtcacagcctttaaaagcatgtcttgttatataagccattaccctcctaaaaaagactatagttcacaggaataagttaaaagacataacaaaacataaaatgactagtaccaggaattgtgaccatggtttgttctggtaactgtggcatggcatggtttgttccaggaattgtggcatggtttgttcatgtttacattctgatgtcctattttttttttttaatttctatgtcctttccttttccttggtggtgtcattgttctgtagctgtatgaagaaactaaacttttctccattttcaggaaagcaatctaagaatcttgagtgcctcttcctttgttaatttctcttaagatgtgacttttttaaactactgcatcaggaaatattgtaaaacagttttgccttgaatatttgtgatgaaatctacgatgatcttcaagattctcttaattttgctaatattcagctgatcagaatttgtttttaaaatgtctggctggtgggtacttcccactgacaactgcttattgcttacagtatgtctgccttgtcaatgaatgaggttcagggtgcttcctagggatcagagtcagtaccatttttctctttcatctacagctgatcagatgtttattttacttacattaaatgaatgatggagatccaaagtgaatattatagaatattattctaggatcaacatcttttgctttgaaaaatcaacatctcttggcttttcctcagccaacccagcaaacagagattatcagactctgttgattttttactttcatttggcattggcctttttcttactgaaattaaaaaggctaatgatttgcctggtttctgtctctgacctttgcaggtctattttcttaatttttagatactatatatctgaaactttttttaatgtgtcaactttttaatggatagaaaatagacacgaatagtgattatgtgttcatttttcaattttccagaataactgaagtgaagtgatggactccgattagaagagtagtaagacgtgaaaggaatacacttgtgtttaagcaccatggccttgatgattcactgttggggagaagaaacaagaaaagtaactggttgtcacctatgagacccttacgtgattgttagttaagtttttattcaaagcagctgtaatttagttaataaaataattatgatctatgttgtttgcccaattgagatccagttttttgttgttatttttaatcaattaggggcaatagtagaatggacaatttccaagaatgatgcctttcaggtcctagggcctctggcctctaggtaaccagtttaaattggttcagggtgataactacttagcactgccctggtgattacccagagatatctatgaaaaccagtggcttccatcaaacctttgccaactcaggttcacagcagctttgggcagttatggcagtatggcattagctgagaggtgtctgccacttctgggtcaatggaataataaattaagtacaggcaggaatttggttgggagcatcttgtatgatctccgtatgatgtgatattgatggagatagtggtcctcattcttgggggttgccattcccacattcccccttcaacaaacagtgtaacaggtccttcccagatttagggtacttttattgatggatatgttttccttttattcacataaccccttgaaaccctgtcttgtcctcctgttacttgcttctgctgtacaagatgtagcaccttttctcctctttgaacatggtctagtgacacggtagcaccagttgcaggaaggagccagacttgttctcagagcactgtgttcacacttttcagcaaaaatagctatggttgtaacatatgtattcccttcctctgatttgaaggcaaaaatctacagtgtttcttcacttcttttctgatctggggcatgaaaaaagcaagattgaaatttgaactatgagtctcctgcatggcaacaaaatgtgtgtcaccatcaggccaacaggccagcccttgaatggggatttattactgttgtatctatgttgcatgataaacattcatcaccttcctcctgtagtcctgcctcgtactccccttcccctatgattgaaaagtaaacaaaacccacatttcctatcctggttagaagaaaattaatgttctgacagttgtgatcgcctggagtacttttagacttttagcattcgttttttacctgtttgtggatgtgtgtttgtatgtgcatacgtatgagataggcacatgcatcttctgtatggacaaaggtggggtacctacaggagagcaaaggttaattttgtgcttttagtaaaaacatttaaatacaaagttctttattgggtggaattatatttgatgcaaatatttgatcacttaaaacttttaaaacttctaggtaatttgccacgctttttgactgctcaccaataccctgtaaaaatacgtaattcttcctgtttgtgtaataagatattcatatttgtagttgcattaataatagttatttcttagtccatcagatgttcccgtgtgcctcttttatgccaaattgattgtcatatttcatgttgggaccaagtagtttgcccatggcaaacctaaatttatgacctgctgaggcctctcagaaaactgagcatactagcaagacagctcttcttgaaaaaaaaaatatgtatacacaaatatatacgtatatctatatatacgtatgtatatacacacatgtatattcttccttgattgtgtagctgtccaaaataataacatatatagagggagctgtattcctttatacaaatctgatggctcctgcagcactttttccttctgaaaatatttacattttgctaacctagtttgttactttaaaaatcagttttgatgaaaggagggaaaagcagatggacttgaaaaagatccaagctcctattagaaaaggtatgaaaatctttatagtaaaattttttataaactaaagttgtaccttttaatatgtagtaaactctcatttatttggggttcgctcttggatctcatccatccattgtgttctctttaatgctgcctgccttttgaggcattcactgccctagacaatgccaccagagatagtgggggaaatgccagatgaaaccaactcttgctctcactagttgtcagcttctctggataagtgaccacagaagcaggagtcctcctgcttgggcatcattgggccagttccttctctttaaatcagatttgtaatggctcccaaattccatcacatcacatttaaattgcagacagtgttttgcacatcatgtatctgttttgtcccataatatgctttttactccctgatcccagtttctgctgttgactcttccattcagttttatttattgtgtgttctcacagtgacaccatttgtccttttctgcaacaacctttccagctacttttgccaaattctatttgtcttctccttcaaaacattctcctttgcagttcctcttcatctgtgtagctgctcttttgtctcttaacttaccattcctatagtactttatgcatctctgcttagttctattagttttttggccttgctcttctccttgattttaaaattccttctatagctagagcttttctttctttcattctctcttcctgcagtgttttgcatacatcagaagctaggtacataagttaaatgattgagagttggctgtatttagatttatcactttttaatagggtgagcttgagagttttctttctttctgttttttttttttggtttttt

SEQ ID NO: 6066 - DNA, 7474 bp, Homo sapiens
aagctgtagaggaaccccttaatggtatgtggttatttcactcttaatcctttaccagatcataatttgatctggcccgcaaaacagttagaatgccctgtctatgccttaggaagaatctaggtttttttcctctttttttctttccttggcatctctactcttgattattcatcaagaattatgggctgggtgcggtggctcacgcttgcgatcccagcaccttgggaggccaaggcgggcagatcacgaggtcaagagattgagaccatcctggccaacatgttgaaaccctgtctctactgaaaatacaaaaattacctgggcatggtggtgtgtatctgcagtcccagctactcgggaggctgaggcaggagaattgcttgaacccggaaggcagatgttgcagtgagttgagatcatgccaccgcactccagcctggtgacagagtgagactctgtctcaaaaaaaataaaaaagaattatgaatattacttttataatattctcaccactgggaaaaatgcactattctgtgtctaagtagctgcttaccttaaccaagtgatatttgggcaaggggatcgttgccttttgctactggttgagacgaagcatggcaccccctagtagagaaggatcccaattacttccaatttgtgatgtacacattttagaaagatacaggctattgccacagagatagaccaaaacatctcattttctttctttgtaaacctagatctgatttcccaactaagtctgtttcctttgtgaatgctgtgggtatgatccacagaaaggctacataatgaaatgatagctttacaattaatttggctgtagagttgtagactagttagcatatcattgcatatttgtttatttagaaatgatttccaattgtggaacctcactaactgcctgcttggcttgttactaatcctagcattcaaagaatcaaaaggaatgatgaatgatggtaagtataaaatgcacttaataattatagatcagttaaaacatggacattggaaaacaaaaaagcttcttgaaaatgtggctcttttttagtaaaagggacactgtcagatgataaaggttcacatttcttgatgtatacaacttaaatctactttgctaaaaattgcaaaactactactgtaaaaactgtagggtgtcacgaatcagactccagtcatatggctcccagcaaagagaaattaccactttttgtaaaatgtttttcagattccgtgtctggtgactgtaactttaagatgccttttataaggcacataaataatctggcacaaatctttatcattttgacagagtttcttttatgcttgtgttggtgattttgttgcatttaacccatggggacttaacatctctgcttttccaatcaggagcttggttctaaccttttgggagatgattaaagagagaggttgagagagagagagagagagagagagagagagagagagagatgtttcgtcctcagcttttgcttccattttttttttaagaactctgggctaataacttctaatctttatagaatatttcaaagaaatatatttgttcttaaagatacataggtttgagatattgagtgctacaagcatttattttggttttaccttaacatattatgattcctcagttttgttggcatttagtaattatgtttatgtttttatcttatcaaaaaatgtcttcttacctttgatatttataatcactcctcggtcatgtaaatagtttgctttatattttactgttttaaagtctgtgaccttacctgccctcttctgtagcaaagtgcagcatttaactcaggaagctatattccccccaagtgtcattaatatttgcataagattaaaaacactccagtcggccgggcgcggtggctcacgcctgtaatcccagcactttgggaggccgaggcgggcggatcacaaggtcaggagatcgagaccatcctggctaacacggtgaaaccccgtctttactaaaactacaaaaaattagccgggcatggtggcgggcacctgtggtcccagctacttgggaggctgaggcaggagaatggcgtgaacccgggaggcagagcttgcagtgagccaagatcgtgcccctacactccagcctgggtgacagagcaagactccgtctcaagaaaaaaaaaaaaaaaaaaaaaaaaaacactccagtcatgcattggtgaacaaagtttaaaacaacgtgtattcagcatggagtcacagaatgatcctacttttgtatgtttgtgtcacagcctttaaaagcatgtcttgttatataagccattaccctcctaaaaaagactatagttcacaggaataagttaaaagacataacaaaacataaaatgactagtaccaggaattgtgaccatggtttgttctggtaactgtggcatggcatggtttgttccaggaattgtggcatggtttgttcatgtttacattctgatgtcctattttttttttttaatttctatgtcctttccttttccttggtggtgtcattgttctgtagctgtatgaagaaactaaacttttctccattttcaggaaagcaatctaagaatcttgagtgcctcttcctttgttaatttctcttaagatgtgacttttttaaactactgcatcaggaaatattgtaaaacagttttgccttgaatatttgtgatgaaatctacgatgatcttcaagattctcttaattttgctaatattcagctgatcagaatttgtttttaaaatgtctggctggtgggtacttcccactgacaactgcttattgcttacagtatgtctgccttgtcaatgaatgaggttcagggtgcttcctagggatcagagtcagtaccatttttctctttcatctacagctgatcagatgtttattttacttacattaaatgaatgatggagatccaaagtgaatattatagaatattattctaggatcaacatcttttgctttgaaaaatcaacatctcttggcttttcctcagccaacccagcaaacagagattatcagactctgttgattttttactttcatttggcattggcctttttcttactgaaattaaaaaggctaatgatttgcctggtttctgtctctgacctttgcaggtctattttcttaatttttagatactatatatctgaaactttttttaatgtgtcaactttttaatggatagaaaatagacacgaatagtgattatgtgttcatttttcaattttccagaataactgaagtgaagtgatggactccgatttggagagtagtaagacgtgaaaggaatacacttgtgtttaagcaccatggccttgatgattcactgttggggagaagaaacaagaaaagtaactggttgtcacctatgagacccttacgtgattgttagttaagtttttattcaaagcagctgtaatttagttaataaaataattatgatctatgttgtttgcccaattgagatccagttttttgttgttatttttaatcaattaggggcaatagtagaatggacaatttccaagaatgatgcctttcaggtcctagggcctctggcctctaggtaaccagtttaaattggttcagggtgataactacttagcactgccctggtgattacccagagatatctatgaaaaccagtggcttccatcaaacctttgccaactcaggttcacagcagctttgggcagttatggcagtatggcattagctgagaggtgtctgccacttctgggtcaatggaataataaattaagtacaggcaggaatttggttgggagcatcttgtatgatctccgtatgatgtgatattgatggagatagtggtcctcattcttgggggttgccattcccacattcccccttcaacaaacagtgtaacaggtccttcccagatttagggtacttttattgatggatatgttttccttttattcacataaccccttgaaaccctgtcttgtcctcctgttacttgcttctgctgtacaagatgtagcaccttttctcctctttgaacatggtctagtgacacggtagcaccagttgcaggaaggagccagacttgttctcagagcactgtgttcacacttttcagcaaaaatagctatggttgtaacatatgtattcccttcctctgatttgaaggcaaaaatctacagtgtttcttcacttcttttctgatctggggcatgaaaaaagcaagattgaaatttgaactatgagtctcctgcatggcaacaaaatgtgtgtcaccatcaggccaacaggccagcccttgaatggggatttattactgttgtatctatgttgcatgataaacattcatcaccttcctcctgtagtcctgcctcgtactccccttcccctatgattgaaaagtaaacaaaacccacatttcctatcctggttagaagaaaattaatgttctgacagttgtgatcgcctggagtacttttagacttttagcattcgttttttacctgtttgtggatgtgtgtttgtatgtgcatacgtatgagataggcacatgcatcttctgtatggacaaaggtggggtacctacaggagagcaaaggttaattttgtgcttttagtaaaaacatttaaatacaaagttctttattgggtggaattatatttgatgcaaatatttgatcacttaaaacttttaaaacttctaggtaatttgccacgctttttgactgctcaccaataccctgtaaaaatacgtaattcttcctgtttgtgtaataagatattcatatttgtagttgcattaataatagttatttcttagtccatcagatgttcccgtgtgcctcttttatgccaaattgattgtcatatttcatgttgggaccaagtagtttgcccatggcaaacctaaatttatgacctgctgaggcctctcagaaaactgagcatactagcaagacagctcttcttgaaaaaaaaaatatgtatacacaaatatatacgtatatctatatatacgtatgtatatacacacatgtatattcttccttgattgtgtagctgtccaaaataataacatatatagagggagctgtattcctttatacaaatctgatggctcctgcagcactttttccttctgaaaatatttacattttgctaacctagtttgttactttaaaaatcagttttgatgaaaggagggaaaagcagatggacttgaaaaagatccaagctcctattagaaaaggtatgaaaatctttatagtaaaattttttataaactaaagttgtaccttttaatatgtagtaaactctcatttatttggggttcgctcttggatctcatccatccattgtgttctctttaatgctgcctgccttttgaggcattcactgccctagacaatgccaccagagatagtgggggaaatgccagatgaaaccaactcttgctctcactagttgtcagcttctctggataagtgaccacagaagcaggagtcctcctgcttgggcatcattgggccagttccttctctttaaatcagatttgtaatggctcccaaattccatcacatcacatttaaattgcagacagtgttttgcacatcatgtatctgttttgtcccataatatgctttttactccctgatcccagtttctgctgttgactcttccattcagttttatttattgtgtgttctcacagtgacaccatttgtccttttctgcaacaacctttccagctacttttgccaaattctatttgtcttctccttcaaaacattctcctttgcagttcctcttcatctgtgtagctgctcttttgtctcttaacttaccattcctatagtactttatgcatctctgcttagttctattagttttttggccttgctcttctccttgattttaaaattccttctatagctagagcttttctttctttcattctctcttcctgcagtgttttgcatacatcagaagctaggtacataagttaaatgattgagagttggctgtatttagatttatcactttttaatagggtgagcttgagagttttctttctttctgttttttttttttttttttttgactaatttcacatgctctaaaaaccttcaaaggtgattatttttctcctggaaactccaggtccattctgtttaaatccctaagaatgtcagaattaaaataacagggctatcccgtaattggaaatatttcttttttcaggatgctatagtcaatttagtaagtgaccaccaaattgttatttgcactaacaaagctcaaaacacgataagtttactcctccatctcagtaataaaaattaagctgtaatcaaccttctaggtttctcttgtcttaaaatgggtattcaaaaatggggatctgtggtgtatgtatggaaacacatactccttaatttacctgttgttggaaactggagaaatgattgtcgggcaaccgtttattttttattgtattttatttggttgagggatttttttataaacagttttacttgtgtcatattttaaaattactaactgccatcacctgctggggtcctttgttaggtcattttcagtgactaatagggataatccaggtaactttgaagagatgagcagtgagtgaccaggcagtttttctgcctttagctttgacagttcttaattaagatcattgaagaccagctttctcataaatttctctttttgaaaaaaagaaagcatttgtactaagctcctctgtaagacaacatcttaaatcttaaaagtgttgttatcatgactggtgagagaagaaaacattttgtttttattaaatggagcattatttacaaaaagccattgttgagaattagatcccacatcgtataaatatctattaaccattctaaataaagagaactccagtgttgctatgtgcaagatcctctcttggagcttttttgcatagcaattaaaggtgtgctatttgtcagtagccatttttttgcagtgatttgaagaccaaagttgttttacagctgtgttaccgttaaaggtttttttttttatatgtattaaatcaatttatcactgtttaaagctttgaatatctgcaatctttgccaaggtacttttttatttaaaaaaaaacataactttgtaaatattaccctgtaatattatatatacttaataaaacattttaagctattttgttgggctatttctattgctgctacagcagaccacaagcacatttctgaaaaatttaatttattaatgtatttttaagttgcttatattctaggtaacaatgtaaagaatgatttaaaatattaattatgaattttttgagtataatacccaataagcttttaattagagcagagttttaattaaaagttttaaatcagtccaa

SEQ ID NO: 6067 - DNA, 8389 bp, Homo sapiens
ccacgccagctaatttttgtatttttggtagagacagggttgcatcatgttgcccaggctggtcttgaatgcctgagctcaagcaatctatttgccttggcctcccaaagtgctgggattacaggcatgagccaccacggccagccttctcatttgttttttttataaggaagctatctcttcttccctccccaactagggtattctttttccctttcgtcactttgctcatgtactgtattccttcaacttcattaatgaatccatttggaagcagtgaaaaaggcaactcagaaagctaagaagaaatagatagaggaatactcagagctatctgagtattttctttagtttgttagctctttggagctttgaaactggaaagacccagggagtgatgtggagaaagagactgagcttgtaagacacaggagcagtgagctaagggagatggagtagtggggacaaattctggcacattctgtctacactctgggtagatagaggagggaggatggagcacccatggtgggggtatgttggtgacagcattttcccaccagccagtgtaacaagtggctgatttgggggaaagatggcataaacaaatgagagaatgtgtttactatttgatgtagatgggttatttgcttcatttttcaaatcagtgtatataatcaagaatattcagcatgtttgaatagactgtcagagctggaactctttcattaacatctctggcacctttagttttagccctgaacattttatcttaaaattaaacattaccaaatgccttagtttatttcatttattaaatttatattcttatttgttatttatatcagcttccaatcagaagactatacaacctcctagggtaagttaaagtttattaaatgaattgtgaatgatcatttgagggattagactgaggaacttggtaattgagatattttgctatctgttttgtctcacgtcaaattaagagaatgttgaagtcattgcatgacctttgcatgaatgggtccagttctattttaaaacctgtgtttggtcattttagtgtcaatgggatggaataaatgatttcttaagattgtactgacttctcacacccaaaactggaaagtaggaataatggctatattatctctgcaatcagaaggaagctgattccaatatatcacctcacctgttggattcattggatgtgcatacacagaatgacaatttcaggcttaaaaatgaggagaaatctatactaagttgacatcactgataattataatctataaaataaatgtaaatattgctgaaaacatctgttcggagttatgattcgatcctctcccatacaaatgttttataaacatattttcccttaaaactgtgcttaaggtttcattgtaccttagataccttattaagcctctgaggaaattgcaagaaaaggagtaattttaggagggcataaataaaaagaaaagcatatttataaacatagactttccacagtggcaaggcccaagaggtatgttgtggacataagctctggaaaggattatattgtacttagcttcctatgacggagtgatgatagatgtatctggaatgccaaagagagtcttctgtctgtggccggaggtagaggtcacatatgcttctaagtctgacaagcctcattgtgcctaaagggcaggtggggcgggtatgtgtgtctaccacaggggtatattctagaaagattggtgccatagctatgttggtcacaagaggccagcaacttaactggacctgtgaatcctaacacattttctttcccagttactgagttcaatttgcgatacttaaagatgattctgttttgcttccacctcttcactgtgttatttattctgttgttgctatttatgcttgcactttcatatttttagaagttagaatttcttgagctgagagtggtgaagtgggaaattctgtttagaaaaataatattaagagaataatacagttattattaaactattaacccgacttggcaagctttgctttaacatttacaggcttatttcgttgttttgttttttcttttttttttgactgtaggatttactgcttactacgtaatttaaatattagcatatataagttttactataaaatgacatgacataaattatatttttatggaaatatattttaaatatttttcataatgctggagaggaaccccttaatggcatgtggatatttcactcttaatcctttaccagatcataatttgatctggcccgcaaaacagttagaatgccctgtctatgccttaggaagaatctaggtttttttcctctttttttctttccttggcatctctactcttgattattcatcaagaattatgggctgggtgcggtggctcacgcttgcgatcccggcaccttgggaggccaaggcgggcagatcacgaggtcaagagattgagaccatcctggccaacatgttgaaaccctgtctctactgaaaatacaaaaattacctgggcatggtggtgtgtatctgcagtcccagctactcgggaggctgaggcaggagaattgcttgaacccggaaggcagatgttgcagtgagttgagatcatgccaccgcactccagcctggtgacagagtgagactctgtctcaaaaaaaataaaaaagaattatgaatattacttttataatattctcaccactgggaaaaatgcactattctgtgtctaagtagctgcttaccttaaccaagtgatatttgggcaaggggatcgttgccttttgctactggttgagacgaagcatggcaccccctagtagagaaggatcccaattacttccaatttgtgatgtacacattttagaaagatacaggctattgccacagagatagaccaaaacatctcattttctttctttgtaaacctagatctgatttcccaactaagtctgtttcctttgtgaatgctgtgggtatgatccacagaaaggctacataatgaaatgatagctttacaattaatttggctgtagagttgtagactagttagcatatcattgcatatttgtttatttagaaatgatttccaattgtggaacctcactaactgcctgcttggcttgttactaatcctagcattcaaagaatcaaaaggaatgatgaatgatggtaagtataaaatgcacttaataattatagatcagttaaaacatggacattggaaaacaaaaaagcttcttgaaaatgtggctcttttttagtaaaagggacactgtcagatgataaaggttcacatttcttgatgtatacaacttaaatctactttgctaaaaattgcaaaactactactgtaaaaactgtagggtgtcacgaatcagactccagtcatatggctcccagcaaagagaaattaccactttttgtaaaatgtttttcagattccgtgtctggtgactgtaactttaagatgccttttataaggcacataaataatctggcacaaatctttatcattttgacagagtttcttttatgcttgtgttggtgattttgttgcatttaacccatggggacttaacatctctgcttttccaatcaggagcttggttctaaccttttgggagatgattaaagagagaggttgagagagagagagagagagagagagagagagagagagagagagagagagatgtttcgtcctcagcttttgcttccattttttttttaagaactctgggctaataacttctaatctttatagaatatttcaaagaaatatatttgttcttaaagatacataggtttgagatattgagtgctacaagcatttattttggttttaccttaacatattatgattcctcagttttgttggcatttagtaattatgtttatgtttttatcttatcaaaaaatgtcttcttacctttgatatttataatcactcctcggtcatgtaaatagtttgctttatattttactgttttaaagtctgtgaccttacctgccctcttctgtagcaaagtgcagcatttaactcaggaagctatattccccccaagtgtcattaatatttgcataagattaaaaacactccagtcggccgggcgcggtggctcacgcctgtaatcccagcactttgggaggccgaggcgggcggatcacaaggtcaggagatcgagaccatcctggctaacacggtgaaaccccgtctctactaaaactacaaaaaattagccgggcatggtggcgggcacctgtggtcccagctacttgggaggctgaggcaggagaatggcgtgaacccgggaggcagagcttgcagtgagccaagatcgtgccactacactccagcctgggtgacagagcaagactccgtctcaagaaaaaaaaaaaaaaaaaaaaaaaaaaaccactccagtcatgcattggtgaacaaagtttaaaacaacgtgtattcagcatggagtcacagaatgatcctacttttgtatgtttgtgtcacagcctttaaaagcatgtcttgttatataagccattaccctcctaaaaaagactatagttcacaggaataagttaaaagacataacaaaacataaaatgactagtaccaggaattgtgaccatggtttgttctggtaactgtggcatggcatggtttgttccaggaattgtggcatggtttgttcatgtttacattctgatgtcctattttttttttttaatttctatgtcctttccttttccttggtggtgtcattgttctgtagctgtatgaagaaactaaacttttctccattttcaggaaagcaatctaagaatcttgagtgcctcttcctttgttaatttctcttaagatgtgacttttttaaactactgcatcaggaaatattgtaaaacagttttgccttgaatatttgtgatgaaatctacgatgatcttcaagattctcttaattttgctaatattcagctgatcagaatttgtttttaaaatgtctggctggtgggtacttcccactgacaactgcttattgcttacagtatgtctgccttgtcaatgaatgaggttcagggtgcttcctagggatcagagtcagtaccatttttctctttcatctacagctgatcagatgtttattttacttacattaaatgaatgatggagatccaaagtgaatattatagaatattattctaggatcaacatcttttgctttgaaaaatcaacatctcttggcttttcctcagccaacccagcaaacagagattatcagactctgttgattttttactttcatttggcattggcctttttcttactgaaattaaaaagggctaatgatttgcctggtttctgtctctgacctttgcaggtctattttcttaatttttagatactatatatctgaaactttttttaatgtgtcaactttttaatggatagaaaatagacacgaatagtgattatgtgttcatttttcaattttccagaataactgaagtgaagtgatggactccgatttggagagtagtaagacgtgaaaggaatacacttgtgtttaagcaccatggccttgatgattcactgttggggagaagaaacaagaaaagtaactggttgtcacctatgagacccttacgtgattgttagttaagtttttattcaaagcagctgtaatttagttaataaaataattatgatctatgttgtttgcccaattgagatccagttttttgttgttatttttaatcaattaggggcaatagtagaatggacaatttccaagaatgatgcctttcaggtcctagggcctctggcctctaggtaaccagtttaaattggttcagggtgataactacttagcactgccctggtgattacccagagatatctatgaaaaccagtggcttccatcaaacctttgccaactcaggttcacagcagctttgggcagttatggcagtatggcattagctgagaggtgtctgccacttctgggtcaatggaataataaattaagtacaggcaggaatttggttgggagcatcttgtatgatctccgtatgatgtgatattgatggagatagtggtcctcattcttgggggttgccattcccacattcccccttcaacaaacagtgtaacaggtccttcccagatttagggtacttttattgatggatatgttttccttttattcacataaccccttgaaaccctgtcttgtcctcctgttacttgcttctgctgtacaagatgtagcaccttttctcctctttgaacatggtctagtgacacggtagcaccagttgcaggaaggagccagacttgttctcagagcactgtgttcacacttttcagcaaaaatagctatggttgtaacatatgtattcccttcctctgatttgaaggcaaaaatctacagtgtttcttcacttcttttctgatctggggcatgaaaaaagcaagattgaaatttgaactatgagtctcctgcatggcaacaaaatgtgtgtcaccatcaggccaacaggccagcccttgaatggggatttattactgttgtatctatgttgcatgataaacattcatcaccttcctcctgtagtcctgcctcgtactccccttcccctatgattgaaaagtaaacaaaacccacatttcctatcctggttagaagaaaattaatgttctgacagttgtgatcgcctggagtacttttagacttttagcattcgttttttacctgtttgtggatgtgtgtttgtatgtgcatacgtatgagataggcacatgcatcttctgtatggacaaaggtggggtacctacaggagagcaaaggttaattttgtgcttttagtaaaaacatttaaatacaaagttctttattgggtggaattatatttgatgcaaatatttgatcacttaaaacttttaaaacttctaggtaatttgccacgctttttgactgctcaccaataccctgtaaaaatacgtaattcttcctgtttgtgtaataagatattcatatttgtagttgcattaataatagttatttcttagtccatcagatgttcccgtgtgcctcttttatgccaaattgattgtcatatttcatgttgggaccaagtagtttgcccatggcaaacctaaatttatgacctgctgaggcctctcagaaaactgagcatactagcaagacagctcttcttgaaaaaaaaaatatgtatacacaaatatatacgtatatctatatatacgtatgtatatacacacatgtatattcttccttgattgtgtagctgtccaaaataataacatatatagagggagctgtattcctttatacaaatctgatggctcctgcagcactttttccttctgaaaatatttacattttgctaacctagtttgttactttaaaatcagttttgatgaaaggagggaaaagcagatggacttgaaaaagatccaagctcctattagaaaaggtatgaaaatctttatagaaaaatttttttataaaactaaaagttgtacccttttaatatggtagtaaaactcctcatttatttgggggtcgctctttggatctcatccatccaatgtgttctctttaatgctgcctggccttttgaggcattcactgccctagacaatgccacccagagatagtgggggaaatgccagatgaaaccaactcttgctctcactagttgtcagcttctctggataagtgaccacagaagcaggagtcctcctgcttgggcatcattgggccagttccttctctttaaatcagatttgtaatggctcccaaattccatcacatcacatttaaattgcagacagtgttttgcacatcatgtatctgttttgtcccataatatgctttttactccctgatcccagtttctgctgttgactcttccattcagttttatttattgtgtgttctcacagtgacaccatttgtccttttctgcaacaacctttccagctacttttgccaaattctatttgtcttctccttcaaaacattctcctttgcagttcctcttcatctgtgtagctgctcttttgtctcttaacttaccattcctatagtactttatgcatctctgcttagttctattagttttttggccttgctcttctccttgattttaaaattccttctatagctagagcttttctttctttcattctctcttcctgcagtgttttgcatacatcagaagctaggtacataagttaaatgattgagagttggctgtatttagatttatcactttttaatagggtgagcttgagagttttctttctttctgtgtttttttttttggttttt

SEQ ID NO: 6068 - DNA, 225 bp, Homo sapiens
attaccctcctaaaaaagactatagttcacaggaataagttaaaagacataacaaaacataaaatgactagtaccaggaattgtgaccatggtttgttctggtaactgtggcatggcatggtttgttccaggaattgtggcatggtttgttcatgtttacattctgatgtcctattttttttttttaatttctatgtcctttccttttccttggtggtgtcattg

SEQ ID NO: 6069 - DNA, 703 bp, Homo sapiens
agaggttggcttcttgtttggatacaaggaccaagtcactcccccaggttcctccacagtaagggaggcctatttaaagccgcccatggcactaacagaaactggactcctatgagctcagatacataactgggcctcacaggggtgggacagtatgtagtctaggaattggaaggatccattccatatcaaagaactgaagcatcgtgttgccctctcagcagcaagagtaaggtgatgcccctgtcagttatagttcctgagttcctctgtctttgattctttgcctattagccagctagctcaccctcttgtttatgccactgttttttatcctattcatgccttctcacagacaacttttcttacctacagctttggactcatccttgtctcctttctgtttctttttcactttcccttcccatcaccaactttctgggtttttttctgtttcttcttagagtccagtggcagggagaaacttgtcagtccagtctgttgccatttttcctgtttgagaaagactcaccagcttttggctggctcacagattggctttccttgggtcaggacccacccttttccctgccagctttggaagcttgacagaattcgagtgtgcagtggtggtaaataaatagtaaggaacacagagcagtcctggaggcgtgcctccatctgctgatgagaaaatccagtg

SEQ ID NO: 6070 - DNA, 2610 bp, Homo sapiens
ctttcatcttttatgttcaaagtacttgatgcacaaagcctggactcttttatctctgtcctatagactgatgtctagtcagtattcattgtgacaaaattgtttcattagagcaagttggatagtgtatggagattattataaaatgatttaacttgtcttctgtcaagtaattttataattggtattaatgttcatttttttccaggtaccagtttcagaagctttcatttgtgtatgcatgtgtgtgttaaataagtgtattagatacttgaaaaatagtaatttaaatttaaacaatttaaaaaatgaaattgtaattttatgtgtaaaggtgtctgatgtgctttattctgcactgaaaacaatattcatttacagctcaacagacaccaaatatattctaaaattactttcctagagttatcagaaaacagcactgtaataatgaaatcaaacccatctttctttatgatttattcttagtctgatacgcatcagcctggtaagccttcctgtctctctgcttacttaccaatcactccaaatgtcatgtctttgggcaggcattaaattcttgggttttgggttttgttggatggactgcagtctgtgtgagcctatatgggtgtgtcaaatccagtctttggggtgtcatggaaacttagcatgatagacttgattttatccccaagttgacttggtaatttcattagatttcatcagtcacaacctgcattttatcttgtatgtgctgtctattggtcacaaaatcagaaaaccttcttgtccattcataacattagctgttttttcaggtggctagagggacatgtcattgcttcatctgcatgaatttgaaagattaaatgcataaaggaattttcttagagtagagtaggccttcaccatctctttaactgggaaagaagttttgggagtaacatactcatcactcacacccccctcccctcaaacacacacactcacccattagaatgtaagggccttgaggcaggccttgtgtttgcttttcgtgttcactgtcagcatttagaatagtgatagtcatatagatggatagtgctcaatcaattattgtcaaataaagtaatctacttgttccttgatttagactagcaaaaggggctggtacattgtaggtacacagtaaatatttgtagaacagatgaatgaaccaacccaacagatttcttagaagtagcctgcttttggttactaattattttatagaacatataaaagaaaattttagaatacctaatttgttcacaaaaatgttatattgtctcccctgatacttggtattcctgtgtcaggctgagcactaaggttatacattttttgttaagcatgtaattactgttatttctcatgtactttattttgtgtattgatttcagtagttgtagctgagggtaatccttaagagcatgcagattttaaaaattacatagattgccttgccaagccgtctgaaagtcatactagaaaatttgataagagcctgctgttaacaacacattgagttatttttatcttaatgctaagtggagaattacttgaatttattttttttgctgcatttaatgttttgatacattcaataaataaggataaatccacttactgaaggacaagaaaagatcaataagagatccttgaggttattgggttctatggcatctattatatcaaattccttgccctttcactatactgagaaatttgacgactgggctagcaacaagatacctaccccacattagctgtggtacctgctgaaatgtgaccatgtgagcaaagaaaatgagccaaaagaaactctttctgaagattcactgaagaaaacctggagatactctttcattagtagaccccacagagacaggtggagtgtccgttatccagaatgcctgggaccagaagtgttttggatttcagattttttcacacttgggatcctcaacatgtgtatttgttggaaatggctacttaatttaaggaaaagtttaaggtggcctggaaaataagtagtagttgaactaatcaacaggaaccaaaactactttcaatatatagtgtacttatactcaaagagagacggaccattttatggtggaaccctgtctatggtagtattttgtgatgttttatttttgttgctattgtttgcactgttttctcctataacagctcttctaagccttaagaggataaattttatatgagattcaaactcttatttttgttaagaaggatgtaagtcaccaggcatggtggctcacacctgtaatcccagcactttgggaggccgtggcaggtggatcatgaggtaaggagctcgagatcagcctggccaacaatgtgaaaccccgtctctactaaaaaaaaaaaaaaaagaattcaaaaattagccaggcctggtggcgcatgcctgtagtcccagctactcgggaggctgaggcaggagaatcattgaacctgggaggcagagtttgcagtgagccgagattgtgccactgcactccagcctgggtaacggagtgagagactctgtctccaaaaaaaaaaaaaaagaaaagaaaa

SEQ ID NO: 6071 - DNA, 696 bp, Homo sapiens
gtaaatattgctgaaaacatctgttcggagttatgattcgatcctctcccatacaaatgttttataaacattttttcccttaaaactgtgcttaaggtttcattgtaccttagataccttattaagccatctgaggaaattgcaagaaaggagtaattttaggagggcataaatgaagagaaaagcatatttataaacatagacttatcacagtgacaggcccaagaggtatgttgtggacataagctctggaaaggattatattgtacttagcttcctataacggagtgatgatagatgtatctggaatgccaaagagagtcttctgtctgtggccggaggtagaggtcacatatgcttctaagtctgacaagcctcattgtgcctaaagggcaggtggggcgggtatgtgtgtctaccacaggggtatattctagaaagattggtgccatagctatgttggtcacaagaggccagcaacttaactggacctgtgaatcctaacacattttctttcccagttactgagttcaatttgcgatacttaaagatgattctgttttgcttccacctcttcactgtgttatttattctgttgttgctatttatgcttgcactttcatatttttagaagttagaatttcttgagctgagagtggtgaagtgggaaattctgtttagaaaaataatattaag

SEQ ID NO: 6072 - DNA, 703 bp, Homo sapiens; identical to SEQ ID NO: 6069

SEQ ID NO: 6073 - DNA, 494 bp, Homo sapiens
ctgcacccagccgaactatgtcttctaattctttttttaggaccttaaacattgtttacttgattaaaatttaaattttatattacatttgtaataaaactagaaagcatagataagctatcaatcaaaatcacccaaatcctgtgactactactcactgcaaacattttaatgtgcaatttgtacttaattctttactttgtaatacatacaaatatgtccagacactgtgacatatgcttgtgaacttttcaaaggtgatatcctgctgtgtattatattctgttcttttcatgtggcacattacaaatgccctgtaatacagataattatcaaatacttcttagcattcttttatgtataaatgtaccatagtagtaaatttcttccttcacattgagactttttttaaaactataaacagtactctgaattgctataaaatatgttctatatcaattcattcaaataaatatatagaagttgaatttctg

SEQ ID NO: 6074 - DNA, 494 bp, Homo sapiens; identical to SEQ ID NO: 6073

SEQ ID NO: 6075 - DNA, 879 bp, Homo sapiens
gcccagctaatttttgtatctttagtagagacggggtttcaccatgttggccaggctggtcttgaactcctgacttaggtcatctgcccaccttggcctcccaaagtgctgggattatggtcatgagccaccatgcccagcctgcataccttttttttattgttgccttttgtttttatgcctgtagcttttacattacattaaacagtttttgaaaattgtcagactgttaataacattagttttatcttgtttgaaaattatttagtaaggagaaagaaaaatacaaattcatgttttaattgatagttgtacgagcctcatagcaatatttccatgtgctatattcagttattgcttaaacaattttgtaattaacacttatatgtcaggatctgttttctcaagtaaacttcggtttttccaccaaaatggtgtgggtttttttttttttaatatattgtaatctgaatttcctactactgccgggtcattggagaaacagtaaattaaacctgaagaactccggaataacttaacttcttcgtttaaaaatgcttgaaaataaagttgcaggccaggtgcaggggctcacgcttgtaatcccagcactttgggaggccgaggtgggcagatcacttcaggccaggagtttaagaccagcctggctaatatagcaaaagtccgtctctactaaaaatagaaaaaaattagctgagcgtggtggcgcacacctaatcacagctaataaagagtctgagactcaagaattgcttgaacccagaaggcagaggttgcatgcagtgagccgagattgtaccactgcactccacacttcgcgacagagccagattctgtctcaaaaaaaattaaaataaa

SEQ ID NO: 6076 - DNA, 879 bp, Homo sapiens
gcccagctaatttttgtatctttagtagagacggggtttcaccatgttggccaggctggtcttgaactcctgacttaggtcatctgcccaccttggcctcccaaagtgctgggattatggtcatgagccaccatgcccagcctgcataccttttttttattgttgccttttgtttttatgcctgtagcttttacattacattaaacagtttttgaaaattgtcagactgttaataacattagttttatcttgtttgaaaattatttagtaaggagaaagaaaaatacaaattcatgttttaattgatagttgtacgagcctcatagcaatatttccatgtgctatattcagttattgcttaaacaattttgtaattaacacttatatgtcaggatctgttttctcaagtaaacttcggtttttccaccaaaatggtgtgggtttttttttttttaatatattgtaatctgtatttcctactactgccgtgtcattggagaaacagtaaattaaacctgaagaactcctgaataacttaacttcttcgtttagaaatgcttgaaaatagagttgcaggccaggtgcagtggctcacgcttgtaatcccagcactttgggaggccgaggtgggcagatcacttcaggccaggagtttaagaccagcctggctaatatagcaaaagtccgtctctactaaaaatagaaaaaaattagctgagcgtggtggcgcacacctaatcacagctaataaagagtctgagacacaagaattgcttgaacccaggaggcagaggttgcatgcagtgagccgagattgtaccactgcactccacacttcgcgacagagccagattctgtctcaaaaaaaattaaaataaa

SEQ ID NO: 6077 - DNA, 336 bp, Homo sapiens
gcagaagaagcattagcaaagaggaggggaagaaacagcccgaatggaaacctcattaggatgctggttcttttctttcttgaaagtgaggtaaaaaatgttttaagataattccttatttcttttattatattacattttaaatgtcaattcattttaatttttttcaatcaaataaaaacaagtctgtttcttataaagttaccttcatgaattgcatgatatagaatcagtcctttaccttttgtggaaaggtgttctgaatatatatgtaggtgtggatcaacactgaatacagactggcaattgttaaacttttacagtattgcaatactg

SEQ ID NO: 6078 - DNA, 1133 bp, Homo sapiens
tttttttttttttagcaatttcagtgtaatgaaagaatttaagctttgaatttataatttgctgtggtggggttaatttctgtcagtatttgagattgtattatcagtcttgcataatgaaatccttttttggctaagtatttaattcgaacatatttgcctttttaaaaagtgcttggcctaaacttattgtaactgcatgaaataagcatttgcttaaaacttaacattgtaaaattgttctctctgaaatgtgtgcagaatttaaatcatggccaaatgtattactattaccctatttacagtaatttgctttgcagaaaatatttcttcatcatggaactgtgaaatcaaattgaagatcttactggtaaaaatgacaaattaacaaaaggactaagacaagtggtgcccaaacaacctttttattctgcagttccatcatcataatagaccagttaacccaggagtcctaatgttttaaaacatcattgtggtgatcttgtttattctatctcactaaggatatccagtttcctaagctcttactggctagcaatttcgtcttaattttattgctaaatgttcaaattttgcttccaaactcactttatttttgcagatgtgtacatctgctaaatactaattttatgtaaatgattttgttgattatctttccacatcttaaaatgtttctaacagctttgagattttatctcaacaggctctctctgaccccaaagtagtacttaccttcgtgactactgacaaagtcacaaaatgcaggcgatgtcatgtatttcggtacaactaaatctaggaaacggttttttcattgcattactgcatattttcattttcatttaaattatgtcccctttttctcttgcttgaaacagtgctcctcgaactttgtcttccagcacattttaaagagaaccaattaaagaacaatcacacattctgcttattaaaggctatttaaaaagaaacattttgtattagaaaatggccaactttaaaacactattttttacactcataaaaatgttttttaaatcgccttgacaatcatcagcttttgaaatgtgaattcctattgccagagtaaaggtctcgtttttataccacca

SEQ ID NO: 6079 - DNA, 1247 bp, Homo sapiens
attttacacttaatttataatatttattgagtatattatgtcctcaacaagtaactataaaatgaaatacttaactcggtgaagactattttatgcaaagtttttttttttttttttttttttttttagcaatttcagtgtaatgaaagaatttaagctttgaatttataatttgctgtggtggggttaatttctgtcagtatttgagattgtattatcagtcttgcataatgaaatccttttttggctaagtatttaattcgaacatatttgcctttttaaaaagtgcttggcctaaacttattgtaactgcatgaaataagcatttgcttaaaacttaacattgtaaaattgttctctctgaaatgtgtgcagaatttaaatcatggccaaatgtattactattaccctatttacagtaatttgctttgcagaaaatatttcttcatcatggaactgtgaaatcaaattgaagatcttactggtaaaaatgacaaattaacaaaaggactaagacaagtggtgcccaaacaacctttttattctgcagttccatcatcataatagaccagttaacccaggagtcctaatgttttaaaacatcattgtggtgatcttgtttattctatctcactaaggatatccagtttcctaagctcttactggctagcaatttcgtcttaattttattgctaaatgttcaaattttgcttccaaactcactttatttttgcagatgtgtacatctgctaagtactaattttatgtaaatgattttgttgattatctttccacatcttaaaatgtttctaacagctttgagattttatctcaacaggctctctctgaccccaaagtagtacttaccttcgtgactactgacaaagtcacaaaatgcaggcgatgtcatgtatttcggtacaactaaatctaggaaacggttttttcattgcattactgcatattttcattttcatttaaattatgtcccctttttctcttgcttgaaacagtgctcctcgaactttgtcttccagcacattttaaagagaaccaattaaagaacaatcacacattctgcttattaaaggctatttaaaaagaaacattttgtattagaaaatggccaactttaaaacactattttttacactcataaaaatgttttttaaatcgccttgacaatcatcagcttttgaaatgtgaattcctattgccagagtaaaggtctcgtttttataccacca

SEQ ID NO: 6080 - DNA, 1708 bp, Homo sapiens
cttattgcccgcgcggtgagggagcgtggtctcgcgcaagccggcgtgcggtccggcggcgctgcagttgtgtccagccggtcacggggcggctatggcggccacgttcttcggagaggtggtgaaggcgccgtgccgagctgggactgaggacgaagaggaggaggaggaggggcggagggagacgcccgaggacagggaggtgcgtctgcagctggcgcggaagaggtgaggcaccgggataacggcagcgcgctcaccgcagctggaaggtgcgcgggcctggcagccgcgacggcgcctaaggccggggctccgcggtcttccgagtggcccccgcggttgccgccgctccttggctctgcttgggccctgggtctccgtgaagccgcggcgtccagcggcgccagccccaggtgtgtgtggttctcgcgtggatctgctggcgtttcgtggagtccagggtgaagccgctgtgggagggctgggttcaaatccgttctttaaaggctttctggagcgtttctggagcatttctggaggcttggtgtcttgcggactcgtgatcttcccgcttgtcacactgtcttgggccgcagcgctcccgcgggccccaccacgtttgtcgtggattgttcacggacacaccaattccctcgaaactttttaaacctgcacccaacacttcaattagcatgatgtgtcagtagccaatgaacacgctttaaaaaaattgtttccaaacacaaaaaagtgggagaaaatagtcaagtgagccctgacccctacacaaccgggtaaattcaacaggaagattttgccacgtttattttctctcccgccactcctaagcgaattccagtcatcatggcctttcacctctacatttttcagaatacatctcaaacgttttagggattttcttacatatgctattatcacccctaacaacactaatactaattttccagtatcattttgtagtccatgctcactcacgtttacctagttttttcaaacatgacattttacagtggtctgcgtgaatgagaatcctaacagggtccacaggttacatttagacgtgtcacttcatttagagcaacctcctcttacccctcctaagagacaggactgattgtcttgtccagtgcccccacactctgaatttgtctgatagcttcgttgtggtgtcacttaacgtttgtatcacctgcatgtcctgtaaaatgaatgttcatttggaggcttggtcagattctcattcaaagttttgtcggcaagaatgcttctactaagtggtgctttctgtttcttattgcaggctatccccagctgtctcacttttagggatgctaagattggttcttgggtcaggtggacagcctgatcactattttagagttctccgtaaacacgtatgcagtagttttatctgttggttatcattgtccgagtccatcgttttctgaggatattagttatattctttataaaactaacgtgcattttatttattgtaaatcatacatatagtgcccttttgccatgatactgtttgtattgaagttgctttagtttcatcttgtttcttgtgttagggaagtgcggctccttcgaagacaaacaaaaacatctttggaagtttctttgctagaaaaatatccgtgctccaagtttataattgctataggaaataatgcagtag

SEQ ID NO: 6081 - DNA, 1708 bp, Homo sapiens
cttattgcccgcgcggtgagggagcgtggtctcgcgcaagccggcgtgcggtcccgcggcgctgcagttgtgtccagccggtcacggggcggctatggcggccacgttcttcggagaggtggtgaaggcgccgtgccgagctgggactgaggacgaagaggaggaggaggaggggcggagggagacgcccgaggacagggaggtgcgtctgcagctggcgcggaagaggtgaggcaccgggataagggcagcgcgctcaccgcagctggaaggtgcgcgggcctggcagccgcgacggcgcctaaggccggggctccgcggtcttccgagtggcccccgcggttgccgccgctccttggctctgcttgggccctgggtctccgtgaagccgcggcgtccagcggcgccagccccaggtgtgtgtggttctcgcgtggatctgctggcgtttcgtggagtccagggtgaagccgctgtgggagggctgggttcaaatccgttctttaaaggctttctggagcgtttctggagcatttctggaggcttggtgtcttgcggactcgtgatcttcccgcttgtcacactgtcttgggccgcagcgctcccgcgggccccaccacgtttgtcgtggattgttcacggacacaccaattccctcgaaactttttaaacctgcacccaacacttcaattagcatgatgtgtcagtagccgatgaacacgctttaaaaaaattgtttccaaacacaaaaaagtgggagaaaatagtcaagtgagccctgacccctacacaaccgggtaaattcaacaggaagattttgccacgtttattttctctcccgccactcctaagcgaattccagtcatcatggcctttcacctctacatttttcagaatacatctcaaacgttttagggattttcttacatatgctattatcacccctaacaacactaatactaattttccagtatcattttgtagtccatgctcactcacgtttacctagttttttcaaacatgacattttacagtggtctgcgtgaatgagaatcctaacagggtccacaggttacatttagacgtgtcacttcatttagagcaacctcctcttacccctcctaagagacaggactgattgtcttgtccagtgcccccacactctgaatttgtctgatagcttcgttgtggtgtcacttaacgtttgtatcacctgcatgtcctgtaaaatgaatgttcatttggaggcttggtcagattctcattcaaagttttgtcggcaagaatgcttctactaagtggtgctttctgtttcttattgcaggctatccccagctgtctcacttttagggatgctaagattggttcttgggtcaggtggacagcctgatcactattttagagttctccgtaaacacgtatgcaatagttttatctgttggttatcattgtccgagtccatcgttttctgaggatattagttatattctttataaaactaacgtgcattttatttattgtaaatcatacatatagtgcccttttgccatgatactgtttatattgaagttgctttagtttcatcttgtttcttgtgttagggaagtgcggctccttcgaagacaaacaaaaacatctttggaagtttctttgctagaaaaatatccgtgctccaagtttataattgctataggaaataatgcagtag

SEQ ID NO: 6082 - DNA, 1240 bp, Homo sapiens
gaatataatgggaagtgtacaggctaggaagaacttgaagtgaacaaatttcaaaatcttaacctgatgctaattttcagggttctccattacagtgtaaaaattcagaccacgacaactatggtgtcatgaggaaaaaaaatcaggcatttttccaaaggaagtgctaatgggcctatttgacttctgagtgaagcaaaaactacccagatccattccctacaattcacatccccaaaggtcaaaaacaaactaggaggacctgggaatttcagctggagatactgattattgagttctgaagtagagtgttggaaataggcaattagagaaagtccattgatgtcattttgtttataatattgcagttcatactgaatgaccacttgatatgactaattcagggaatatatatttttctatgaaagctatgaatgttactatcacggcttttccttatttttacttgtatgtagcagcatttacagaaatgccaaaaatgtgcctcattaagaggcaggtcttaatcagttagataaaaataaaatgtatagcttaagatcaaaacagtcatatttttagatacagtgaaatcttttatgtttctctacagcaccttaaaaattagaacttgaatactttgagtaaacttactacaatctcatcccaacaaactttaatggtagcatgtttggcctatttcattgtggcctgtactaggattagaaaatttggtcgtggtataacaaagaagtgtatttacaataggatttaatttgttgttaatatgtatttgttgaaattaaaattgccagattaaatgaatatactgtcgcatctttttaacatagtaacgtgttactggaaaaattaagttgttgaaagtaagttgttttcccatttaaaaatatctgaatatatgatttgcatgtgtaaatctgaaaaactaaactacagaaacctagggttttctatttcttttttaagtcaaatgcatttttttttttttgttatacagatgaaccaagtgtctaaaatacttgagaaatttgtggttgcatgtctgttttaaaaaaaaggctttttgttttttagcataagccagaatattctaacctactaagtctgtgtcctttgctccttttgtagtatactttcatctaaattactgatccccaatatgttgatacacaggtgagaaagggaagaattcctaataaactgctattacttttaggtg

SEQ ID NO: 6083 - DNA, 1247 bp, Homo sapiens; identical to SEQ ID NO: 6079

SEQ ID NO: 6084 - DNA, 1708 bp, Homo sapiens; identical to SEQ ID NO: 6081

SEQ ID NO: 6085 - DNA, 1240 bp, Homo sapiens; identical to SEQ ID NO: 6082

SEQ ID NO: 6086 - DNA, 2277 bp, Homo sapiens
cacactcctgggctcaagcaatccttgtgccactacacctggctctcttgctttgtttttgagcttactccaataacccttcatgctctttgctataaatagaaacttcttcctatgtttgatgcctttgatcttttgttttgataggcaagaagccatctttcagatttctagatagccttaaggaagttttatctagatagtttgcctacaagaggagcattaatactacccatttatggaggttttacttgccaaatttgggcagtttttatcatttaaaatctagcaaaacattatgtcagtgccctcccaggcctttaaagtcttcatgtaacagcaggctaggggttttgtcagctgtaaagttacatcttctgttcctccaaacagaaacatactttttaatctaaacaagtggatacttttcttgggagcatgttaaaaaaaaaaaaaagtgaagccagccagtcacacggtgtgatgtcgtttttacatagcacctttatacacgatataaaaaagtaggttttttgcatcaactgcaaacatgttttgtactctgtggatcggaatcttggtgaggaagagcattgcatcccgcaaaaggctgatgagtcagttagctggagagacagtgccatcattctgggttgcagttctggtgaagtaagtaggatgttaacactgcagatggaaatggttttcagattgccacatggaataatagtatggaacgtgaaatttcaggaataggaggagattcttttattattttcctccttccactttgtacatttttttaatagcctgcaactagttacatttatctttttttttttttttacatttttatccataatacaagtaacttgactaaagccagtgtctgtttcatgtaaatatattaacaggtccaaaatcaccaactaaaattagctttatactgactttttctaaagtcagtccttgtctcacccaaatattttaacaagtccaaaaatagcacatagctacttggaaccatattaaaatctcattataacatgaatttcaggtattccatgttgtagacttctccttgaaagataatgacattgaaaaatgctcttaagagagttgttaattctgtttcccaaaacttcctggataaaacaattctaccttaatgctattaagactatggtaggtggtttttttcttaaagtaacaagactgacgtataaaatatgaatgcgacatttaagatgaaagtgttcataggcacacctcgctttattgtgctttgctttattgcgcttcgtagatactgtgtttttactagttgaaagtttatggcagccctgtgaaaaataagcctgtccgtgctgtgaagcgaacagcatgtgctcacttcatggctctgtgtcatgtttcggcaattctcgcagaatttcacactttttcattattatctgtgactgtgatctgtggtcagtgatctttgttgtttctaatgtaatcgttttggggcattacaaaccatgcctgtgtaagatggcggattagtacattctcacaccgctataaagattctacctgagactgggcattttatgaagaaaggggggttataaagatactacctgagactgggcattttataaagaaaggagggttaattgactcaaggttctgcatgtctggggaggcctcaggaaacttacagtcatggcagaagatgaaggggaagtgaggcacatcttacatgatggcaggagagagagtgtccaggagaaacagccacttttagaactatcagaactcatgagaactccctcactatcatgagaatagtgtgggagaaactgtgcccacgccaatcacctcctaccaggtccctccctcaacacatggagattacagttcgacatgagatttgggtagggacacagagccaaaccatatcaaatggccaggttaattggtaaatgtcgtatcttctgactgctccactgactgactgttctcctatgtctccctctcctggatctccctattccctgagacacaacaatattgaaattttaggcgaattcacaaccctgcagtggcctttatgtatttaagtgaaagacagagttgaacgcctctcactttcagtcagaagctaggtggctcacgcctgtaatcccagcactttcagaggccaagtggggcggatcacttgaggtcaggagttcaagaccagcgtggtcaacatagtgaaaacacctctctacttaaaaaaaaaaaaaa

SEQ ID NO: 6087 - DNA, 2277 bp, Homo sapiens
cacactcctgggctcaagcaatccttgtgccactacacctggctctcttgctttgtttttgagcttactccaataacccttcatgctctttgctataaatagaaacttcttcctatgtttgacgcctttgatcttttgttttgataggcaagaagccatctttcagatttctagatagccttaaggaagttttatctagatagtttgcctacaagaggagcattaatactacccatttatggaggttttacttgccaaatttgggcagtttttatcatttaaaatctagcaaaacattatgtcagtgccctcccaggcctttaaagtcttcatgtaacagcaggctaggggttttgtcagctgtaaagttacatcttctgttcctccaaacagaaacatactttttaatctaaacaagtggatacttttcttgggagcatgttaaaaaaaaaaaaaagtgaagccagccagtcacacggtgtgatgtcgtttttacatagcacctttatacacgatataaaaaagtaggttttttgcatcaactgcaaacatgttttgtactctgtggatcggaatcttggtgaggaagagcattgcatcccgcaaaaggctgatgagtcagttagctggagagacagtgccatcattctgggttgcagttctggtgaagtaagtaggatgttaacactgcagatggaaatggttttcagattgccacatggaataatagtatggaacgtgaaatttcaggaataggaggagattcttttattattttcctccttccactttgtacatttttttaatagcctgcaactagttacatttatctttttttttttttttacatttttatccataatacaagtaacttgactaaagccagtgtctgtttcatgtaaatatattaacaggtccaaaatcaccaactaaaattagctttatactgactttttctaaagtcagtccttgtctcacccaaatattttaacaagtccaaaaatagcacatagctacttggaaccatattaaaatctcattataacatgaatttcaggtattccatgttgtagacttctccttgaaagataatgacattgaaaaatgctcttaagagagttgttaattctgtttcccaaaacttcctggataaaacaattctaccttaatgctattaagactatggtaggtggtttttttcttaaagtaacaagactgacgtataaaatatgaatgcgacatttaagatgaaagtgttcataggcacacctcgctttattgtgctttgctttattgcgcttcgtagatactgtgtttttactagttgaaagtttatggcagccctgtgaaaaataagcctgtccgtgctgtgaagcgaacagcatgtgctcacttcatggctctgtgtcatgtttcggcaattctcgcagaatttcacactttttcattattatctgtgactgtgatctgtggtcagtgatctttgttgtttctaatgtaatcattttggggcattacaaaccatgcctgtgtaagatggcggattagtacattctcacaccgctataaagattctacctgagactgggcattttatgaagaaaggggggttataaagatactacctgagactgggcattttataaagaaaggagggttaattgactcaaggttctgcatgtctggggaggcctcaggaaacttacagtcatggcagaagatgaaggggaagtgaggcacatcttacatgatggcaggagagagagtgtccaggagaaacagccacttttagaactatcagaactcatgagaactccctcactatcatgagaatagtgtgggagaaactgtgcccacgccaatcacctcctaccaggtccctccctcaacacatggagattacagttcgacatgagatttgggtagggacacagagccaaaccatatcaaatggccaggttaattggtaaatgtcgtatcttctgactgctccactgactgactgttctcctatgtctccctctcctggatctccctattccctgagacacaacaatattgaaattttaggcgaattcacaaccctgcagtggcctttatgtatttaagtgaaagacagagttgcacgcctctcactttcagtcagaagctaggtggctcacgcctgtaatcccagcactttcagaggccaagtggggcggatcacttgaggtcaggagttcaagaccagcgtggtcaacatagtgaaaacacctctctactttaaaaaaaaaaaaa

SEQ ID NO: 6088 - DNA, 287 bp, Homo sapiens
aagccatgttgaaagccagcacaggctgaaagctaagcctcttgtgccaaacagccaaattgtaaatgcaaaggaaatgttcgaaggaaaataaaagtgctgctccagtgaacacaccagtgataaggaaacagccttcttgctgatagggagaaagttttagtgcctggagagatgatcagcccagacattatatttccttaacgcagagcctaatccacagcaaagtcctaactatcttcacttctatgaagactgacagaggtgaggaagttgcagaagaaaag

SEQ ID NO: 6089 - DNA, 287 bp, Homo sapiens
aagccatgttgaaagccagcacaggctgaaagctaagcctcttgtgccaaacagccaaattgtaaatgcaaaggaaatgttcgaaggaaaataaaagtgctgctccagtgaacacaccagtgataaggaaacagccttcttgctgatagggagaaagttttagtgcctggagagatgatcagcccagacattatatttccttaaggcagagcctaatccacagcaaagtcctaactatcttcacttctatgaagactgacagaggtgaggaagttgcagaagaaaag

SEQ ID NO: 6090 - DNA, 1763 bp, Homo sapiens
gttgggtgcctacccaccagtctcatgtgtgagtgtatctgtataagtgtgtgtatgtgtgtgtactcacgtgtggctctccctctgccactgagtttctgtgaccaggcccacctggtcactaagggaggggactgatccctggggtttcctcgttcctgctgtggagtgagctggggcttggtgagcaggccagcagagggaggctgtatggtgcatgtgtgatatgtgtggttgtgtgtgtgcgtgtgtgtgtgacagagaggtgtggtggtgtctgggcagctgtacctggctgatgggtggtgtgagggctatgcgatgggacagtgctggggtaagcctgggagtgtgtggccacggtaggagtgtgtgactggtgggacacagtctatgaaactgccggtgtatgcttggggagtgactgtgattgtggggaaccgagagtgcctgggcgtgggtgttagcggcaggagggggtgtgacaaggtgtgtggtgacagtgctgggagggaaggtgagagcccagtgtgggggtgtgtgtgtgagtgtgtgggagaccatgaggatgtgggtgtgcacatggagagggctagagggcaagtcttggggtttgtagtgttgtgaccaagacctcgggctctgtacccaagaattatttgggctccaatacttgcttgtgcctgttaagagcaagagacccaagctaggcctctcaaggctgagtgtccttatctgcagaatggagagagtgaggacaaaagttcctgtgttaaaggtcctttaacacaatcttggcccatagtgagaacacagcacatgtgaagtcttttgttgtcaccacccccagctatacggttcccattctcctgggagctggggctaaagaaagcccagacagtatccaacccaatttcctgcctgtctgttgccccttcccatctccttgaccaagcagcttgagggaggggggatgcccagacagagcccccagtacccagccctgttcagcctgcatgacagcccctccctcaccagaccttagtgtcagtagtagcgatgggggagacaggggtgggggatgattcagagctgtgactgcagggcgctgacaccatttagctggcacagtttagattaaaattagaaataatttaaagtacagacaaaaagataaagccaaggatgcctctgcccccagggaatggtgatgggggtctccagctgggggaggggttcacatctggggagcagaatctttcttagaggcttgagctggccttcagagaaaatgcttaggcctttcagccaggagacacagagtaccttgctacctttgccatttcttcctcccaggatatctccaggcctcagttttttcagctgtgtaatgggcacaatagtaatgtgagaatcacctgaactgtaaggcacaagagattaaaaaatgtcactcttcagtctgggcacggtggctcacacctgtaatcccagcattttgggaagccgaggcaggtggatcacttggtcaggaatttgagaccagcctggccaacatggtgaaaccctgtctgtaccaaaactacaaaaattagctgggtgtggtggcgcgcacctgtaatctcagctgctcaggaggctgaggcacgagaatcacttgagaccaggaggcagaggttgcagtgagccaagatcgtgccattgcactccagcctgggcgatagagtgagaccctgccacattaaaaaaaaaaaaaagtcact

SEQ ID NO: 6091 - DNA, 8067 bp, Homo sapiens
cagacccctgagtctaacttattatattttatatatgcatggtattttatttatctatatattataggtattaaaatcttttaaacatttttctaaaaagctattttcaaaaaaaattttgtggtttttaactttggttcagtttggtaagtgctatacctttttttaataccagtatctgtatgttattttggtttattttactctttaagttaaatacagattaatgtccctgtaaatctgataatgataaatatagcataaaggtgttatattcaaatggattttaatttttctccaaactaatatttacataaatgtatgtaaactatttgagttatgtggagttccagttagttttcttttgtgtatgtctcaacaaatgtttagtgttaatgcttgtcagctcacattttcttttcctttgttttgtaagattactttcttcccttcctctcttccttacctccattaccttcctttactccccttcctccccttctcttttcctctctctctattccttctcttacccttccttctcccctttgtccttccttcccctgtctctgatctcattccctcctcccatgccctcctcactattccccttcccctgcttctttcctcagcctctctttcttttttaatattgcctccctccctcccttcccttccttccttccttcctttttcctcttctctttccacccacctttttattttttcagactggcttaatgaacagtctagtgatagaaagtggtaaaaataagttatagtagatctatatagctatataatccagtatatccaatataatagaatattatgcaataattacaaactatgctttttgtgcttcttcatatctacctcatgcccctcatatttttcatcttcatattctgtcatttaccaaatcctatgaaaataatctctcaaattcatcctttcctatctccttcatcttcacatcctgtcatttgctaaatcctagaatttttcaaattcattcttttcatttctcctaccatcccccaatttccccttaacagaactattaaaatagctgcctgagttggtcttgtactattcttctatttagccaataggctatggcatattttaatcgtcctaaagcacagttctcatcagattactacctgcttaaacctttctgttactggctgcccatttcctaccaacttaatataataccgtagtcttcagtgacttgcagattatggctctaacctgcttttttagttctctcaagctccattttacccttaacttccagtggaacttgctttctgcttccatgtcttttttcccactatttgctttgcctggagtacttaacttcttagtctgccctttagaacctacctccttcgaggcccaattcagatgccacctttccattttctctattattatctaagtgtctcttctcccccttatctatgttataaattccttaagttcagagactgtgtcttgaaattctctgaatttttaacacagtgccttgctattataaatatttggtagttttaattgtgcagtaaacacttccatttatgaaaatttctgttttcttgtctctagttaaagaagagtgtaagagtcctaaagctgagtgttggtcccaaaaaatgtccaataagcaggtaagcttccttaaaatcaaatttctagttaccaattttttaatgcaattggtggctctgtagcattggactgaatttctcaaccttttcaaccaaatttataaggtgtgtggccagagggtcactgaagttaagctgacagtcacttggatgggaggttgtacacctaaagtcctggatttggaactagaggcacctgaaatcctgattctctcatttaatagttgggtggccttgagcaattcactttacctctcacagcctcaattttctcatctttaagtggagataaaaatattaatcacttgtccaggcgtggtggctcatgcctgtaatcctagcactttgggaggccaaggtgggcggatcacctgaggtcaggagttcgagaccagccttgccaacatggtaaaaccccgtctctactaaaaatacaaaaaaatcagccaggcgtggtggcatgtgcctgctgtagtcccagttactcgggaggctgaggcaggagaatcacttgaacccatgaggcaaaggtcgcagtgagctgaaatcgcaccactgcactccagcctgggcaacagtgagactctgtctcaaaaaaaaaaaaaaattaatcacttgtagttgctcccaatatatatggtcttttgtgtgtgtgtgtgtgtgtgtgtgtgtgtgtgtgtatacatagacatatatatacacacacatagacattatatatggtcttatatatatacacatagacatatatatatggtcttatatatatacacatagacatatatatggtcttatatatatacatagaaatatatatttacatatacaattgaagtacatggaacaaaatagcaaatttaacaggctaacttctgtggaattagattggtgtgggggaagccaagatcatttatgttttactttatatagtctctgctgtttacaaggattatggatgcattttataatgaaagaataacaaatctttgatctaaaaaaatttgacacgtatatttattagatgtgtacttttctgtatgcctatcatattttaatatatatttttttaaattgatctcttatagtaatatattaaatttataaaaggtcttagctgaatatttggcacataacaggtagtaaatggaacccattaatgtttagataccagtaaacggtttaattacttgacttttaaggccctctccatttgaaactcttatactgtaatttcctttcttctagaaaagggattgataaactttttgttcaatagacatctttggtgaagcccatggacttttggtgaagccattattattctcagaatagtatttttaatgctaaaataaaatacatacgattttaaagaaaaccagttatactgatatacaattagaatcaccactgttgtggttttcatagttgatttgggctgctataataacaataccatagactaggtacatttgaacaataaacatttatttctcacagctctggaatctgagaagtccaagatcaaggcactagcagaataatgtctttaatgctaaaaagatttaagagaaaaccagttatattgaaatacagttagaatccggtaaagtgccattgtctggtgggggctccctttctggcttgcagatgatgcgtcttctcatattctaacatgatggagagaaagagctctattctctttctattcatataaggacactaataccatcatggatgttgcaccctaaagacctcatctaaacttaattacctaccaaaggccccacctcctaatatgatcccattaggagttaggattttaacagaagaattttgggggaatacaaacatgcagaccatataagtgttttgttgcctatattcataattgcaggaaatgctaaatctcattgagaggttaatgaagattaaggtgtaattttccccatccaagtttataggccccttttcttatgatacaaaagggaaaatagcacataaaatttttttgcaacaatttatttagaacactattacatattaactataaatatatttgcacaaaaagtttattcttacttttttaatagactttagaagggcctgccaaatataatattaagctattgaagagaaatgaaagtccagaagtctcagaaacccaaaaggttgtgactggttatccaaatgctattgataaggtaaaaaactatttattccaattctcttcccaaactttaacacctgggaagatgattgagtgaaaatcgaatgaccatttttgtacataaaactcagctttttgtgtgttcttgtattatacgttcatcttcatgcccaaaatatttattcttttagcctaactctggaattgagaactttttagcatctttgaatatctccaaagaaaatgaagtacagtcatctcatcatggggagcctccaagtgaagagcatttgtcaccacagtcatttgccatggttcgtattttgtaggaactttcttactgtggtaatttctcgactgttgaccatgcagacatatcccatgcaagtgttcaaacacttccatcatggaggctggtatgttacatcattattgtcatcttgtgaggaaaccaggctgccctgggcaatttagccatactttttctctttagaccacagttcccctgcttttcaaacattgctactaggtaactgggatgaaagttaagcaggaggataagtatcgtttctgtatcagaaatgtgggtgttgggtttttttttttcagtttctatctgaatgtagttaatgtcttaattgttaacaatggaattctttccaagaaagatcaataagttctacagatgtaatgttgactttgttctcttcaccctcaccatctccatgtgaatcattttcaaaaagaagggaacacggatgcttaaagaaattctaaaaattgatggctctaacactgtggaccataagaatgaaatcaaacagattgctaatgaaatccctgtttcctctaacagaagagatgaatatggattaccctctcagcctaaacaaaataagaaattaggtaagtaaactaaatactattaccaataatatcattttaaaaattcaattcatttggttctttttaatcatgtacttttaaagataaaactgcttttattttaatgtatttatttattttagagatggtgtcttgctgtgttggccaggctggtctcaaacttctgacctcaagcaatcctctcacttcagcctcccaaagtgctgggattacaggtatatgccaccacacctggcccaaaactacttttattcttaaaactataatttttatatttgtttcagttatataataatataactggccaggtgtggctcatgcctgtaatctcagaactttgggaagctgaggcaggcggatctcttaagctcaggagttcaagaccagcctgggcaacatggcggaaactctgtctctctaaaaaatacaaaagttagctaggtgtggtggcgtgtgcctgtagtcccagctactggggaggctgacgtggtaggattgcttgagccttggaggcagaggttgcagtgagccaagatcacgccactgcactctaacctgggcaacagagatagaccctgtctcaaaaaacaaaaagaacaataataatacaaccatgtaaccaatagatctacagtcactaaatgtcttcttgtgattacttaattgtagtgttatagataatcattctgtagacatccaaacctttaaaagtttgcacattctagcttttgtcctcagtaatttaaaaattatcatgtaacttaaatacattatttaacttttctgaaatcttgtttcttatttataaaataagaataatacattacagattacttgtggtaattatataacatgtataaatataaaacagcactatgtccaacacattgtaggtgctaataattgatattaatattatgttaaaataacctaactgttgtaaaaatagaaaaatctacaaaatcaattaaaaatcattaatagagttagatataggaaagtgagtcatactcttaagtctgtaaagcctatagcataacatctggcacataactggatttcagtaaatatccgccatatttgttcctaccctgaatgtcctctatactttagcattttatctgtataatgatctactaaaggcagccaggaagaatgactgatacaaaagtggatgtgggcagaagtttctcagagaagtcaaaaacattttggaataagcagatctaagcgtattaaagatcaaaacctggaattggctgggcacgttggcccacatctgtaatgccagcactttgggaggccaaggcgggtggatcacctgaggtcaggagtttgagaccagcctggccaacatggtgaaaccccctttctactaaaaatacaaaaaattagccgggtgtggtggcaggcgccaccaagtagctgtaatcccagctacttcagaggctgaatcaggagaatcgcttgaacccgggaggtggaggttgcagtgagccaagatcacgccatcacactcgagcctgggcaacaagagcgaaactctgtcaaaacaaaaacaaaacctggaataaaagcagaacctaaccccatttatattccagtgataattaattaaaaattccaaaaaatattaggaacctgattatttattatagtgacagacatggtcctgaaatagaaccaaattaattttaagacaaaattagataaagatggtcccattgtcaaaaacaagtaagttttactttatttcagtataggaaaaaaaaaaaaaaaaactcataggctttagagtcttagggtcactagctcagaatccagcccctgttatagaactaactggctctgtgactttgagcaagccacttaactgcttttttaatctatattagtaagaagtttggattaattcttcaatgaggtatgcttttgttctattagtgagtttgttaatcataaagaatgtgaacactcagaattttaaaatcatcttccatataaaaacacttagaagacaatttcaaaaaaaacttttaagaaatattatttcagagccacaaaaatattcatccatgtgtctcagaatgtaaggtggaattgcaagaattgaggtggaagccaaaacttcaaaacttaaggatgaattatatttcagctcaagaaagccatttgtttattcattcttttatttttctcttcttacttctgcaaaacaagaaagccatttgtttgttcaaattttacctgtagcagtaccatgtagtcattagctgctcaaggttttaatttttggcagttaggtacttatattttaaaatctttatcttaataatttatcattaatcaattatactcatccaaaaacctttactgaagtcacaataattttaggaagtactaaatagttgtttatatgtgcttcatggaagactcatctttttaatgcagttggtggctctatagcgtctaactgaatttttcaaggttttcgaccaaatttataaggtgcgtggccagaggaccactgaaggtaagctgacagtcacttggatggcaggttgtactgctagagtccaggatttggaactagagccacctgaaatcctgattctgttatttaataatgggtggccttgagcaattcacttcactttttagcagtttcctgcttgctcttctataaaaccctacaataagtgcataatttgagatagtattttattaataaagatagactcttttctcttttttggtagcatcttatatgaacaagcctcacagtgctaatgagtaccataatgttcagtctatggacaatatgtgttggcctgcccccagccagatccctcctgtatccacaccagtaactgaactttctcgaatttgttcccttgttggaatgccacaacctgatttctcctttcttaggatgccacaggtatagtatactactgttctatttatataaattatttaacattaagcttaaataaattggttgaaaatgtttagctagaaaaaataaaatggggcctatttttcttaactttatgagcagcatagatttatgcttcttaccctagctctaatatttatacataaccaaagccctaagagaagctgacagggaggaactgggcagcaggtatcctggcaagattcctcaaactaatagagccagggatcttggcctacagtagcaattttcaaactttttggtctcagaaacttcacactttttttggaggaccccaaagagattttgtttacttatatccatatttactgtgtttgaaattaaaacaaaaaaaattg

SEQ ID NO: 6092 - DNA, 618 bp, Homo sapiens
ggtgagaaattacttaatggctgcaatgtatgcagtgtacataattcaggtgatgaatataagaaaagcccagactttaccactctgcaataaatccatgtaacaaaactgcactcgcaccccttacgtttatacaaatttttaaaataaataataactagaaaagcaagaggaaaccaaacccaaaattattagaagaaaagaaatgataaagattggggcagaaattaatgaattgatactaaaaatagtacaaaagatggatgaaagaaaaagttgttttttttttttaaaagataagcaaaatcaacaaacctttagccggactgtaaaagagagaatatccatatgaataaaatcagagatgaaaaaggagtcattacatctgataacacagaaattcaaaatattttagagactattatgagcaactatatgcagtaaattggaaaacttagaagaaatggatgaattccgagacacataaaaacataccaagattgaaccatgaagaaatccaaaacttgaatagaacaacattaacaagatggaagcggtagtaaaaagcctcttatcaaagtagaccaggacctggtgttttcgctactgaattctgcc

SEQ ID NO: 6093 - DNA, 9188 bp, Homo sapiens
ctgttttaatgctggtcatttgtgtctgaattccaaagggacgggagtataatgaggtttgtctgacccctccctcccatcatggcctgaactagtttttcaggttttctttggaatgcccttggtcaagaagaggatccgttcagttggttgggggagcttagaattttatttttgtttgctctcctcagtgtcccaagtagttggactataggcacacaccacacagcaccacacctggcttgtttcctttttaaaatggtggctcttgtcctttttgggaagtgtttgggcacagaggtactgatactgttattctggttttagaataagaggctgatggaacctgcaggtaagggaagagctttgacttggacagagaagtggccagcttcttaataaaaagtgggtaagatggaggtgaaacttggacacatgcaatatctgacattgtaaatccttttttcttgtgaggctggattttgttgcttcatatgtgataacagaccaattatatcagtagttcaatggtgatgttcagtttaatctcttttcctctcttgtacagtactcttgttttagctttcgtaaactctgggctttcaccggaccaggttttcttatgagcattgcctacctggatccaggaaatattgaatccgatttgcagtctggagcagtggctggatttaaggtgaacatctagtcctacccctgtccttttaagcacataatacactctcacatccttttctccaccctgcatgttggatagtagcctcaggggctacatgcagatacttcattggcagtggctcttatgtgtaaagtactttccatttggtcttatttttatccacatagtttccttgaacaaaggagaaactacatataggagaaactgaggctcagaaaggtacaaggtgacttagcaggtcatgtgcaaaatctgttatagaactcaagtcatttgattcttgacctgggctcttttctgaatgcagtatttaccactcatgttgccaaacaactaaacaaacaaacagacaaaaactcagttgttcaatgagtgttacaggagattttgttcttcttagttgctctggatccttctgttggccacccttgtggggctgctgctccagcggcttgcagctagactgggagtggttactgggctgcatcttgctgaagtatgtcaccgtcagtatcccaaggtgagcaatgtattgtcctgtttgtctctcacccatgccataggaatctgtgtgtctggcggtatgtgctggcctcattctatagtgagacagtcaaggacttgggggtcagtggccctgaagacagacggtaccaacggaaatactgtagctcctcctgctgccaggccatgttttccccctctttcaaaatctaacttgagactcgcatttcctagaaggttttcttagaaaaactgtgttaccattcactctggcttccagtatctagcaatgcccagcccaaggggaggaggatgctctctctaagcacttttattcatacctccatgttactccatcagtttgcattttatatatgttctttttttgtttgactttgccatcactttgaaaaagtaattttttttctttttagtacaaactatatgtggcaagatctttggatttgctaataattatttttcagtttcccctcccaccgggggctacactgtcctctgcagcttcttctggacattttgggcctttcttaccgttgcctaaggcaagaatgaacactatgtctggaagatatttttaacttagttttgtctcttgttttgtttcttttcctgggtgtgagcaaaaagtatccttatctgcttttcaaaaaaataaaaaaatcttgataatatccccatttactctgatgtgattattacacattttatgcctatatcaaaatatcccatatgccccataatatatacacctactatgtacccataaaatttttaaaaaacaaacaaaaccttggtaatttataatccttctagcttctttttctttctttcttcttattttttgagacggagtctcactctgtcacccatggtggagtgcagtgatgtgatcatggctcactgcagccttgacctcccaggctcaagcgattctcccatctcagcctcccaagtagctgggaccacaggcgagcacgaccacacccagctaattaaaattttttttttttttttttttgtggagatgaggtattgctatgttgtctaggctggtctcaaactcctgggctcaggcagtcctcccaccacagcttctcaaagtgctgggacgacaggcatgagccactgcaccaagcctagcttctctttcttcatacacgttaatagttattttgtaataataattatatatatatatatttgtttgtttgtttgttttgtttttttttttgagacagaatctcactctgttgcccaggctggagttcagagttcagtggtgtgatctcagctcactacagcctctgcttcttgcagtgaggcgattccagggattctcctgcctcagcctcctgactagcttggattacagccacgtgccaccatctggctaatttttgtatttttagtagagatgaggttttaccatgttggtcaggctggtcttgaactcctggccttaggtgatctgccagccttcgcctcccaaagtgctgggattacaggcatgagccaccgtgcccagcctgcttttttgtttgtttgtttgagacggagtttcactctttcacccaggctggagtgcagtggcgtgatctcagctcactgcaacctccgccttcagtttcaagtgattctcctgcctcagcctcccgagtagctgggattacaggtgcctgccaccatgcctggctaatttttgtatttttagtagagacggggtttcaccatgttggccaggctggtctcgaactcctgaccttgtgatctgcccacctcggccttccaaagtgctgggattacagacgtgagccactgcgcctggccttgttttggtatttttgagatggagtctcactctgttgcccagcctggagtacagtggcgtgatctcagctcaccacaacctccgcctcttgggttcaagctattctcctgcctcagcctcctgagtagctgggactacaggcgtgcatcaccacgcctggccaatttttgtatttttagtagagatgaggtttcactatgttggccagactggtctcaaactcctgacctcgtgatctgcccgccttggcctcccaaagtgctgggattacaggcgtgagctactgcgcctggctctgccctttttttttttttttgagaccaagtctcgctttgtcacccaggctcgggtacagtggtgtgatcttggcttactataacctcaacctcccaggttcaagcgattctcctgtctcagcttcccgagtagctgggattacaggtgcgcaccaccacacccagctaatttttgtatttttagtagagacagggtttcaccatgttggccaggctgatctcaaactccagacctcaagtgatccacttgccttagcctctcaaagtgctgggattacagatgtgagatactgtgcctggcctgtttttttgagataggatcttgctctattacccagactagagttcagtggcacaatcatggctcactatacccttgacctcccaggcgcaagcagccttcctacctctgtctcttgaatagttgggaccacaggtgtgcaccatgatacccagctatttttaaaattttttgtagagacagggttttgccatgttgccaaggctgggcttgaactcctgggctcaagtaatcctcccacctctgcctcccaaagttcagggattataggtgtgaactaccatgggtgacctgacaaattttttggatgctagctatctggaggtgtttttttctggcttcagtgagtcagcataactaaatctgattttcagctgtattgtttggccagataagtttctgactttgttatatgccacccagttccaaccatcttcccttgagtccttttgcatacgtgggcattattattacattaaaggtgactccaaccttttctgttgttgtggtggtggtttgttgagacagtcttgctcttgtttgttgcccactctggagtgcagtggcatgatcatagctcactgcagccttgaccactggggcttaggctgtcctcctgcctcagcctcccaagtagttgggactacaggtgtatgccatcatgcctggatacttttgtactttttttttttcctataatttttattttaggtttggagatggatacatgtgaaggttttttctttctttctttctttttttttttttttttgtgaaagcaagtttattaagaacgtaaaggaataaagaaaggctattccgtaggcagagcagtcacatgtgaaggtttgttacatagataaacacgtgtcatgggggtttgttgtacatattattacatcaccccgatattaagcccaatacacaatagttaacttttctgcttctctctctccttccaccctcccccatcaagtagaccccagtgtctgttgtttctgtctgtgtgttcataagttcttatcattttgctcccaatttttatactttttgtagagatggggttttgccatgttgcccaggctggtctcaaactcctgggcttaagggatctacgttggcatcccaaagtgctgagattacaggaatgagccactgtgcctggtccaccccaaccttttttttttttttttgagatggagtctcgctttgttgtccaggctggagtgcagtggcgcaatctcagctcactgcaaccttcgcctcccgggttcaagcaattctcctgcctcagccccctgagtagctgggattacaggcatgtgccaccatgcccagctaatttttgtatttttagtagagacggggtttcgccatgttggccaggctgatcttgaaccctgtcctcaggtgatccacctgcctcagcctcccaaagtgctgggattacaggtgtgagccaccgcgcccagcctgaccccaaccttttcatgtttgttttgtcttcccagctatggtcaggatagatatgttcttctgcaatcatttaatattctttcttgacccatatttggaccgtattagcatccttattctcctctaaactttttaggattgtttttaggaaattaagtggaagttagtaaatggcaattatattcttctcaagtagaaaggaaaaagaaaaaagtaagatcaattactgccttgaccttcgttcacaggttctgccacgtggtagcacacttttccttctccaggtgagagccacagtgcagtgatcggccaagtggaggcacgttctggtatttcttctctagtctggaggcttataaaggactgtttatggtttagtgccaaaatgtgaattccaaattgtggaggaattttttagaaatgattaatcagaaccgtgtctttctactgtttgatgtttaggtcccacgagtcatcctgtggctgatggtggagttggctatcatcggctcagacatgcaagaagtcattggctcagccattgctatcaatcttctgtctgtaggaaggtgaggggttttcctctagaaagtcatcagtgttttgctggatttccaagcagagataaaaacaaaaacccaattcatttttaattttgaagactcaactcaattgttatttcttctgtggaacctttctggaaacaatttcttctcccctggtagatgtagactctacatcttccgtttcccatggtgggttatgcttacctttattagaatgtgtggcgttttgtatcgcaattattgatttgtatgtcattttatcccgctagatactatctttttattttattttatttatttatttttttgagacagagtctttctccgtcacccaggctggagtgcagtggtatgatcttggctcactgcaacctccgcctcccaggttcaagcaattcttgtgcctcagtctcctgagtagctgggattacaggcacctgccaccatgtccagctaatttttgtgtttttagtagagacgggatttcaccatgttggccaggctggtctctaactcctgacctcaggtctaggaatgcccgcctcagcctcccaaagtgctggtattacaggcgtgagccactacacccagcccccactagatactatctatctaatcctataaaattctatctgtctaactccatgagggtaagacccaaacttttcagctttgtatcctaagagtgacatagtagactctcaaagtttaaatgaatgtaattaagttgatgctgttaccctactttacccaaggcctagttttctgccattgtccctcctccctcaagtcctagcttctccaagtgttctttatctggagagctgttgggaagagagtgtttttcaatgtttcctttctttccgtctctctgacttccatatctcatctctgacctagaattcctctgtggggtggcgttctcatcaccattgcagatacttttgtatttctcttcttggacaaatatggtaaggagagcgggaatgggagggtcaaaggagctgctctctgtcatgtggcagatggggaagtctaccttctctgagctcactgctgccttttttcctttaggcttgcggaagctagaagcattttttggctttctcatcactattatggccctcacatttggatatgaggcaagtggtacaggatattcattagcttcttaaaataagtttttgtggtttttttttttagccttttattataaaagacagtaataatgctagtatgattcacttatagtgggtgtatcaacaaaaagccaatttttccctgggccaattttaaaggaatatgatctatagcaaagattagcatgcagaaaggcctgcaggggctcccaggtttaaaatgactagatattttagggctttccagactagattctttggtcccaagttgaccatctgacaacagaacagccatggatagtgttaattaaggagggggttgcagggttattcttgggtgttaacttacaggagttctgcttttgttcatcctggtttatattaattgcagcttgaactttcccaatattaaaacagttaatgaattatatgaaatatactggatatttcctggtttgtgccccaacccagaaactccttagagtcactaatattatttgcagtactagcacctttctttgtacaattcttataaactgatttctgcttactggtctggctgaactttaaaaaatatatgtaatctatgggttgattatgcctcttggcctaaggcttccaagagaaatactgaaccggggaagagtatatatgagagtgtttaaggatgagtctctcattacacacgtactagtggcaaacagcaaatgatttttaaatgaacatgggtgaacagaagtatgctcagtatggataataaaaattgattctatattcttttttaatttttagatttttatttatttatttatttttgagccagagcgttgctctgtcatgtaggctagagtgcagtgggtgtgatcttggctcacttgcagcctccgcctcccaggttcaagtggttcttgtgcctcagcctcccaagtagctgggattattggcgtgtaccaccatgcctggctaactttttgtatttttagtagagatggggtttctctatgttggccaggctggtcttgaactgctgacctcaagtaatctgcccatcttggcctcccaaagtgctaggatttcagctgtgagccactgtgcctggccctggttgtatatttttgagccttgtggaattactaataaccacaagtcccttagcagctttttcttttttcttttctttttttttttttgagatggagtctccctctttcgcccaggctggagtgcagtggtgcgatctctgctcactgcaacttccacccccaggttcaagcgattctcctgcctcagcctcccacgtagctgggattacgggtgcccgccaccgtgcctggttaatttttgtatttttcgtagagacggggtttcactatgtttgccaggctggtcttgaactcctgacctcaggtgatccacccgccttgacctgctaaagtgctaggattacaggcgtgagccaccatgcctggccttttttttttttttttttttttttttgagacagagtctcacactattgcctatgctggagttcagtggcacgatctcagctcacctcctgggctcaagtgatccttccacctcagcctccctagtagctagtactataggtatgcaccaccacaccgaggtaatttttgtagagataaggttttgttgtgttgtcaggctgctcttgaactcctgggctcaagcaatgcgcctgccttggtctcctaaagtgctgggattataggcgtgagccaccgcacccagccctttctttagaaattaattatgtatcatacacatctgtttcatatatctaagatgtgttgtaaactatccggatactcagtcttgaattctctggcccctaatagtaagccccttatgttgcttggtcctatgatgattctgtattcctcattatcttaggtagttgcagaagaaaagattttggccaggtgtggtggcctgtaatcccagcactttgggtggctgaggtgggaagattgcttgttcttgggagattgaggtttcagtgagctgtgatcatgccactgcattccagcctgggtgacagagcaagatcctatctcaaaaaatataaaaataaggaagaaggcattgtaagggataaaggatgctaactgttccctggtactatgttactcccgtttcacgttcctgtaaaggctaatcattgttatgttggtatgtagtatgttacagtgaaacccagccagagccaggtactcaagggcatgttcgtaccatcctgttcaggctgtcgcactccacagattgaacaggctgtgggcatcgtgggagctgtcatcatgccacacaacatgtacctgcattctgccttagtcaag

SEQ ID NO: 6094 - DNA, 100 bp, Homo sapiens
caccaccatgcctggctaatttttctatttttagtagagatgtggtttcaccatgttggccaggctggtctcgaactcctgagctcaagcaatccacccg

SEQ ID NO: 6095 - DNA, 9437 bp, Homo sapiens
aagtagaagacagcggcgttgccatggcggcgtctctgggtaggtagccggccccgcccttccatggatttcccgaccctcgcctcgaattcatttcctgctccacatccaccctctaaccccgacccctgctacaaccccagaggccggactcctggattcatctccctagcttccctgggcctgccttagccgccagtcgcagccgaggcgaagagagcgaaggagggaagtgggggcggctagctggggctagaaggccaggagagggcggggtgggcggccgtttggggtgggggtcagggtgactcactcgtctgcattcagggcaggtgttggctctggtgctggtggccgctctgtggggtggcacgcagccgctgctgaagcgggcctccgccggcctgcagcgggttcatgagccgacctgggcccagcagttgctacaggagatgaagaccctcttcttgaatactgaggtgcgtctctgtgaaaggcccctctctcggtggagttgccgccaagaatttggtctttggagtcaaacaggtctgggtcagccccaccacttactcactagaaattctcggaaaagtcagttgtccttgagcctcagtttcatcatctgtaaatggcgattataataataaccatctgataggtcagttgcaggaattaggtgagatacgtagagcacttagcattaggcctagaacatagtaagtgctcaatctatggctgccattattcacattttattgtgattccttcagttacataaggcaacatttgtgagcctttccagagggagggcttggggctcaaattggccctgcaggggaggagttcagaggaggaaggctggagctggaggacttggggaaggcttcctggaggggctgacattggcttcaaggccttgcaggatgggaactagcagaggtgagggagagggtagtttgagcaaaggcacagacttcagtctgtttccctctttgccctggaaggatcctccttagagggattagtgttctctgggtccttataaccctgcctccctccaaggaaagacattcgctaggagctcaaagaaggcagtgctgctcagtcaggccatcacactgactgcaggtttctcctctttccagtacctgatgccctttctcctcaaccagtgtggatcccttctctattacctcaccttggcatcgacaggtgggtcctggcttggaactgttctgcttagtgtttgaggccacctggaagagtgattggggggggcggggtggagcttgaaacacctcattcccatcagtgagagagggctgactagctctagttccctcttactatcctcttctctgaacaagaggggcacagtgtgctggttatgagtatgttgctaggcactggagttggtttgaagcctggcagtcatgtgtgaccagcggaggaagaaggaaggttcattttgctgtgccaagtgctggctttcacattcttgcttccactgtgtgctacctacctgaccatgagcaagtcacccatttgagccttggttttatatagttggcttcatagcattgtgaggattaaatttaatgaatgggaaacatctaggagagtgcctggcacacagtcagagctccatatacataaatttcctttctcttgacatttgtgactgccctctactacgtcagatactgcactagtcttacacattatttaattccaatcatgactctgtaaagcagatatgattatcttagaaaatgaagttgcaaaactttgtgcaatttcacctctcaagtcccacaggatgtcagtgcagaaggatttgaagccatatattaaaagtttatgctcgactgggcatggtgactcacgcctgtaatcccagcactttgggaggccaaggagggcagatcatttgaggtcaggagttcgagaccagtctggccaacatgctgaaaccccgtctctactaaaaataacaaaattagttgggtgtggtggtgtgtgcctgtagtcccagctacttgggaggctgaggcgcgagaatggcttgaacctgggaggcggaggttgcagtgagctgagatcatgccactgcactccagtccctgggcaacagagcgagactctgtctcaaaaacagaaagaaagaaataatatgcacttatttaaagagtttgaaaacctctggcctcatgcattcactgctgtggaagaatgctgaacccttgaccagctgactacaggtagccattcaccaagttttaatcaaattgcagttttaggttctttttatctcattaccctttctgcctgtatcctttaatatccatcctttctaataaccagaacagtaataactatttatgaagcatccacttcagccagggactatccatgcattatcacagttcatcttacgacaacccaacaaaagaaatggtatactgtgacccctattttacatgcggggaaacaggttgagtgtttgaatatcctaaccaagattgcaagggaaactcagatctgcctcactccaatgccctcactttccactgcaccgtgctgcatccttcttccatctactgttgcaaaccagaccttagcagccatgacactccttgtaaggtatgtaaacttaagaaggcagctctgggcagggcacagtggctcaggcctataattccagcacttttggaggctgaggtgggcagataacctgagcctagagatcaccctaggcaacaacaacaacaaaaatacgaaaattaactgggcttggtggtgtgtgcctgtagtcctagctgctcaggaggctgaggtgggaggatcgcttgagctcaggaggttgaggctgcagtgagccttgacctcaccactgcactccagcctgagcaacagagagagaccctgtctcaaaacaacaacaacaaaaacgaaaaacaaccaaaaaagaaagcagctctttgtaagtggggttgtatcaatttcttagatgggtaatgcctccatgctggggcctcccaggggatgaggagcaggacagtttgctcctttgcctcacacaggcgagccctgggagtgctgggaaagaatttgctgaggagccagtgtgaacatctggtctgcagttgagtcttgttaccatggataactcagctgattcgtccattggtcttttttatgtgtatgtggtgctttttttttttttttttgagacggcatttcgctcttgttgcccaagctggagtgcaatggtgcgatcttggctcactgcaacctccgcctcccaggttcaagtgactctccttccttagcctccccactagctgggattatgggcatgtgccaccacgcctggctaattttgttcttttgtttttgttttttgagatggagccttgctgtgtcacccaggctggagtgcagtggtgcaatctctggtcactgcaacctctgcctaccaggttcaagcaattctcctgcctcggcctcccaagtagctgggactacaggcatgcaccaccatgcctggctaatttttgtatttttagtagagacggggtttcacaatgttggccaggctggtcttgaactcctgacctcaaatgatccacccgcctcggcctcccaaagtgctgggattacaggcgtgagccaccacacccagcctaattttgtattttcagtagagacggggtttctccatgttggtcacgctggtctctaactcccaacctcaggtgatccgcccgtctcagccttccaaaatgttgggattacaggcatgagccactgcgcctggctgtggctctttttttgatgtgataagaacacttaacaggagatctaccctcaacaaattttaagttaactccattagtctttttcttttttttttgagacagagtttcactcttgtttctcaggctggagtacagtggtgtgatcttggctcagtgcaacctctgcctcctgggttcaagcgattctcctgtctcagcctcctgagtagctgggattacaggcgtccgccactatgcctggctaatttttggtatttttagtagagacggggtttcaccatgttggccaagctggtcttgaactcctgacctcaggtgatccgcccgcctcagcctcccaaagtgctgggattacaggcgtgagccaccctgcacccagccaactccattactctttttcaagtttgcttattggcagtcagccccttggaacttcaaaattaaggaacagatcctgggctatgatgccctctacccacaccacaggtccagcccaatgtcctgaacaggtcctgctccttccttctgacactttttatttttaactccataaggcctgagcttgggctgaaacagaaacaaaatgtgcttcatctgatgttctgctctgtctatatccacagtttaataacggcgcaggctttggagtcaggcaagccttggtttaaatcctcaacttgccttagtttatgtgacttctttgagcctttgtttcttttacgcaaaatggtgataatccccttcttgcagtgttgtgaaaactgagatatgtacacaaagcacctaggccatggtatgtgcttaataaatggtggctgtgcttggtgttacctgactctctactcatcctttgggatttgggtgcctgcctgtccgtccagatgtccttgagatctcacgagttctctttgagtgcaaagacctcattctcattatcaaaccaggctggtcccagacctcagagttcaggtcttcatgctggaatcctgggaagcactgaacgtggagtcaggagatgtgggtttgagtcctgagatttgctgtgacttcatctggaagatggggttttgataccttttttaaaggtatgaaatgatgatgatggaagtgttttgtgcctagaaaggcatttgttgcatctcaggcattcttttcattctgaccacccagatctgaccctggctgtgcccatctgtaactctctggctatcatcttcacactgattgttgggaaggcccttggagaagatattggtggaaaacgtaagttagactactgcgagtgcgggacgcagctctgtggatctcgacatacctgtgttagttccttcccagaacccatctccccagagtgggtgaggacacggccttttcccatcctgccctttcctctgcagctgttttgcttccttgtggccatcagagttcccttcccctggacagtctggagaaagacagaggctggggtttgggattgaagaccagaccccatctgagcccttcctccagccctgtaccagctcctactggcatggctgagctcagaccctcctgatttctgcctattatcccaggagcagttgctggcatggtgctcaccgtgataggaatttcactctgcatcacaagctcagtgagtaagacccaggggcaacagtctaccctttgagtgggccgaacccacttccagctctgctgcctccaggaagcccctgggccatgaagtgctggcagtgagcggatggacctagcacttcccctctctggccttagcttcctcctctcttatggggataacagctacctcatggatcacaataagagaacaagagtgaaagagttttgtaaccttcaagtgctgttcagctgcggggatttagcacaggagactctacgctcaccctcagcaacctttctgccccagcagctctcttcctgctaacatctcaggctcccagcccagccaccattactgtggcctgatctggactatcatggtggcaggttccatggactgcagaactccagctgcatggaaagggccagctgcagactttgagccagaaatgcaaacgggaggcctctgggactcagtcagagcgctttggctgaatgaggggtggaaccgagggaagaaggtgcgtcggagtggcagatgcaggaaatgagctgtctattagccttgcctgccccacccatgaggtaggcagaaatcctcactgccagcccctcttaaacaggtagagagctgtgagccccagccccacctgactccagcacacctggcgagtagtagctgtcaataaatctatggtaaacagacaagaggttagtaagtattcttttattgtgacaaaccctctcccaggcttagtcagctactcctttctctggccagagaatcccataaggaaatagcccccacagccagggctgctctgctcagaggaagggaaggctgggctgtgggtttaggagcaggagaacggggagggctgaggaggccgcagtgtaccctgtgagcccagcggaggtgctggctcctgaggaacaagctgctggaggctaaggacaaaaggtggccagagtagtggtccccagttgccctctggagctgctggctctcaagatggcagagctggggctgaggctgagatagcagccccagccccaggctggttttccagggacaaggcctcttccactatctgtgctgccctctgcaggaggtggaaggccatacagaatggagccgtgagtatggccagcctccagctctcagccaggaggtccccaaccccaaggaaggaagaaactggaaattaggaactgcttcctcatttaacaaggtaggaagttaggagatcatttactttcaatcacaagggaggagaactgttcctggggcccaaggctgccagtttccagctcagagctcctcccaccccaacatactgtttcctgatccaacagcttacctgatccaagggctcctctgtctgagtgtcttcatcatctgctacttccagggcccccgctgtctccttccttcggtggggagctccatatactcctataactcctaaagaggggaggcagcactgggtgatgcccaggctgaagagccctcagcattcctgccctggaccttcatgctagcccctttccctcccctgaacctggttctgcattccccaccacctcccaggatggcaaggaagtgagaggtgggcctttggtcccacccccatcccctctatatcccacccctgaagtcttatcgctttaagcactgccctttccaggtgcttcttttcatgtgatgaggccctgtgaagaagggacaggatatacagacgggggcagctggagacagttatgatgaggtcagtaccagctttttttttttttacgggcagtctcctgagccacagtaggttcagactcctttatcttttttttttttttccagtgccggctttgtgtctgagcattctgctcccatggacatccccaacaacagcagggaccaacctatgtcactgtcaaagggcagctgagaagggcctgagccccagggacccctcacctgatgggaatgagagtgtggggagcttgcttcttggctgaatggtctgctggggtctggcatagaaagcagatggcttaattcggtctggttcctttggagagggctgggttacctgggccctgtggccttgggcctagagaagggacactgggcttggaccctgattgctggccattcttacctttcctactccccagttcaggcttcagagagcccctgacgcctgcaggaacatggcagaggagacaccgtctgtcttcacaaagtacgtcctccctccttgctgcctcttcccaccagcctgacttatccagggacagagcagtagatgcctggcactcctcgatgcccagtgaaaccagactgtgcttccccacccccaccaccatgccccatgctcactggctcatttcttgggagggcttagagctggataatataagttcccttggaccctgctgtgccaaatataccaattctctctcccagcgtccaacctagcaagaaggtattaagtcctgcaaatcagatgagaattctggtctggcccctgccactcaataactctgtcaccctgaacaaatcacttcactttttttttttttttttttttttttgagacttgagtcttactctctcacccaggctggagtgcagtggtgtgatctcagctcaccacaacctccgcctcccaggttcaagtgattctcctgcctcagcctcccaagtagctgggactacaagcacccaccaccatgcccagctaatttttttgtacttttagtagagatggggttttaccatgttggccaggctggtcttgaactcctgacctcaggtaattcactctcctcagcctcccaaagtgctgggattacacgtgtgagccatcgtgcccaaggcccacttcacttttcagcttcagtttccacctctggaaaatggggataatctttctttcacaagattattaagagtggccaggcgaggtggctcacgactgtaatcccagcactttgggaggctgaggtgggcagatcacctgagggagtttgagaccagcctgaccaacatggagaaaccctgtctctactaaaaattaaaaaaattagccgggtgtggctgagcgcggtggctcacgcctgtaatcccagcactttgggaggctgaggtgggctgatcacgaggtcaggagatcgagaccatcctggctaacacggtgaaaccccgtctctactaaaaatacaaaaaaaattaaccgggcatggtggtgggtgcctgtagtcccagctgctcgggaggctgaggcaggagaatggcatgaacccgggaggcggagctggcagtgagccaagattgcgccactgcattccagcctgggcaacagagcgagactccatctcaaaaaaaaaaaaaaaaaaaaaaattagccgggtgtggtggcacatacctgtaatcccagctactcgggaggctgaggcaggagaatcacttgaacccagaaggtggaggttgcagtgagctgagattgtgctattgcactccagcctgagcaacaagagtgaaactccgtctcaaaaaaaaaaaaaaaaattattaagaggatgcaggctgggcatagtgtaatcacagcactttgggaggccaaggtgggaggattgcttgagcccaggagttcaagaccagccttcgcaatatcgtgagactcatctctatatttaaaagaaaaaaggaggccgggcacggtggctcacgcctgtaatcccagcactttgggaggctgaggcgggcagatcacaaggtcaggagttcaagaccagcctggccaacatggtgaaaccccatctctactaaaaatatacaaaattagctggatatggtggagcgtgcccataatcccagctactcaggaggctgaggcaggagaattgcttgaaccgggacctgggaggcggaggttgcagtgagccaagatcctgccactgcactccagcctggactacagagcaagactctgtctc

SEQ ID NO: 6096 - DNA, 4601 bp, Homo sapiens
ggagatgtgggtttgagtcctgagatttgctgtgacttcatctggaagatggggttttgataccttttttaaaggtatgaaatgatgatgatggaagtgttttgtgcctagaaaggcatttgttgcatctcaggcattcttttcattctgaccacccagatctgaccctggctgtgcccatctgtaactctctggctatcatcttcacactgattgttgggaaggcccttggagaagatattggtggaaaacgtaagttagactactgcgagtgcgggacgcagctctgtggatctcgacatacctgtgttagttccttcccagaacccatctccccagagtgggtgaggacacggccttttcccatcctgccctttcctctgcagctgttttgcttccttgtggccatcagagttcccttcccctggacagtctggagaaagacagaggctggggtttgggattgaagaccagaccccatctgagcccttcctccagccctgtaccagctcctactggcatggctgagctcagaccctcctgatttctgcctattatcccaggagcagttgctggcatggtgctcaccgtgataggaatttcactctgcatcacaagctcagtgagtaagacccaggggcaacagtctaccctttgagtgggccgaacccacttccagctctgctgcctccaggaagcccctgtgccatgaagtgctggcagtgagcggatggacctagcacttcccctctctggccttagcttcctcctctcttatggggataacagctacctcatggatcacaataagagaacaagagtgaaagagttttgtaaccttcaagtgctgttcagctgcggggatttagcacaggagacttacgctcacctcaagcaacctttctgcccagcagctctctttcctgctaacatctcaggctcccagcccagccaccattactgtggcctgatctggactatcatggtggcaggttccatggactgcagaactccagctgcatggaaagggccagctgcagactttgagccagaaatgcaaacgggaggcctctgggactcagtcagagcgctttggctgaatgaggggtggaaccgagggaagaaggtgcgtcggagtggcagatgcaggaaatgagctgtctattagccttgcctgccccacccatgaggtaggcagaaatcctcactgccagcccctcttaaacaggtagagagctgtgagccccagccccacctgactccagcacacctggcgagtagtagctgtcaataaatctatggtaaacagacaagaggttagtaagtattcttttattgtgacaaaccctctcccaggcttagtcagctactcctttctctggccagagaatcccataaggaaatagcccccacagccagggctgctctgctcagaggaagggaaggctgggctgtgggtttaggagcaggagaacggggagggctgaggaggccgcagtgtaccctgtgagcccagcggaggtgctggctcctgaggaacaagctgctggaggctaaggacaaaaggtggccagagtagtggtccccagttgccctctggagctgctggctctcaagatggcagagctggggctgaggctgagatagcagccccagccccaggctggttttccagggacaaggcctcttccactatctgtgctgccctctgcaggaggtggaaggccatacagaatggagccgtgagtatggccagcctccagctctcagccaggaggtccccaaccccaaggaaggaagaaactggaaattaggaactgcttcctcatttaacaaggtaggaagttaggagatcatttactttcaatcacaagggaggagaactgttcctggggcccaaggctgccagtttccagctcagagctcctcccaccccaacatactgtttcctgatccaacagcttacctgatccaagggctcctctgtctgagtgtcttcatcatctgctacttccagggcccccgctgtctccttccttcggtggggagctccatatactcctataactcctaaagaggggaggcagcactgggtgatgcccaggctgaagagccctcagcattcctgccctggaccttcatgctagcccctttccctcccctgaacctggttctgcattccccaccacctcccaggatggcaaggaagtgagaggtgggcctttggtcccacccccatcccctctatatcccacccctgaagtcttatcgctttaagcactgccctttccaggtgcttcttttcatgtgatgaggccctgtgaagaagggacaggatatacagacgggggcagctggagacagttatgatgaggtcagtaccagctttttttttttttacgggcagtctcctgagccacagtaggttcagactcctttatcttttttttttttttccagtgccggctttgtgtctgagcattctgctcccatggacatccccaacaacagcagggaccaacctatgtcactgtcaaagggcagctgagaagggcctgagccccagggacccctcacctgatgggaatgagagtgtggggagcttgcttcttggctgaatggtctgctggggtctggcatagaaagcagatggcttaattcggtctggttcctttggagagggctgggttacctgggccctgtggccttgggcctagagaagggacactgggcttggaccctgattgctggccattcttacctttcctactccccagttcaggcttcagagagcccctgacgcctgcaggaacatggcagaggagacaccgtctgtcttcacaaagtacgtcctccctccttgctgcctcttcccaccagcctgacttatccagggacagagcagtagatgcctggcactcctcgatgcccagtgaaaccagactgtgcttccccacccccaccaccatgccccatgctcactggctcatttcttgggagggcttagagctggataatataagttcccttggaccctgctgtgccaaatataccaattctctctcccagcgtccaacctagcaagaaggtattaagtcctgcaaatcagatgagaattctggtctggcccctgccactcaataactctgtcaccctgaacaaatcacttcactttttttttttttttttttttttttgagacttgagtcttactctctcacccaggctggagtgcagtggtgtgatctcagctcaccacaacctccgcctcccaggttcaagtgattctcctgcctcagcctcccaagtagctgggactacaagcacccaccaccatgcccagctaatttttttgtacttttagtagagatggggttttaccatgttggccaggctggccttgaactcctgacctcaggtaattcactctcctcagcctcccaaagtgctgggattacacgtgtgagccatcgtgcccaaggcccacttcacttttcagcttcagtttccacctctggaaaatggggataatctttctttcacaagattattaagagtggccaggcgaggtggctcacgactgtaatcccagcactttgggaggctgaggtgggcagatcacctgagggagtttgagaccagcctgaccaacatggagaaaccctgtctctactaaaaattaaaaaaattagccgggtgtggctgagcgcggtggctcacgcctgtaatcccagcactttgggaggctgaggtgggctgatcacgaggtcaggagatcgagaccatcctggctaacacggtgaaaccccgtctctactaaaaatacaaaaaaaattaaccgggcatggtggtgggtgcctgtagtcccagctgctcgggaggctgaggcaggagaatggcatgaacccgggaggcggagctggcagtgagccaagattgcgccactgcattccagcctgggcaacagagcgagactccatctcaaaaaaaaaaaaaaaaaaaaaaattagccgggtgtggtggcacatacctgtaatcccagctactcgggaggctgaggcaggagaatcacttgaacccagaaggtggaggttgcagtgagctgagattgtgctattgcactccagcctgagcaacaagagtgaaactccgtctcaaaaaaaaaaaaaaaaattattaagaggatgcaggctgggcatagtgtaatcacagcactttgggaggccaaggtgggaggattgcttgagcccaggagttcaagaccagccttcgcaatatcgtgagactcatctctatatttaaaagaaaaaaggaggccgggcacggtggctcacgcctgtaatcccagcactttgggaggctgaggcgggcagatcacaaggtcaggagttcaagaccagcctggccaacatggtgaaaccccatctctactaaaaatatacaaaattagctggatatggtggagcgtgcccataatcccagctactcaggaggctgaggcaggagaattgcttgaaccgggacctgggaggcggaggttgcagtgagccaagatcctgccactgcactccagcctggactacagagcaagactctgtctc

SEQ ID NO: 6097 - DNA, 9435 bp, Homo sapiens
aagtagaagacagcggcgttgccatggcggcgtctctgggtaggtagccggccccgcccttccatggatttcccgaccctcgcctcgaattcatttcctgctccacatccaccctctaaccccgacccctgctacaaccccagaggccggactcctggattcatctccctagcttccctgggcctgccttagccgccagtcgcagccgaggcgaagagagcgaaggagggaagtgggggcggctagctggggctagaaggccaggagagggcggggtgggcggccgtttggggtgggggtcagggtgactcactcgtctgcattcagggcaggtgttggctctggtgctggtggccgctctgtggggtggcacgcagccgctgctgaagcgggcctccgccggcctgcagcgggttcatgagccgacctgggcccagcagttgctacaggagatgaagaccctcttcttgaatactgaggtgcgtctctgtgaaaggcccctctctcggtggagttgccgccaagaatttggtctttggagtcaaacaggtctgggtcagccccaccacttactcactagaaattctcggaaaagtcagttgtccttgagcctcagtttcatcatctgtaaatggcgattataataataaccatctgataggtcagttgcaggaattaggtgagatacgtagagcacttagcattaggcctagaacatagtaagtgctcaatctatggctgccattattcacattttattgtgattccttcagttacataaggcaacatttgtgagcctttccagagggagggcttggggctcaaattggccctgcaggggaggagttcagaggaggaaggctggagctggaggacttggggaaggcttcctggaggggctgacattggcttcaaggccttgcaggatgggaactagcagaggtgagggagagggtagtttgagcaaaggcacagacttcagtctgtttccctctttgccctggaaggatcctccttagagggattagtgttctctgggtccttataaccctgcctccctccaaggaaagacattcgctaggagctcaaagaaggcagtgctgctcagtcaggccatcacactgactgcaggtttctcctctttccagtacctgatgccctttctcctcaaccagtgtggatcccttctctattacctcaccttggcatcgacaggtgggtcctggcttggaactgttctgcttagtgtttgaggccacctggaagagtgattggggggggcggggtggagcttgaaacacctcattcccatcagtgagagagggctgactagctctagttccctcttactatcctcttctctgaacaagaggggcacagtgtgctggttatgagtatgttgctaggcactggagttggtttgaagcctggcagtcatgtgtgaccagcggaggaagaaggaaggttcattttgctgtgccaagtgctggctttcacattcttgcttccactgtgtgctacctacctgaccatgagcaagtcacccatttgagccttggttttatatagttggcttcatagcattgtgaggattaaatttaatgaatgggaaacatctaggagagtgcctggcacacagtcagagctccatatacataaatttcctttctcttgacatttgtgactgccctctactacgtcagatactgcactagtcttacacattatttaattccaatcatgactctgtaaagcagatatgattatcttagaaaatgaagttgcaaaactttgtgcaatttcacctctcaagtcccacaggatgtcagtgcagaaggatttgaagccatatattaaaagtttatgctcgactgggcatggtgactcacgcctgtaatcccagcactttgggaggccaaggagggcagatcatttgaggtcaggagttcgagaccagtctggccaacatgctgaaaccccgtctctactaaaaataacaaaattagttgggtgtggtggtgtgtgcctgtagtcccagctacttgggaggctgaggcgcgagaatggcttgaacctgggaggcggaggttgcagtgagctgagatcatgccactgcactccagtccctgggcaacagagcgagactctgtctcaaaaacagaaagaaagaaataatatgcacttatttaaagagtttgaaaacctctggcctcatgcattcactgctgtggaagaatgctgaacccttgaccagctgactacaggtagccattcaccaagttttaatcaaattgcagttttaggttctttttatctcattaccctttctgcctgtatcctttaatatccatcctttctaataaccagaacagtaataactatttatgaagcatccacttcagccagggactatccatgcattatcacagttcatcttacgacaacccaacaaaagaaatggtatactgtgacccctattttacatgcggggaaacaggttgagtgtttgaatatcctaaccaagattgcaagggaaactcagatctgcctcactccaatgccctcactttccactgcaccgtgctgcatccttcttccatctactgttgcaaaccagaccttagcagccatgacactccttgtaaggtatgtaaacttaagaaggcagctctgggcagggcacagtggctcaggcctataattccagcacttttggaggctgaggtgggcagataacctgagcctagagatcaccctaggcaacaacaacaacaaaaatacgaaaattaactgggcttggtggtgtgtgcctgtagtcctagctgctcaggaggctgaggtgggaggatcgcttgagctcaggaggttgaggctgcagtgagccttgacctcaccactgcactccagcctgagcaacagagagagaccctgtctcaaaacaacaacaacaaaaacgaaaaacaaccaaaaaagaaagcagctctttgtaagtggggttgtatcaatttcttagatgggtaatgcctccatgctggggcctcccaggggatgaggagcaggacagtttgctcctttgcctcacacaggcgagccctgggagtgctgggaaagaatttgctgaggagccagtgtgaacatggtctgcagttgagtcttgttaccatggataactcagctgattcgtccattggtcttttttatgtgtatgtggtgctttttttttttttttttgagacggcatttcgctcttgttgcccaagctggagtgcaatggtgcgatcttggctcactgcaacctccgcctcccaggttcaagtgactctccttccttagcctccccactagctgggattatgggcatgtgccaccacgcctggctaattttgttcttttgtttttgttttttgagatggagccttgctgtgtcacccaggctggagtgcagtggtgcaatctctggtcactgcaacctctgcctaccaggttcaagcaattctcctgcctcggcctcccaagtagctgggactacaggcatgcaccaccatgcctggctaatttttgtatttttagtagagacggggtttcacaatgttggccaggctggtcttgaactcctgacctcaaatgatccacccgcctcggcctcccaaagtgctgggattacaggcgtgagccaccacacccagcctaattttgtattttcagtagagacggggtttctccatgttggtcacgctggtctctaactcccaacctcaggtgatccgcccgtctcagccttccaaaatgttgggattacaggcatgagccactgcgcctggctgtggctctttttttgatgtgataagaacacttaacaggagatctaccctcaacaaattttaagttaactccattagtctttttcttttttttttgagacagagtttcactcttgtttctcaggctggagtacagtggtgtgatcttggctcagtgcaacctctgcctcctgggttcaagcgattctcctgtctcagcctcctgagtagctgggattacaggcgtccgccactatgcctggctaatttttggtatttttagtagagacggggtttcaccatgttggccaagctggtcttgaactcctgacctcaggtgatccgcccgcctcagcctcccaaagtgctgggattacaggcgtgagccaccctgcacccagccaactccattactctttttcaagtttgcttattggcagtcagccccttggaacttcaaaattaaggaacagatcctgggctatgatgccctctacccacaccacaggtccagcccaatgtcctgaacaggtcctgctccttccttctgacactttttatttttaactccataaggcctgagcttgggctgaaacagaaacaaaatgtgcttcatctgatgttctgctctgtctatatccacagtttaataacggcgcaggctttggagtcaggcaagccttggtttaaatcctcaacttgccttagtttatgtgacttctttgagcctttgtttcttttacgcaaaatggtgataatccccttcttgcagtgttgtgaaaactgagatatgtacacaaagcacctaggccatggtatgtgcttaataaatggtggctgtgcttggtgttacctgactctctactcatcctttgggatttgggtgcctgcctgtccgtccagatgtccttgagatctcacgagttctctttgagtgcaaagacctcattctcattatcaaaccaggctggtcccagacctcagagttcaggtcttcatgctggaatcctgggaagcactgaacgtggagtcaggagatgtgggtttgagtcctgagatttgctgtgacttcatctggaagatggggttttgataccttttttaaaggtatgaaatgatgatgatggaagtgttttgtgcctagaaaggcatttgttgcatctcaggcattcttttcattctgaccacccagatctgaccctggctgtgcccatctgtaactctctggctatcatcttcacactgattgttgggaaggcccttggagaagatattggtggaaaacgtaagttagactactgcgagtgcgggacgcagctctgtggatctcgacatacctgtgttagttccttcccagaacccatctccccagagtgggtgaggacacggccttttcccatcctgccctttcctctgcagctgttttgcttccttgtggccatcagagttcccttcccctggacagtctggagaaagacagaggctggggtttgggattgaagaccagaccccatctgagcccttcctccagccctgtaccagctcctactggcatggctgagctcagaccctcctgatttctgcctattatcccaggagcagttgctggcatggtgctcaccgtgataggaatttcactctgcatcacaagctcagtgagtaagacccaggggcaacagtctaccctttgagtgggccgaacccacttccagctctgctgcctccaggaagcccctgggccatgaagtgctggcagtgagtggatggacctagcacttcccctctctggccttagcttcctcctctcttatggggataacagctacctcatggatcacaataagagaacaagagtgaaagagttttgtaaccttcaagtgctgttcagctgcggggatttagcacaggagactctacgctcaccctcagcaacctttctgccccagcagctctcttcctgctaacatctcaggctcccagcccagccaccattactgtggcctgatctggactatcatggtggcaggttccatggactgcagaactccagctgcatggaaagggccagctgcagactttgagccagaaatgcaaacgggaggcctctgggactcagtcagagcgctttggctgaatgaggggtggaaccgagggaagaaggtgcgtcggagtggcagatgcaggaaatgagctgtctattagccttgcctgccccacccatgaggtaggcagaaatcctcactgccagcccctcttaaacaggtagagagctgtgagccccagccccacctgactccagcacacctggcgagtagtagctgtcaataaatctatggtaaacagacaagaggttagtaagtattcttttattgtgacaaaccctctcccaggcttagtcagctactcctttctctggccagagaatcccataaggaaatagcccccacagccagggctgctctgctcagaggaagggaaggctgggctgtgggtttaggagcaggagaacggggagggctgaggaggccgcagtgtaccctgtgagcccagcggaggtgctggctcctgaggaacaagctgctggaggctaaggacaaaaggtggccagagtagtggtccccagttgccctctggagctgctggctctcaagatggcagagctggggctgaggctgagatagcagccccagccccaggctggttttccagggacaaggcctcttccactatctgtgctgccctctgcaggaggtggaaggccatacagaatggagccgtgagtatggccagcctccagctctcagccaggaggtccccaaccccaaggaaggaagaaactggaaattaggaactgcttcctcatttaacaaggtaggaagttaggagatcatttactttcaatcacaagggaggagaactgttcctggggcccaaggctgccagtttccagctcagagctcctcccaccccaacatactgtttcctgatccaacagcttacctgatccaagggctcctctgtctgagtgtcttcatcatctgctacttccagggcccccgctgtctccttccttcggtggggagctccatatactcctataactcctaaagaggggaggcagcactgggtgatgcccaggctgaagagccctcagcattcctgccctggaccttcatgctagcccctttccctcccctgaacctggttctgcattccccaccacctcccaggatggcaaggaagtgagaggtgggcctttggtcccacccccatcccctctatatcccacccctgaagtcttatcgctttaagcactgccctttccaggtgcttcttttcatgtgatgaggccctgtgaagaagggacaggatatacagacgggggcagctggagacagttatgatgaggtcagtaccagctttttttttttttacgggcagtctcctgagccacagtaggttcagactcctttatcttttttttttttttccagtgccggctttgtgtctgagcattctgctcccatggacatccccaacaacagcagggaccaacctatgtcactgtcaaagggcagctgagaagggcctgagccccagggacccctcacctgatgggaatgagagtgtggggagcttgcttcttggctgaatggtctgctggggtctggcatagaaagcagatggcttaattcggtctggttcctttggagagggctgggttacctgggccctgtggccttgggcctagagaagggacactgggcttggaccctgattgctggccattcttacctttcctactccccagttcaggcttcagagagcccctgacgcctgcaggaacatggcagaggagacaccgtctgtcttcacaaagtacgtcctccctccttgctgcctcttcccaccagcctgacttatccagggacagagcagtagatgcctggcactcctcgatgcccagtgaaaccagactgtgcttccccacccccaccaccatgccccatgctcactggctcatttcttgggagggcttagagctggataatataagttcccttggaccctgctgtgccaaatataccaattctctctcccagcgtccaacctagcaagaaggtattaagtcctgcaaatcagatgagaattctggtctggcccctgccactcaataactctgtcaccctgaacaaatcacttcactttttttttttttttttttttttttgagacttgagtcttactctctcacccaggctggagtgcagtggtgtgatctcagctcaccacaacctccgcctcccaggttcaagtgattctcctgcctcagcctcccaagtagctgggactacaagcacccaccaccatgcccagctaatttttttgtacttttagtagagatggggttttaccatgttggccaggctggtcttgaactcctgacctcaggtaattcactctcctcagcctcccaaagtgctgggattacacgtgtgagccatcgtgcccaaggcccacttcacttttcagcttcagtttccacctctggaaaatggggataatctttctttcacaagattattaagagtggccaggcgaggtggctcacgactgtaatcccagcactttgggaggctgaggtgggcagatcacctgagggagtttgagaccagcctgaccaacatggagaaaccctgtctctactaaaaattaaaaaaattagccgggtgtggctgagcgcggtggctcacgcctgtaatcccagcactttgggaggctgaggtgggctgatcacgaggtcaggagatcgagaccatcctggctaacacggtgaaaccccgtctctactaaaaatacaaaaaaaattaaccgggcatggtggtgggtgcctgtagtcccagctgctcgggaggctgaggcaggagaatggcatgaacccgggaggcggagctggcagtgagccaagattgcgccactgcattccagcctgggcaacagagcgagactccatctcaaaaaaaaaaaaaaaaaaaaaaattagccgggtgtggtggcacatacctgtaatcccagctactcgggaggctgaggcaggagaatcacttgaacccagaaggtggaggttgcagtgagctgagattgtgctattgcactccagcctgagcaacaagagtgaaactccgtctcaaaaaaaaaaaaaaaaattattaagaggatgcaggctgggcatagtgtaatcacagcactttgggaggccaaggtgggaggattgcttgagcccaggagttcaagaccagccttcgcaatatcgtgagactcatctctatatttaaaagaaaaaaggaggccgggcacggtggctcacgcctgtaatcccagcactttgggaggctgaggcgggcagatcacaaggtcaggagttcaagaccagcctggccaacatggtgaaaccccatctctactaaaaatatacaaaattagctggatatggtggagcgtgcccataatcccagctactcaggaggctgaggcaggagaattgcttgaaccgggacctgggaggcggaggttgcagtgagccaagatcctgccactgcactccagcctggactacagagcaagactctgtctc

SEQ ID NO: 6098 - DNA, 3929 bp, Homo sapiens
accaatctggctcggatcccgcaggtcaaaaaagctcacaaagcactggtagcccatctgcttgtccgtggagaacatgatgatgttgcccccaaagtcaaaaccgcaggtccggacagccgaattggtcttgagaagggccagctgctttcctggagtcaggcaaagtctgggctacaccatccattgcaattgcagggaggacattctagagaatgctaccatcacatctcactgtttgtcttgctccagtgacccaaacttaaaaagtattttaacttttctttttttttttcttttttgagacagtttcactctgttgcccaggctggagtgcagtggtgcaatctcggctctcactgcaagctccgcctcccgggttcacgccattctcctgcctcagcctcccaagtagctgggactacaggcgcctgccaccatgccccgctaattttttgtatttttagtagagacgggatttcaccgtgttagccaggatggtcttgatctcctgacccgtgatccgcccgcctcagcctcccaaagtgctgggattacaggtgtgagccaccgcgcccggcctttttttttttgagatggagtttcgctcttgtcctgcaggctgctgtgcgatggtgtgatctcggctcactgcaacctttcaagcgattcttctgcctcagcctcctgagtcgatgggattacaggtgcccaccaccatgcctggctcatttttgtatttttaatagacggggtttcaccatgttggccaggctggtcttgcactcctgacctcaggtgatccacctgcctcaacctcccaaagtgctgggattacaggcgtgagccaccacacctggccaagtattttaacttcttacctagactctttcctcagacatcctgctaatgtggcactactcatacgtagactgcaatatatctgtctctccctcagactgtgcttctccacagcaaagacctgatctgatttccctccatgtccccagtacccagcatagacctggcactaaacagaacagcttaggctgggcacagtggcttgtgcctgtaatctcagcactttgggaggccaaggcgggtggatcacttgagctgaggagttcgagaccagcctggccaacatggtgaaaccctgtctctactaaaaatacaaaaattagctggtggccaggtgcagtggctcatgcctgtaatcccagcactttggaaggccgaggtgggtggattacctgaggtctggagtttgagaccagtctggccaacatggtgaaaccctgtctctactaaaaatacaaaaattagccaggtgtgatggcgcatgtctgtaatcccagctatttgggaggctgaggcaggagaatcacttgaacctgggaggcggaggttgcagtaagccaagattgtgccactgcactccagcctgggtgacacagcgagagaatctgtctcaaaaaaaaaaatcagccaagcatggtggcgtgcgcctataatcccagctactggggctggctgagacaggagaatcccttgaacccgggagacagaggttgcagtgagccgagatagtgccattgctctccagcctgggtgacagtgagactctgtctccaaaataagaaaaagaaaaaaaaaaaaaaaaagaaaacttaatctatgcttcctctaccatggcgtgtattttctcatctatctttcttgtctcttattccctagactggaaactatctatggatttcatctctattttcctaggacctgtttactcaaacaggtacactgtaggtcctcaatatttgctaaaaaggtgaatgaacccagcttacctgtttcacagtcccagagacgacagctgttgtcagctgagccagtgaggacatgcttggtgtcccctgaagagttgttaagaaatatgacgaagttcacccgagcccttgtcctcttgggatgccaagtgaatcatctccctgttcagccccaaagagcctttctacccctcttacctccttatccagaactggaatttgtcctgaatgtttcctcagtcagtgaagagaccagggagtaggaggtatcgttctctaggccctcaacagcacccccaactcccaactcccaactcagcctctccatcgctgacagaccctagcaacacggactcagacccaaaataaggatacagtcagcgtccacacaccacacagctccggtatggcccatgtaggtgcccagcctctcaccattcacagagtaccatacattgacgatctggaaaagtcaaaccacaggatagtacacatcccagtaagagcaatggcttcctattttgccccaggaaccctcagcagcctgtagcaaggctgattctgccctcttctgtttatttcttgggaaacagcagggagctggtaaaaagaccaactcctggattctcctcccttcctgaagggaagcaacagaggagtcaggcggcttgtaaaggcatcctcatttgttagctccagctctcctgggactcccaacggctccaaagaataaaaggccaagttgagctccagtccagaaaaacagtatctctgatgtcttatccaagtgggagcagctggtagtaaggaagtctgggttctggtgcctgctctgccactgtctcactatatgatctcaaatacagtgcttctctcctctgaacttcagttttctcatcttgaaaatggccaggccgggtgtggtgactcatgcctgtaatcctagcactttgggaggccgaggcaggcggatcacctgaggtcaggagttcaagacaagcctgtccaacatggtgaaaccccatctctactaaagatacaaaaaattagctgggcatggtggcacgagcctgtagtcccagctactagggaggttgaggcaggagaatcgcttgaacctgggaggcagaggttgcagtgagtcgagatcgcgccactgcactccagcctaggcgacagagcgagactccgtctcaagaaaaaataaaataaaatggccaggtgcctcaaaaggcagtatcatgagggattgtttggcattgagtagcaggatgggattgacttaaaatgagactagagacaccctcattaagttccctgtgtctgaataacacagcctgcacctatcctggtagaaagattagattatccctaaaggtcgcatcccgttctctgggcaagctgaccctcatctttatcccctttccacagtggtctcttgcttttcttggagtgcagtggcacgatctcagctcaccgcgctcaagcgatcctctcgtttcagactccgaagtagctgagaccacaggcgcgaggccaccatgtcaggctaatttttttgtgtgtagagatgggtcttactacgttgctcaggctggtctccaactcctgggctcaagcgaccctcccacctcggcctctcaaagtgctgggattacaggcgtgagccaccgcactcggccaatagagttcttccccacctttcccggtagaatactttcgccaacctacccccggcatggcctctccctacttctcacaatgggctgctctttggttccccgctaacggcaaaactggcgtgtccacccatcgtcctggcagaaggatcccgcccctcccggaccccctccagccaacactcacagggtccttggccacagtaaagaggaggtctccttcgcggttatacttaatctgcgtaatggaccgctcatggccctgcagtaggatcggcttctgtggggacaagacagtaacgtcagtgctcggaattgggccccagcctcagcccaggacccccactgcaatacccctaactctgaaactcaccatcccggctgtgacgcgaggaaggccgcaacgtgagtaagaccggaaaag

SEQ ID NO: 6099 - DNA, 421 bp, Homo sapiens
attactctttttcaagtttgcttattggcagtcagccccttggaacttcaaaattaaggaacagatcctgggctatgatgccctctacccacaccacaggtccagcccaatgtcctgaacaggtcctgctccttccttctgacactttttatttttaactccataaggcctgagcttgggctgaaacagaaacaaaatgtgcttcatctgatgttctgctctgtctatatccacagtttaatacggcgcaggctttggagtcaggcaagccttggtttaaatcctcaacttgccttagtttatgtgacttctttgagcctttgtttcttttacgcaaaatggtgataatccccttcttgcagtgttgtgaaaactgagatatgtacacaaagcacctaggccatggtatgtgcttaataaa

SEQ ID NO: 6100 - DNA, 6817 bp, Homo sapiens
acctggcctcaaacttgccaatcctggtggaggttgtggttacatccatggcttcctgaccaccgcccaggaccacctgaatggaagaagaaactctagatgggaccaatggacaccaagtccattttgtgtttttctgctgccatatacatttttaacatctcacacggctcaatgggaggataccaaaggtaggggatgatcagacacttctgccacctcctgctggctgccctggggctattcaatccttccagctttgtcactcctctgggcatctcctctctgcctgacatcatttcccccacaatgttgtagcccaacttctggacaagcatctagaacttggaagcttcctgaggcttcagcaggaaggcaggtggggttctcttacatggtcatagttgggggagagggcagctgagttgacaggacgttctgtccggaaagtcttctgatgttcaagagttgtggagtcaaaaagctggagagagaaggcaggggggaaatctgtaaagagctttcctgggggaagtcgggcagggtgagctgtgcagccggagggagggagcagccctgccagaccgctgcccaggctcaccttggctgtgttgtccttggacgcggtcacaaacatggtcatgtccctggataactggatgtcgttgatctgccgggagtgctccttaacattcaccaacacctctccagactagggaaggaagaagagtgacactgaatgggcccaatccctactaatctcagctccccagaaacccaagcacccaaatgaaagctgagacagcatggactttgtgttttcctcaccccctctatcctatcagtcacccctaaatatcccttgactctgtccagtaatgtacatcctatgcctattggctagttcaggttcactctccaaacataaactgcaaaagctgttggaaggaaaatctggccattgataaccctttaaagattccctactgcctggaggaaagtcaaaactctttacctcctcacactgaaggacgtttaaaatctattccccgtcctctgtccccaagaccacaccccaagggtttctgaagactccatactttcttaactctgtgcctttgcctttgctgttccttttgcctgtgggatgttctttccttcctgcttgaagctccatttattctccagggtttaatgtacacgccacctccctgggagagtgcaccttccacacttggctgagacctctatggtggcacaattcacaatctgactcaggtgctagctgtttgcaagtctgtctccccatgggggaagggactgcatctgatttacttctttgttctaggagttcagcattatactcagcattatacagggcattatactcagtggtggcaaggaaatgctcatttgtgatccttaattatttttttgagacagggtcttgttctatcacccaggctggagtacagtggcacaatcatggctcactgcagcctcaatctcccagactcaagcaatctttcagcctcaacatcctgagtacctgggaccaaaggcacactccaccacacccagctaatttttaatttttttttgtagagacagggtcttcctatattgcccaggctgatctcaatctccgggtctcaagcaatcctgccacagcctcccaaagtgttgggattacaagtgtgagtcaccacacccggcctgtgatccttattaacatgtcctgagtactttgtgacaagtttttcaaacatgtgatatcatttgatccttgaaacattttacagataaacagggtcagagaagtcatgtaaattgcccaagatcacacagctagaaagtggtgaaatctacatttgaatctcacctctgctctttttaaaattttttattaacttttttttttttttttttttttttagagacagggtctcactgtcacccaggctggagtgcagtggtgcaatcatagctcactgcagccccaacccctgggctcaagagatcctcctgccttggcccccaaaggcactgggattacagatgtgagccacagcatacagccctgcccttgttctgaactagtgtgctatcaccaggacccgaggcaggtggatcatctgaggtcaggaggtcaggattcaagaccagcctggccaacatggagaaaccccatctctactaaaaatacaaaaattacccaggcatggtggcaggtgcctatagtcccagctactcaagaggctgaggcaggagaatggcttgaacccaggaggtggaggttgcagtgagccgagatcgtaccactgcactccagcctgggtgacagggtgatactctgtctcaaaaaaaaaaaaaaaaaaaaaaaaaggccacgagcggtggactgcctgaggtcaggagttcgtgaccagactgaccaacatggtgaaaccctgtctctactaaaaatacaaaaaaaattagccaggtgcggtggcatgcacctgtaatcccagctactcgggaggctaaggcaggggaattgcttgaaccagggaggtggaggtcgcagtgagccgagatggcgccactgcactccagcctgggcaacagagagagactctatcttaaaaaaaaaaaaaaaaattattctggtaggctcaggccccatgtggcctcttaccttggcactatactggttgagctctccactctcatggccagcgatgatgcactcccccaggggtccccaaacagcactggtgattttagagtcattgcaagggatcttcatgtagggctcattgttgtctgtgtggggcagtagatgttaggccctgggctctagaactgtaccctttacctcaaccccagccctattcccagccctcaccaatctggctcggatcccgcaggtcaaaaaagctcacaaagcactggtagcccatctgcttgtccgtggagaacatgatgatgttgcccccaaagtcaaaaccgcaggtccggacagccgaattggtcttgagaagggccagctgctttcctggagtcaggcaaagtctgggctacaccatccattgcaattgcagggaggacattctagagaatgctaccatcacatctcactgtttgtcttgctccagtgacccaaacttaaaaagtattttaacttttctttttttttttcttttttgagacagtttcactctgttgcccaggctggagtgcagtggtgcaatctcggctctcactgcaagctccgcctcccgggttcacgccattctcctgcctcagcctcccaagtagctgggactacaggcgcctgccaccatgccccgctaattttttgtatttttagtagagacgggatttcaccgtgttagccaggatggtcttgatctcctgacccgtgatccgcccgcctcagcctcccaaagtgctgggattacaggtgtgagccaccgcgcccggcctttttttttttgagatggagtttcgctcttgtcctgcaggctgctgtgcgatggtgtgatctcggctcactgcaacctttcaagcgattcttctgcctcagcctcctgagtcgatgggattacaggtgcccaccaccatgcctggctcatttttgtatttttaatagacggggtttcaccatgttggccaggctggtcttgcactcctgacctcaggtgatccacctgcctcaacctcccaaagtgctgggattacaggcgtgagccaccacacctggccaagtattttaacttcttacctagactctttcctcagacatcctgctaatgtggcactactcatacgtagactgcaatatatctgtctctccctcagactgtgcttctccacagcaaagacctgatctgatttccctccatgtccccagtacccagcatagacctggcactaaacagaacagcttaggctgggcacagtggcttgtgcctgtaatctcagcactttgggaggccaaggcgggtggatcacttgagctgaggagttcgagaccagcctggccaacatggtgaaaccctgtctctactaaaaatacaaaaattagctggtggccaggtgcagtggctcatgcctgtaatcccagcactttggaaggccgaggtgggtggattacctgaggtctggagtttgagaccagcctggccaacatggtgaaaccctgtctctactaaaaatacaaaaattagccaggtgtgatggcgcatgtctgtaatcccagctatttgggaggctgaggcaggagaatcacttgaacctgggaggcggaggttgcagtaagccaagattgtgccactgcactccagcctgggtgacacagcgagagaatctgtctcaaaaaaaaaaatcagccaagcatggtggcgtgcgcctataatcccagctactggggctggctgagacaggagaatcccttgaacccgggagacagaggttgcagtgagccgagatagtgccattgctctccagcctgggtgacagtgagactctgtctcaaaaataagaaaaagaaaaaaaaaaaaaaaaagaaaacttaatctatgcttcctctaccatggcgtgtattttctcatctatctttcttgtctcttattccctagactggaaactatctatggatttcatctctattttcctaggacctgtttactcaaacaggtacactgtaggtcctcaatatttgctaaaaaggtgaatgaacccagcttacctgtttcacagtcccagagacgacagctgttgtcagctgagccagtgaggacatgcttggtgtcccctgaagagttgttaagaaatatgacgaagttcacccgagcccttgtcctcttgggatgccaagtgaatcatctccctgttcagccccaaagagcctttctacccctcttacctccttatccagaactggaatttgtcctgaatgtttcctcagccagtgaagagaccagggagtaggaggtatcgttctctaggccctcaacagcacccccaactcccaactcccaactcagcctctccatcgctgacagaccctagcaacacggactcagacccaaaataaggatacagtcagcgtccacacaccacacagctccggtatggcccatgtaggtgcccagcctctcaccattcacagagtgccatacattgacgatctggaaaagtcaaaccacaggatagtacacatcccagtaagagcaatggcttcctattttgccccaggaaccctcagcagcctgtagcaaggctgattctgccctcttctgtttatttcttgggaaacagcagggagctggtaaaaagaccaactcctggattctcctcccttcctgaagggaagcaacagaggagtcaggcggcttgtaaaggcatcctcatttgttagctccagctctcctgggactcccaacggctccaaagaataaaaggccaagttgagctccagtccagaaaaacagtatctctgatgtcttatccaagtgggagcagctggtagtaaggaagtctgggttctggtgcctgctctgccactgtctcactatatgatctcaaatacagtgcttctctcctctgaacttcagttttctcatcttgaaaatggccaggccgggtgtggtgactcatgcctgtaatcctagcactttgggaggccgaggcaggcggatcacctgaggtcaggagttcaagacaagcctgtccaacatggtgaaaccccatctctactaaagatacaaaaaattagctgggcatggtggcacgagcctgtagtcccagctactagggaggttgaggcaggagaatcgcttgaacctgggaggcagaggttgcagtgagtcgagatcgcgccactgcactccagcctaggcgacagagcgagactccgtctcaagaaaaaataaaataaaatggccaggtgcctcaaaaggcagtatcatgagggattgtttggcattgagtagcaggatgggattgacttaaaatgagactagagacaccctcattaagttccctgtgtctgaataacacagcctgcacctatcctggtagaaagattagattatccctaaaggtcgcatcccgttctctgggcaagctgaccctcatctttatcccctttccacagtggtctcttgcttttcttggagtgcagtggcacgatctcagctcaccgcgctcaagcgatcctctcgtttcagactccgaagtagctgagaccacaggcgcgaggccaccatgtcaggctaatttttttgtgtgtagagatgggtcttactacgttgctcaggctggtctccaactcctgggctcaagcgaccctcccacctcggcctctcaaagtgctgggattacaggcgtgagccaccgcactcggccaatagagttcttccccacctttcccggtagaatactttcgccaacctacccccggcatggcctctccctacttctcacaatgggctgctctttggttccccgctaacggcaaaactggcgtgtccacccatcgtcctggcagaaggatcccgcccctcccggaccccctccagccaacactcacagggtccttggccacagtaaagaggaggtctccttcgcggttatacttaatctgcgtaatggaccgctcatggccctgcagtaggatcggcttctgtggggacaagacagtaacgtcagtgctcggaattgggccccagcctcagcccaggacccccactgcaatacccctaactctgaaactcaccatcccggctgtgacgcgaggaaggccgcaacgtgagtaagaccggaaaag

SEQ ID NO: 6101 - DNA, 1597 bp, Homo sapiens
tgcctggatgttttttcctctagagaaacctgatgtaaagcaaaagtccagcaggaagaaagtggtcgttccacagatcatcatcacgcgagcgtcgaatgagacgctagtcagttgcagttccagcgggagtgaccagcagagaaccattcgggagccggaggactggggcccctaccggcggcacaggaaccccagtacagcagacgcctataattcacatctcaaagaataaacaagcacctttgcatggcactcgctactccctgcgataggcgtctcgggaacagccgcctcaccctgtgagaagccgaggccccttctccagtgctctcggggaggttgcaccaggcccaacccccaccctgtgagaaactgcagcccccttctccagtgctttcggggagggtgcaccaggcccgccccaccttgtgagaagccgtggcccccttctcccgtgctctcagggagggtgcaaccaggcctgcccccgccttgagaaactgcagcccccttctccagtgctctgggggagggtgcaccaggcctgccaaccctgtgagaaactgcacccccttctccagtgctctcggggagggtgcaccaggcccgccccaccctgtgagaagccgcagcccgttctccattgccatttggtcctgccttccccagagctgctagcagctcggtcgaggcaagagtgactggctcagagagcgagctttgtggtattgataaatgaataaattagtatgttcatgttggaagtggctggctctgcagagtgatggacagcaggtggcatcttacattgtgatttgtggtgcacagttaaaacacttcccttcgtttcagaaggagacaatgtgaatacttggaaattatagtgaataagatgcctcccaaacttgaggaaaaggtcagattctaagagctaaacgttaagatgtaatgttccagaacaaagaggcccagagtcactgaacggggccccagggctcctagcttgagtgtaatctgagtcagcttatgaaaaggccccaaagaagaaagtggaatgtgtgctgggcacatgggacagccatggcactgagactttggaagtggccttgccagcgctgtcctgtctttctggcccacagatgagggctcctgattgtggaaggccacggaagggacctgaacacgatggcacgagacaagttatctcctgtgactgctcctctccagcaaccctcagctcaggctagactttccccctgtgttgagaatgccctgccctgtgtggaagcctgatgcatttagtgacagtgtgttagctttgttagtttctagtctggccagcaggctttccatgtgatctgccattggcttgcttcagtggccagtggagccaggggtgtccaccagagtcttggacacagacttctgaggtggcagcgggagggagcctgctccctgccacacacgtacaatttctaatccatacaggcctatgtagtatatacacacatacgcagagccttaggaattgtgaaaggccaatcaaaacttggggccctaatttcactctgccaaaagaaaaaaaaaaaaagct

SEQ ID NO: 6102 - DNA, 2028 bp, Homo sapiens
tgcctggatgttttttcctctagagaaacctgatgtaaagcaaaagtccagcaggaagaaagtggtcgttccacagatcatcatcacgcgagcgtcgaatgagacgctagtcagttgcagttccagcgggagtgaccagcagagaaccattcgggagccggaggactggggcccctaccggcggcacaggaaccccagtacagcagacgcctataattcacatctcaaagaataaacaagcacctttgcatggcactcgctactccctgcgataggcgtctcgggaacagccgcctcaccctgtgagaagccgaggccccttctccagtgctctcggggaggttgcaccaggcccaccccaccctgtgagaaactgcagcccccttctccagtgctttcggggagggtgcaccaggcccgccccaccttgtgagaagccgtggcccccttctccagtgctctcagggagggtgcaccatgcctgcccccgccgtgagaaactgcagtccccttctccagtgctctcggggagggtgcaccaggcccaccccaccctgtgagaacctgcagcccccttctccaatgctctcggggagggtacaccagggttgccccaccctgtgagaagccgccgcccccttctccagtgctctcggggagggtgcaccagggctgccccaccctgtaagaagccgccgcccccttctccagtgctctccagcccgccccaccctgtgagaagccatggccccttctccagtgcttttggggagggtgcaccagggccaccccaccctgtgagaagccgtggcccccttctccagtgctttcggggagggtacaccaggcccgccccaccctgtgagaagccgtggcccccttctcccgtgctctcagggagggtgcaccaggcctgcccccgccttgagaaactgcagcccccttctccagtgctctgggggagggtgcaccaggcctgcccaccctgtgagaaactgcacccccttctccagtgctctcggggagggtgcaccaggcccgccccaccctgtgagaagccgcagcccgttctccattgccatttggtcctgccttccccagagctgctagcagctcggtcgaggcaagagtgactggctcagagagcgagctttgtggtattgataaatgaataaattagtatgttcatgttggaagtggctggctctgcagagtgatggacagcaggtggcatcttacattgtgatttgtggtgcacagttaaaacacttcccttcgtttcagaaggagacaatgtgaatacttggaaattatagtgaataagatgcctcccaaacttgaggaaaaggtcagattctaagagctaaacgttaagatgtaatgttccagaacaaagaggcccagagtcactgaacggggccccagggctcctagcttgagtgtaatctgagtcagcttatgaaaaggccccaaagaagaaagtggaatgtgtgctgggcacatgggacagccatggcactgagactttggaagtggccttgccagcgctgtcctgtctttctggcccacagatgagggctcctgattgtggaaggccacggaagggacctgaacacgatggcacgagacaagttatctcctgtgactgctcctctccagcaaccctcagctcaggctagactttccccctgtgttgagaatgccctgccctgtgtggaagcctgatgcatttagtgacagtgtgttagctttgttagtttctagtctggccagcaggctttccatgtgatctgccattggcttgcttcagtggccagtggagccaggggtgtccaccagagtcttggacacagacttctgaggtggcagcgggagggagcctgctccctgccacacacgttccaatttctaatccatacaggcctatgtagtatatacacacatacgcagaacctttaggaattgtgaaaggccaatcaaaacttggggccctaatttcactctgccaaaagaaaaaaaaaaaaagct

SEQ ID NO: 6103 - DNA, 767 bp, Homo sapiens
ttaaaacacttcccttcgtttcagagggagacaatgtgaatacttggaaattatagtgaataagatgcctcccaaacttgaggaaaaggtcagattctaagagctaaacgttaagatgtaatgttccagaacaaagaggcccagagtcactgaacggggccccagggctcctagcttgagtgtaatctgagtcagcttatgaaaaggccccaaagaagaaagtggaatgtgtgctgggcacatgggacagccatggcactgagactttggaagtggcccttgccagcgctgtcctgtctttctggcccacagatgagggctcctgattgtggaaggccacggaagggacctgaacacgatggcacgagacaagttatctcctgtgactgctcctctccagcaaccctcagctcaggctagactttccccctgtgttgagaatgccctgccctgtgtggaagcctgatgcatttagtgacagtgtgttagctttgttagtttctagtctggccagcaggctttccatgtgatctgccattggcttgcttcagtggccagtggagccaggggtgtccaccagagtcttggacacagacttctgaggtggcagcgggagggagcctgctccctgccacacacgtacaatttctaatccatacaggcctatgtagtatatacacacatacgcagagccttaggaattgtgaaaggccaatcaaaacttggggccctaatttcactctgccaaaagaaaaaaaaaaaaagct

SEQ ID NO: 6104 - DNA, 1381 bp, Homo sapiens
ttttttttttattattatactttaagttttagggtacatgtgcacaacgtgcaggtttgttacatatgcatacatacgccatgttggtgtgctgcacccattaactcgtcatttacattaggtatttctcctaatgctttccctccccccctccccctaccccacgacaggccccagtgtgtgattttccccttcctgtgtccaagtgttctcattgttcagttcccacctatgagtgagaacatgcggtgtttggtttattttacttgcgatagtttgctgagaatgatggtttccagcttcacccatgtccctgcaaaggacatgaactcatccttttttatggctgcatagtattccatggtgtatatgtgccacatttgcttaatccagtctatcactgatgggcatttgggttggttctaagtctttgctattgtgaatagtgccgcattaaacataggtgtgcatgtgtctttatagcagcatgatttataatcctttgggtatatacccagtaatgggatggctgagtcaaatggtatttctagttctagatccctgaggaatcgccacactgtcttccacagtggttgaactagtttacagtcccaccaacagtgtaaaagtgttcctatttctccccatcctctccagcacctgtttcctgactttttaatgatcgccattctaactggtgtgagatggtatctcattgtggttttgatttgcatttctctgatggccagtgatgatgagcattttttcatgtgtctgtaggctgcataaatgtcttcctttgagaagtgtctgttcatatccttcacccactccatcaaaaagtgggtgaagtgccaatttactgagcacgagacaaatacatcattgacttcttttgtcttgtggattcaaggatgtgtccacgcccgccctccttcccctccagctcctccccttgaaatactgaagccctcaacatcatctttggaggaaggtacagagttggctctcacgcgcacatccttaaccttggcttaataaacctttaaggtggctgagacctgtctcagatacttgttggcttacaaattgaccaccatgcagggactcagagtggaggtggccctgccctttggcaggtttcctcctggtgcttaggaccagtttgggccttctttattgctcaggacagtaggacaatttgctgagatccgggagccctaccaccctccagagaatctctgatctcccgaaacttggttgaggtcgaaagtttattttgcgcacaatgccttttccttttccggtgttttacttgcttccaacaaagaaggcgagttttcctgcttccgtgatgatggggagcaggagacttccctgg

SEQ ID NO: 6105 - DNA, 579 bp, Homo sapiens
  SITE (213): n equals a,t,g, or c
ttttttttttattattatactttaagttttagggtacatgtgcacaacgtgcaggtttgttacatatgcatacatacgccatgttggtgtgctgcacccattaactcgtcatttacattaggtatttctcctaatgctttccctccccccctccccctaccccacgacaggccccagtgtgtgattttccccttcctgtgtccaagtgttctncattgttcagttcccacctatgagtgagaacatgcggtgtttggtttattttacttgcgatagtttgctgagaatgatggtttccagcttcacccatgtccctgcaaaggacatgaactcatccttttttatggctgcatagtattccatggtgtatatgtgccacatttgcttaatccagtctatcactgatgggcatttgggttggttctaagtctttgctattgtgaatagtgccgcattaaacataggtgtgcatgtgtctttatagcagcatgatttataatcctttgggtatatacccagtaatgggatggctgagtcaaatggtatttctagttctagatccctgaggaatcgccacac

SEQ ID NO: 6106 - DNA, 6609 bp, Homo sapiens
cgtgaccaggatccaattgtagttgtgaactgcttgaggtctctagaggaaattctgaaacaggaaggaggcgttgtcatcaataagcccattgctcaccatctcttaaatcggtttggatgcctcagcactctttttattatgagatctgctaccttgtgggatcttgttgatgtattaaagtattgaacaacttatgtggggtagaaaagaaagttaaccattattattattattatttgagacggagttttgctcttgttgtctaagctggagtgcaatggcgctatctcggcttaccgcaacctccgcctcctgggttcaagcaattctcctgcctcagcctcccgagtagctgggattataggcatgcgccaccatgcccggctaattttgtatttttagtagagacagggtttcaccatgttggtcaggctggtcccaaacttctgacctcaggtgatccgcccgcctcagcctcccaaagtgctgggattacagacgtgagccactgcgcccggccagttaaccactattaactccctcacattccactgagagaatttcttttatttgccttactttcccttattgatatagggaaatagaaatatactgtgggaataggttctacccttctctagtcatgtcccccaaactaagccatttatagtgtcttaaaatgtaaggaacctggacccagtgtatgctgatcatgtctttggtcttagaggagtgtgcatttgtattaacaactcatcttggaattttaagccttttttgtgtaaactttaaatagtacatgaaaagtgacttaattatggcacagcctatttttaagaattctccctttgctatgatgaacaaccacctggtcatatggcagtggcatggaaatggtcctaattttgttgctaaaatagctcttttgttttgttttttggatagaatgtcaaaactggaccaatggggccaggctgaagtattgaactttctgctacgctaccaaccccgcagtgaggaagaactatttgacattctcaatctgttggatagtttcctcaagagcagtagcccaggtgtggtgatgggagctaccaaactttttctgatcttggcaaaaatgtttccccacgtacaaactgatgtccttgtgcgggtcaagggacctttgctagctgcctgttcttcagagagccgtgagctctgttttgttgctctttgtcatgtacgccagatcttgcatagtttaccaggtcactttagcagccactacaaaaagtttttttgctcctactcggagccccactacatcaaactacagaaagtggaggtgctgtgtgaactggtgaacgatgagaatgtgcagcaggtgctagaggagcttcgagggtactgcacggatgtgtctgcggactttgcacaggctgccatctttgccataggtaggtgtctgctccttttccttcttgagaacctagaccagccagcaagaaaactgtggttagaggaaccatagagagcaaagggcatgaatcttgcttcagaagcaaagtactatgcactaaataattgggtcagtgactacaaacacgggggaagagagtttttttttgttttttgtttttttttggtcaagattggtgttgctgtatcttccaggatggagaatacaggtaacacaaactacaatacttaaaattgttgttgtcttctatccaaaatgctttcctatacatcatcttaccacagtatcgtgagacagtcaggaaaagtagacaaatgtcattaacttcattttaaagatgaagaaactcaggcacaaaaacagttatcaaattgccaaaagggcacatagttttagaaatgggactgaaatccagctttcctgactcaaagtcctatgttaatccaccagtcatttattgagcttctgctatgggctatgtattgtgctgaatgtagaccaacacagaataattcctaaatcttacagactttttcatagtaccctgtctggaatttgaaaggctggagtgactcaaaaactgaaaacagctgttgagccaagttttgaaggatttcaagtacaggaggaggagcaaccctcatatttggaataaagcatggttattttaggggcagagaagagggagcaaagaggagacaagaaatccttaggagactgctgtcaagtgtcccccacaaaaatactccattgcaggtgtgctgcaacaaaaagggtacctcatatctggctgccatgtaaatacctttgttactataagttttcaaccttgtttaatggggaattgttttgctatgagctttcagttttctagtagtcagtgagaaaaaatgatttttaccaaagttccctttatagtaaacttatattcttagttcatcaagtaaggagtgaatttttttcttttttttttttttagataattctgtttcttttgtctttcactggtgggagatgattttagattgaggtgctaatatttcacttagcagttttctctgctttcccttcttttgtaggtggcattgccaggacttacacagatcaatgtgttcagattttaacagagttgctgggtcttcgacaagagcacattaccacaggtaatgcctgcctttttaggatttttgttttttttgtcaggtgcctggcctatagtagttgctcaaaacatgtttgttgttgaatgagtaatatagagatttgaacttttccttgcatcatcatctgttgctgttagagaagcataaagtctatagatctaataggatattgagtcttcaggctgccatgatctataaggctgtactatagataatgaaggctactaggatgaccttgcttgatatttcaccatctttacttctctttttgttttatggcagtatgccataggcagtggcttccagggttgggacaagggtaagtcaagcaagatgcctaggatgcaaaatttaagaaggcactcactcttaggttcctgcaagagccaatcctgcatgtcttcttcaattttgaaccctaggcacctcacttgtgttatcattttcccaggcctggtggttctatttatactgtctttagtgtttcattcaacagcaatactaccccacatttgcatacagctttatgttttacaaagtgctttttcatacattagttcatttatcctcatgtcaatctgataagagcaatatgcattcaagaaattattgcttatttcattacatttcttagataaccattgaccacacctccaaaacccattttacagaaatccagccagaatcatgagtctgaatacatgactgttcttaagattcctgcctacctggaggctctaatcctgtgctcttgtaccctggcctgtattgtagtggtggtgcagactttccgagacctggtttggttgtgtcctcagtgtactgaagctgtatgtcaggccctgcccggctgtgaagagaacattcaagatagtgaggtagactgtaattctcctttacttctaggtagggggagaatgcttgaaaccctgccctttgaaatggaatctaattattctctctaccctgtgtttgaagtgggcactcttcgaattgattgccaccttagattctcttttggatatagatggcatataaattataaaaacaagatttatccgacgggttttattacaaaactctgataccattgttctcttgaacagttctgttttgttttgttttgctttgcttgagatagagttgcccaggctggagtgcagtggcgtgatctcggcccactgcaacctctacctcccaaactcaagtgattctcttgcctcagcctcctgagtagagtagctgtgattacaggtgtgcaccaccacgcccagctaatttttgtatttttagtagagagggttttgctatgttgtctaggctggtctagaattcctagcctcaagtgatcacccacctcagcatcccagagagctaggattacaggcataagccactgtgccccgcttctcttgaacagttttgagtcagagatttagaccatggagtttttagctagaatgaaaattataatcatttgtgaaatttttacaaagatttggacgtaatcacaggtctactgacttaaatattcaggggtgttggacctagacagataactttttttttttttttttttttttgaaacagagtctagctctgttgcccaggctggagtgcagtaatgccatcttagctcactgcaacttccgcctcctggtttcaagcaattctcctgcctcaggctcccgagtagctggaactacaggtgtgcaccaccacgcctggctaatttttgtatttttaatagagacgggtttcaccatattggccaggctggtctcgaactcctgacctcaggtgatccaccctcctcggcctcccagagtgctgggattacagacgtaagccaccgtgcccggctgacagatacatttttaagaagcttcacagatgactctgatgtgcactctaggttagtaaccatttttgtgaaaaatttagagaaattctttgagcagcttccactgaaacactaaaacccaatagggccaaaggccccaaacctgaggaaaccttatttattgcttaatccaacataggctatgaaagttttgagtttcctcttgtgtattagaatttcattcctatttgttgtagagagtatagtacggggaatcagtaaattaaatgaagtaaactaaagattacaccttttctgctggcactaagcgaaaagcaaaaccagtggctgtctattatctcctgtgttttagacagtcaagtgttgagcacttgctcttattcctttattctctaggggaagcaagcacttatttggctacttggtgtccatggggaaagaattcctaatgctccttatgtgttagaggactttgttgagaatgtgaagtcggaaacatttccagctgttaagatggagctgctcactgcttcgctgcgccttttcctctcccgacctgctgagtgccaggacatgctaggacgtttgttgtattactgcataggtgggtttttcagaaggaaatagtatttgccatgacccatagtaaaaattcttaatagctttcattgtttggtgagtcacgtctgggacccgagaagaaaatgtgaatgcttcctaggttttcctctctccttcatttttttctcctattatggttggcacaagagtaggaggaaagtggttttgtttttaatgaagtcaatctgttgtcttacctcagaggaagaaaaagatatggctgtacgggaccgaggtctcttctattatcgcctcctcttagttggcattgatgaagttaagcggattctgtgtagccctaaatctgaccctactcttggacttttggaggatccggcagaaagacctgtgaatagctgggcctcagacttcaacacactggtgccagtgtatggcaaagcccactgggcaactatctctaaatgccagggggcagagcgttgtgacccagagcttcctaaaacttcatcctttgccgcatcaggtaaaaacagtccttaccttaaatcttgtcatgataaatctttaccttttcaatgattggtggaaagtagagtatcttagcactaaacctcagactgttgcctgaatttgaagcatttgtgagcaagaaagaggttcgtcactggttatttcagccatttgtccaaaaataaaagtcacattgtgtacatttgggaatttggataaaaaacttagctcctacagattaagaacatctttcacacaagttttctgtctcttttaggacccttgattcctgaagagaacaaggagagggtacaagaactccctgattctggagccctcatgctagtccccaatcgccagcttactgctgattattttgagaaaacttggcttagccttaaagttgctcatcagcaagtgttgccttggcggggagaattccatcctgacaccctccagatggctcttcaagtagtgaacatccagaccatcgcaatgagtagggctgggtctcggccatggaaagcatacctcagtgctcaggatgatactggctgtctgttcttaacagaactgctattggagcctggaaactcagaaatgcagatctctgtgaaacaaaatgaagcaagaacggagacgctgaatagttttatttctgtattagaaactgtgattggaacaattgaagaaataaaatcataacagagtcttgttgcttgtctagagtaagatgaataactattacactttcttagtctttcctattagagctgccagtaagtccagataatatcagatacaaaggagagtggaaaatctagaaatcaggattcttaagtttttggccaaagaacattgattcattcctttcattcctattggcaattgaccccatttttcagtgatgatgttgtagaggttaatgttggtaaggagatgcgttgaggatgggatttggattatttcctaatcaattttaggaattgtgttagtaattaaagatggctgatgtgtggaaa

SEQ ID NO: 6107 - DNA, 10049 bp, Homo sapiens
caggctcccacatcaggacgagaaggagccctcgagttaccgtgggagctgtgggagctgccctgtgactcttaggaagatgccgtaccttggctccgaggacgtggtgaaggagctgaagaaggctctgtgcaatcctcacattcaagctgataggctgcgctaccggaatgtcatccagcgagtgattaggtatcacctacctcccttcgcgtgctaactgctccctttgcaatccccatcagggctcactagccccagtctctctgaaagggtgaattagctttcacacgtggcagttatatggttcggtcttcgtcctgctgctttggagtaccatgtcagtctcccctctgcagcatcttttactcagctgggtagtttcctccatatcacgggcttgagcaattactggtgactcttggatctataatatagctagtacagacttccttttttagcttcagacccacgtatcccactgcctgcttggcatttccacgtgcgtggtttatcaaaagtatgtccgaaatagcccggacattcttccgtcttcctcaaacctgttcagcttacatttgtgttgatgaatgccaccagcagccgactatgcgtgggagccaaccttgaggacacctgatctctcacttcttatgtcagatggtttgaattcataattctaaatatccatcctctcttgtttattagcattgttgttctggtccaggccttcatcaataaagcaattgcagcagcttactagtaggccactttgcctcatttgagacagaatttttccattatacatacctgaacacataactcttgcctacagctatggttcacaaactttactatgcataaaaatcccttggggtgctttttgtcatccagtccagggactgattctgatttcagtagggtgggagggaacccaggaatctgtatttttaataaacatttcagttggttccagtaggagaccagtctgagaaacaataaagtccaaacttatcacagcacccaaggaacaagctgttaattcaactacctacagactcttaaaaaaatgtgtgctgctcctgctcatgtctacttacctcatagcatgtatctttaccttgctattacatctgcctagtgagctcctgctcattcagctaaagtattacttcctctgtgaagaaacattttctgacttcctgccagtgtcagacctctgaatcccctctacaccttgtacaatacttctgtttaagtacttatctatcatactgtaattaacggtattctcatctggctcattaatagatttgaagttcctagaggtttgagaccacaccttcttcaagattatgtcccaagagcatgtccctggatgtaaaagttgaatttcaccaaagtactagggattcaataagtgtttgttgaggctgggtgcggtggctcacgctggtaatcccagcactttgggaggccaaggcgggtggatcacctgcagtcaggagttcgagaccagcctggccaacatggagaaaccccgtctctactaaaaatacaaaaattagctgggcgtggtggcacgcacctgtagtcccagctactcgggaggctgaggcaggagaatcgcttgaacctgggaagcggagcttataatgagccgagattgtgccactgcactctagcctgggtaacagagcaagactctgtctcaaaaataataataagtgtttgttgaatgaatagaagaataatgtttattgtaggcctatggtatgaagtactgtgtgatataatagacaaggtaatcctggctgctaccctctaagagatcacaatctagttgggtaatcaggagatatgtaagtaaaactccctccattgtaagttggggattttgcattttacttccttctgtcatgtgcgttgttcaggtacatgactcaaggcttggacatgtctggtgtttttatggaaatggtgaaggccagtgccactgtagatattgtccagaagaagttggtttatctgtacatgtgcacatatgctcccctgaaaccagatctggctctcctggccatcaatacgctgtgcaaagactgctcagaccccaatccaatggtgcgagggctggcgttacggagcatgtgtagcctcaggtgagtaccctcttctctgtctggtcctaaatggctgatgaattcaagtgatcacagggtaggtttttaaagaggataatttatttgagctccttaatactggggaaaacattattgtaccctgaactcagattttcagccactgctttggcttaataacctgtatcatataattttattagagggagtttttgattctcactctaagtaaaatagtcctcagttttggttaaatatctctaaacaattatgtgtatatctttttttgctgcctgtgcatcattattccaaatgaaaagtcaaattaggctgggcacagtggctcatgcctgtagacccagcactttgggaggcttagacaggaagattgcttgagcccaggaatttgagaccagctgggcaagatggtgagagcctatatctacaaaaaattaaatgggcatggtgacacgcacctgtagtctcagctactaggaaggctgaggcaggaggatggcttgggcccgggaattcaaggcagcagtgagctatgatcgggccactgggtgacaaagtgagaccccatcttgaaaaaaacaagaaaaaaacagaaaagtcaaattatggctttttaagcttgatagaggctttctgcaattcttcatgatctgatgggtgcagcatctactaaaccatctgttaggtgaacaggggctgaggtatgtcaaaattagtatttcagaatctggctaactccaggatgtgttgcttaggatgcctggtgtgcaggagtatatacaacagcctattctcaatggtctgcgggataaggcttcatatgtcaggagagtggcagtccttggatgtgccaagatgcataatcttcatggagactctgaagtaggtaagttcagtgtaatccatcatggtcaatgtgcctccattatgtataactttaaaaaagattgtgtggctttggtagaaaataataatgtggccccagttctgtacatatctctttaagtaggatgcagggcttggtatcttctggagatgagaagtcctttctctggggccccaatgagatcctttgtattagctgcttagaacagtctggacatggcagttttttttttgccttgcactttagtgtggcctttgtcatttttgtagcagagaagttcaactttgtctacctggagctattactctggctacatccttgttactctgaagctttccttctttatctaagaactttgttcttttttatagatggtgccctggtaaatgaattatacagtttgctgcgtgaccaggatccaattgtagttgtgaactgcttgaggtctctagaggaaattctgaaacaggaaggaggcgttgtcatcaataagcccattgctcaccatctcttaaatcggtttggatgcctcagcactctttttattatgagatctgctaccttgtgggatcttgttgatgtattaaagtattgaacaacttatgtggggtagaaaagaaagttaaccattattattattattatttgagacggagttttgctcttgttgtctaagctggagtgcaatggcgctatctcggcttaccgcaacctccgcctcctgggttcaagcaattctcctgcctcagcctcccgagtagctgggattataggcatgcgccaccatgcccggctaattttgtatttttagtagagacagggtttcaccatgttggtcaggctggtcccaaacttctgacctcaggtgatccgcccgcctcagcctcccaaagtgctgggattacagacgtgagccactgcgcccggccagttaaccactattaactccctcacattccactgagagaatttcttttatttgccttactttcccttattgatatagggaaatagaaatatactgtgggaataggttctacccttctctagtcatgtcccccaaactaagccatttatagtgtcttaaaatgtaaggaacctggacccagtgtatgctgatcatgtctttggtcttagaggagtgtgcatttgtattaacaactcatcttggaattttaagccttttttgtgtaaactttaaatagtacatgaaaagtgacttaattatggcacagcctatttttaagaattctccctttgctatgatgaacaaccacctggtcatatggcagtggcatggaaatggtcctaattttgttgctaaaatagctcttttgttttgttttttggatagaatgtcaaaactggaccaatggggccaggctgaagtattgaactttctgctacgctaccaaccccgcagtgaggaagaactatttgacattctcaatctgttggatagtttcctcaagagcagtagcccaggtgtggtgatgggagctaccaaactttttctgatcttggcaaaaatgtttccccacgtacaaactgatgtccttgtgcgggtcaagggacctttgctagctgcctgttcttcagagagccgtgagctctgttttgttgctctttgtcatgtacgccagatcttgcatagtttaccaggtcactttagcagccactacaaaaagtttttttgctcctactcggagccccactacatcaaactacagaaagtggaggtgctgtgtgaactggtgaacgatgagaatgtgcagcaggtgctagaggagcttcgagggtactgcacggatgtgtctgcggactttgcacaggctgccatctttgccataggtaggtgtctgctccttttccttcttgagaacctagaccagccagcaagaaaactgtggttagaggaaccatagagagcaaagggcatgaatcttgcttcagaagcaaagtactatgcactaaataattgggtcagtgactacaaacacgggggaagagagtttttttttgttttttgtttttttttggtcaagattggtgttgctgtatcttccaggatggagaatacaggtaacacaaactacaatacttaaaattgttgttgtcttctatccaaaatgctttcctatacatcatcttaccacagtatcgtgagacagtcaggaaaagtagacaaatgtcattaacttcattttaaagatgaagaaactcaggcacaaaaacagttatcaaattgccaaaagggcacatagttttagaaatgggactgaaatccagctttcctgactcaaagtcctatgttaatccaccagtcatttattgagcttctgctatgggctatgtattgtgctgaatgtagaccaacacagaataattcctaaatcttacagactttttcatagtaccctgtctggaatttgaaaggctggagtgactcaaaaactgaaaacagctgttgagccaagttttgaaggatttcaagtacaggaggaggagcaaccctcatatttggaataaagcatggttattttaggggcagagaagagggagcaaagaggagacaagaaatccttaggagactgctgtcaagtgtcccccacaaaaatactccattgcaggtgtgctgcaacaaaaagggtacctcatatctggctgccatgtaaatacctttgttactataagttttcaaccttgtttaatggggaattgttttgctatgagctttcagttttctagtagtcagtgagaaaaaatgatttttaccaaagttccctttatagtaaacttatattcttagttcatcaagtaaggagtgaatttttttcttttttttttttttagataattctgtttcttttgtctttcactggtgggagatgattttagattgaggtgctaatatttcacttagcagttttctctgctttcccttcttttgtaggtggcattgccaggacttacacagatcaatgtgttcagattttaacagagttgctgggtcttcgacaagagcacattaccacaggtaatgcctgcctttttaggatttttgttttttttgtcaggtgcctggcctatagtagttgctcaaaacatgtttgttgttgaatgagtaatatagagatttgaacttttccttgcatcatcatctgttgctgttagagaagcataaagtctatagatctaataggatattgagtcttcaggctgccatgatctataaggctgtactatagataatgaaggctactaggatgaccttgcttgatatttcaccatctttacttctctttttgttttatggcagtatgccataggcagtggcttccagggttgggacaagggtaagtcaagcaagatgcctaggatgcaaaatttaagaaggcactcactcttaggttcctgcaagagccaatcctgcatgtcttcttcaattttgaaccctaggcacctcacttgtgttatcattttcccaggcctggtggttctatttatactgtctttagtgtttcattcaacagcaatactaccccacatttgcatacagctttatgttttacaaagtgctttttcatacattagttcatttatcctcatgtcaatctgataagagcaatatgcattcaagaaattattgcttatttcattacatttcttagataaccattgaccacacctccaaaacccattttacagaaatccagccagaatcatgagtctgaatacatgactgttcttaagattcctgcctacctggaggctctaatcctgtgctcttgtaccctggcctgtattgtagtggtggtgcagactttccgagacctggtttggttgtgtcctcagtgtactgaagctgtatgtcaggccctgcccggctgtgaagagaacattcaagatagtgaggtagactgtaattctcctttacttctaggtagggggagaatgcttgaaaccctgccctttgaaatggaatctaattattctctctaccctgtgtttgaagtgggcactcttcgaattgattgccaccttagattctcttttggatatagatggcatataaattataaaaacaagatttatccgacgggttttattacaaaactgtgataccattgttctcttgaacagttctgttttgttttgttttgctttgcttgagatagagttgcccaggctggagtgcagtggcgtgatctcggcccactgcaacctctacctcccaaactcaagtgattctcttgcctcagcctcctgagtagagtagctgtgattacaggtgtgcaccaccacgcccagctaatttttgtatttttagtagagagggttttgctatgttgtctaggctggtctagaattcctagcctcaagtgatcacccacctcagcatcccagagagctaggattacaggcataagccactgtgccccgcttctcttgaacagttttgagtcagagatttagaccatggagtttttagctagaatgaaaattataatcatttgtgaaatttttacaaagatttggacgtaatcacaggtctactgacttaaatattcaggggtgttggacctagacagataactttttttttttttttgaaacagagtctagctctgttgcccaggctggagtgcagtaatgccatcttagctcactgcaacttccgcctcctggtttcaagcaattctcctgcctcaggctcccgagtagctggaactacaggtgtgcaccaccacgcctggctaatttttgtatttttaatagagacgggtttcaccatattggccaggctggtctcgaactcctgacctcaggtgatccaccctcctcggcctcccaaagtgctgggattacagacgtaagccaccgtgcccggctgacagatacatttttaagaagcttcacagatgactctgatgtgcactctaggttagtaaccatttttgtgaaaaatttagagaaattctttgagcagcttccactgaaacactaaaacccaatagggccaaaggccccaaacctgaggaaaccttatttattgcttaatccaacataggctatgaaagttttgagtttcctcttgtgtattagaatttcattcctatttgttgtagagagtatagtacggggaatcagtaaattaaatgaagtaaactaaagattacaccttttctgctggcactaagcgaaaagcaaaaccagtggctgtctattatctcctgtgttttagacagtcaagtgttgagcacttgctcttattcctttattctctaggggaagcaagcacttatttggctacttggtgtccatggggaaagaattcctaatgctccttatgtgttagaggactttgttgagaatgtgaagtcggaaacatttccagctgttaagatggagctgctcactgctttgctgcgccttttcctctcccgacctgctgagtgccaggacatgctaggacgtttgttgtattactgcataggtgggtttttcagaaggaaatagtatttgccatgacccatagtaaaaattcttaatagctttcattgtttggtgagtcacgtctgggacccgagaagaaaatgtgaatgcttcctaggttttcctctctccttcatttttttctcctattatggttggcacaagagtaggaggaaagtggttttgtttttaatgaagtcaatctgttgtcttacctcagaggaagaaaaagatatggctgtacgggaccgaggtctcttctattatcgcctcctcttagttggcattgatgaagttaagcggattctgtgtagccctaaatctgaccctactcttggacttttggaggatccggcagaaagacctgtgaatagctgggcctcagacttcaacacactggtgccagtgtatggcaaagcccactgggcaactatctctaaatgccagggggcagagcgttgtgacccagagcttcctaaaacttcatcctttgccgcatcaggtaaaaacagtccttaccttaaatcttgtcatgataaatctttaccttttcaatgattggtggaaagtagagtatcttagcactaaacctcagactgttgcctgaatttgaagcatttgtgagcaagaaagaggttcgtcactggttatttcagccatttgtccaaaaataaaagtcacattgtgtacatttgggaatttggataaaaaacttagctcctacagattaagaacatctttcacacaagttttctgtctcttttaggacccttgattcctgaagagaacaaggagagggtacaagaactccctgattctggagccctcatgctagtccccaatcgccagcttactgctgattattttgagaaaacttggcttagccttaaagttgctcatcagcaagtgttgccttggcggggagaattccatcctgacaccctccagatggctcttcaagtagtgaacatccagaccatcgcaatgagtagggctgggtctcggccatggaaagcatacctcagtgctcaggatgatactggctgtctgttcttaacagaactgctattggagcctggaaactcagaaatgcagatctctgtgaaacaaaatgaagcaagaacggagacgctgaatagttttatttctgtattagaaactgtgattggaacaattgaagaaataaaatcataacagagtcttgttgcttgtctagagtaagatgaataactattacactttcttagtctttcctattagagctgccagtaagtccagataatatcagatacaaaggagagtggaaaatctagaaatcaggattcttaagtttttggccaaagaacattgattcattcctttcattcctattggcaattgaccccatttttcagtgatgatgttgtagaggttaatgttggtaaggagatgcgttgaggatgggatttggattatttcctaatcaattttaggaattgtgttagtaattaaagatggctgatgtgtggaaa

SEQ ID NO: 6108 - DNA, 2780 bp, Homo sapiens
cagcttcttgtcggaaggaaagaccagggctggattgcaattggtgttgtctaggtataaagtatggatctgtttccccagtgtcagggctggctcctttagcatggatggtgtgtatcgaaaatcacctggaggaatatgtacatgggggcagaaggtcagagacaaaagaatagaagacaagcctctcctacctccaacaatagacaggcgtttgcttactagtctgtgaaaaaactattatgtagcctggcactgaactaggcagtatagctgcatggtttctttgttgtaatgtctccatcctactcctatttttcaattactcttcacaaggttcggacccttaaagagtgggaaatcggccaggcgcagtggctcacacctgtaatcccagcactttggggggccgagccaggtggatcacctgaggtcaggagttcgagaccagcctggccaacatggtgaaaccccgtctctactaatagtaaatacgaaaattagctgggcgtggtggcaggcgcctgtcatcccagctacttgggaggctgaggcaagagaatcacttgaacccagaaggcggaggttgcagtgagccacaatcacgccactgcactccagcctgggtgacaagagtgaaactccgtctcaaaaagaagaaggaaaaaaaaacagtgggaaatcagttgagatggggtcactatgctcatatgtgatgaagttagaaggcctccagcgcctccagacttctattgagttaaggctgctcaagaaaagtctgccaggtgtggtggcttgtgccaataatcctagctactgtggaggctgaagcgggaggattgcttgaggtcaggagtttgagaccagcctcggcaacactgcgaggccccagtctatacattaaaaaaaaaaaaaaaaaaaaaaaaaaaaaacatctagtctggagaagtcactgggattccttgagaggcccacctgtgtagaggatggttccaaaatatccttcaaagagaaacatgacagaaccaggacagtgattggcatcgaggagggttacggtcatggtctcttgtccaatttcatctaggggtaatacatggctctcaccaacctccagggcttggatccattgcttagatacctgagaaaacagttagtcatcccagtgaccactgactcctctccgttacctccccgggtcagggactatcccttacatgaatcaggaaagctgaccaaatcctgagccaccgggagcagaagctgtaatggggattcccaagcaatctgcccttcctccttccacttcccatcccaccctttgtacaatttaagagttcagctggccgggcgtggtggctcacgcctgtaatcccagcactttgggaggctgaggcgggtggatcacgaggtcaggagatcgagaccatcctggctaacacggtgaaaccccgtctctactaaaaaatacaaaaaaaattagccaggcgtggtggcgggcgcctgtagtcccagctactcgggaggctgaggcaggagaatggcgtgaacccgggaggcggagcttgcagtgagccgagtttgcgccactgcactccagcctgggcgacagagcgagactccatctcaaaaaaaaaaaaagagttcagcaaacagtctagtcagcaattcccaaacttactcctgatcttaatctcttggagacttaagggtggggtggggagagagctggagaaccacccagcacattaggtggattcttaagatgaggcaagtttaggcggggcgtggtggctcacgcttgtaatcccagcacttggggaggctgaggcgggcggatcacttaaggtcaggagttagagaacagcctggccaacatggtgaaaccccgtctccacaaaaaatacaaaaaattagctgggcgtggtggcgtgcgcctgtaatctcagctactcaggaggccgagacaggagaatcgcttgaacccgggaggcggaggctgcagtgagccgagattgcgccactgcactccagcctgggcaacagagcgagactccgtctcaaaaaaaaaaaaaaaaaaaaaaaaaaaaggcaagtttgggaaacatcggcctagcttacttataaaggtaggaatagtttccttggctggattaaaatatctcctcaacttatggctaactatctcaagttggtcacttcgaaaacacgttcctattctgggttaaagatgcatttttgggttcaaacaacttccaaatcagttttcgtggcccccattctatgactccaagaatgacaggttgaagtcccaacccagatgcctggaccagctctcggagaccgactccagccccatacctgtaggtgacgatgcaagaggtgggctgtaattggggagcagtagaggggccgggcccaggtgctagacaggcccacggtgtggtccgagtgcatgtgagacaagaagaagagacgtgcggtgccagcccggcgcaggctccagaagtccactgcgatgggcgtatgggggatcaggaccccattcatggtggtagggttggagtcaccagtgggatcttctccacgggggcagggctcctgcgtgaggcttccacaacggcgtcccgataaaagtcatgctggggcaagaacagggccagagaccctaagggaaagagcccagcagagcaataagttaccagagtgggcagaaaaaggaagtcaccctgcccgctggagcccaaatcgcggagggcgctggacactcccaaccgcgc

SEQ ID NO: 6109 - DNA, 179 bp, Homo sapiens
ctcatgagtgttgatgctcagtacattttaaaagagctagtgcaagcttgcatttaacgtctatcatgatgttcctcttgatatttgtgtggtacctccagccttatccttaacattcctttacacagccctcatggaataaacagcacaaaacagcaacgacaacagcaaaaaaaaaa

SEQ ID NO: 6110 - DNA, 179 bp, Homo sapiens; identical to SEQ ID NO: 6109

SEQ ID NO: 6111 - DNA, 179 bp, Homo sapiens; identical to SEQ ID NO: 6109

SEQ ID NO: 6112 - DNA, 365 bp, Homo sapiens
tttgtaatttcaattaggggacttacaggtttgggaagactattttagacagacagatggacatgagtaaagccatagaggtaaaaagcccaatgcatatgtgcatgatatgtgataaataatttggatttcagaaaccatagattttggctaaaatctataaaaccatagattttggataaaatctataaaaccatagattttggctaaaatctataaaaccatagattttggctaaaatctataaaaccatagattttggctaaaatctataaaaccatagattttggctaaaatctataaaaccatagattttggctaaaatctataaaaccatagattttggctaaaatctataaaaccat

SEQ ID NO: 6113 - DNA, 365 bp, Homo sapiens
tttgtaatttcaattaggggacttacaggtttgggaagactattttagacagacagatggacatgagtaaagccatagaggtaaaaagcccaatgcatatgtgcatgatatgtgataaataatttggatttcagaaaccatagattttggctaaaatctataaaaccatagattttggataaaatctataaaaccatagattttggataaaatctataaaaccatagattttggctaaaatctataaaaccatagattttggctaaaatctataaaaccatagattttggctaaaatctataaaaccatagattttggataaaatctataaaaccatagattttggataaaatctataaaaccat

SEQ ID NO: 6114 - DNA, 1254 bp, Homo sapiens
ggaaaaaaacagaaattgaagatctgccaactgccatgcctagcataataaaaatgggcttccttccccccacaccccccatagggtctcgctctgtcacccgggctggagggcagtgatgcagctgtggcttaaaagcgggcttctcttgtccttcatcctcattcttccttgagcttgctcagggcttcctgctccacgtggggcctcacaacacgctgtgtgtggtgcccagtgagtactgtgcactcagaacaaccatgtagtgtctagcaactcagagttgtgtgctgtttttgatcctttactaaggatcattttattaaaatgatcatctttgagtttacaaagtatttaaatatagtgaatgtacaaagttggtaccaagttacctttatttcagaaagaagcatagactttctttaatatggaaaaatctgcctctttaaaatatttggtgctagggcaaacaccattgtcatcagtggaataaaggaggaggcccacgtatgtctcgggtcaggcagtgccccaggaggacgctccgcccccaggaggacgctccgcccccaggaggactctccccactgggctgataccaggcttcgtgagggtcggagccttgtgctgttgtccagtgtccccagcaccgagcgagtttgagtccatcagtcagtggatgccattttgaaggtgcagtctggtttcatggttagctgccataacatatgccaagtatcctgctcacatttacgtctctgaacaaatacgcatcagtctggtttcatggttagctgccgtaacatatgccaagtatcctgctcagatttatgtctctgaacaaatatgcattctgctttgttgtgagttccagacaagcactttaaccaaattggcaggcagtagagatagggaaggagtaattgaaaagtattagaaaataaaatgatccaggccaggtgcggtggctcatgcctgttaattccagcagtttgaaaggcccaggtgggtggatcccttgaggttaggatttcaagaccaccttggccaacatggtgaaaccccatctctactaaaaatacaaaaattaattagcgtagtggcacacacctgtaatcccagctactcggaaggctgaggcaggagaatcacctgaacccagatagcggccgttgcagtgagtcatcattgcaccactgtactccagcctcggcaacagagcgagactccatctcaaaaaaaaagaaaagaaaa

SEQ ID NO: 6115 - DNA, 1250 bp, Homo sapiens
ggaaaaaaacagaaattgaagatctgccaactgccatgcctagcataataaaaatgggcttccttccccccacatcccccatagggtctcgctctgtcacccgggctggagggcagtgatgcagctgtggcttaaaagtgggcttctcttttcatcctcattcttccttgagcttgctcagggcttcctgctccacgtggggcctcacaacacgctgtgtgtggtgcccagtgagtactgtgcactcagaacaaccatgtagtgtctagcaactcagagttgtgtgctgtttttgatcctttactaaggatcattttattaaaatgatcatctttgagtttacaaagtatttaaatatagtgaatgtacaaagttggtaccaagttacctttatttcagaaagaagcatagactttctttaatatggaaaaatctgcctctttaaaatatttggtgctagggcaaacaccattgtcatcagtggaataaaggaggaggcccacgtatgtctcgggtcaggcagtgccccaggaggacgctccgcccccaggaggacgctccgcccccaggaggactctccccactgggctgataccaggcttcgtgagggtcggagccttgtgctgttgtccagtgtccccagcaccgagcgagtttgagtccatcagtcagtggatgccattttgaaggtgcagtctggtttcatggttagctgccataacatatgccaagtatcctgctcacatttacgtctctgaacaaatacgcatcagtctggtttcatggttagctgccgtaacatatgccaagtatcctgctcagatttatgtctctgaacaaatatgcattctgctttgttgtgagttccagacaagcactttaaccaaattggcaggcagtagagatagggaaggagtaattgaaaagtattagaaaataaaatgatccaggccaggtgcggtggctcatgcctgttaattccagcagtttgaaaggcccaggtgggtggatcccttgaggttaggatttcaagaccaccttggccaacatggtgaaaccccatctctactaaaaatacaaaaattaattcgcgtagtggcacacacctgtaatcccagctactcggaaggctgaggcaggagaatcacctgaacccagatagcggccgttgcagtgagtcatcattgcaccactgtactccagcctcggcaacagagcgagactccatctcaaaaaaaaagaaaagaaaa

SEQ ID NO: 6116 - DNA, 371 bp, Homo sapiens
gtagagagtaattctcaatgagaggaatctgtaggtattggctttaacaccaggacaataaatattggaagaaacttatcccagattccttttgttactattttgcttatctgcttagacattccctttctagcatttatcaaacttaccaacaaacattgtcaggtaggagtgtgacatcctacctccaagagccaagggttgggttcaggtcctacactaacccatggaaaaagtatttgacatttcatgtttatattaaaaacaggtgcaaatcttgcctttagcattatgtttgtttcatattaatatttgaaatgacttaatcattgagtaaaattgaggccccaaacagatacactgtttctagt

SEQ ID NO: 6117 - DNA, 816 bp, Homo sapiens
agaagatacaaataaatagaaaaacattctaccttaatggattagaagacttaatattgttaagatgttactactacctaaagcaatcccagatttaatgcagtccctataatcatgaatccgataagcagtcatcatccaggatatatagagaactcctgaaattcaacaacagaacaaccaaacagccctattcaaaaatgtggaaagaacttgaacagacatttctccagggatgatacagaaatggctaggaagcacatggaaagatactgaccatcactaaccattaggaaaatgcaaatctagaccgtaatgaaataccacctaacacctattagaaaggctactgtcaaaagaaacccagaaaataacaggtgttggtgagatgtggagaaattggaacctttgtgcactgttggtagaaatgtgaaatggtacagctgctgtggaaacagttcctcaaaaccttaaacataaaattaccatgtgatccagaaatcccgcctctgtgtacatacccgaaagaattgaaagccgggacttgagcagatatttgcacacccacattcttagcagcattttttacaatagctacaaggcggaagcagcccaaggatgcgtgggccgatgaatggataagcagaatgtggcctgtacaccttagaaacacgggactcctgctccaggccgccacatgctggaccttgaggaccttatgctgaaggaaacaagccagacacaaagggacagcgtctgcataattgcacttgtgtgaggtttctgggggagtcaaactcatagacagaagcggaa

SEQ ID NO: 6118 - DNA, 371 bp, Homo sapiens; identical to SEQ ID NO: 6116

SEQ ID NO: 6119 - DNA, 1325 bp, Homo sapiens
cagtgctaagtccactgctaataacagaaacagttaaagctgattgtgtgcttctacgtgccaggtccttactaggcatgtcaccttcactcactctaacttcacaacgtctctataagatagccagttattttgtgcacatttagcaacaagaacactgaggttctgggagattacgcaatttactctcatgataaaacttatatgtggcatagctaggatttgaacccaggtctctctgacattagcacttgtttggggttttgtttgtaccatgctgcttctcttggtttccttctgctaacttaagaatgcaaggaacctataatccaaaaccatactctaaacattaaatctcataacttgtaacttatgtcaccgatttggtgagcaaacagaattaagtagtccagggccaacagcagaatcttcagggacagaaaccagataactccaattaggtgggctaaacggataaattccacatcaaaggaacctttactaggaaaatatccggtgaccttcagcctctgataagacttcatctcatcatttctcctgtcccaacacccctacacttcaactagcttcaaatattctgtatccacaccaaagactgattcaacactttgcaatcacaaacccaaaggcaagttctctgggattgcatcagtatgaagattttattttgcaaagttacttccctgaccagcctccctgctgcagacctcttcaaatttcccagattaagaagacattcgaagtgacaattccaggccttatcatgttcaacaaactggtcacaatgtgtcagatgaagggcaagatcaattctctgggcctcttgcttctacatctcttatagaaagttaccatcatcaaaatctttcgcatcactcaaatcatcaacaatagttagaagaacaataacacacacaaaaaaattagtagcaaagataagccagtacaagtaagtgtgacacagtccaaaccaacctgggcacattctcacaatcccttggaaatgactttacctgaaggctacgtgactcatttaactcggcactaagatggaaaggtctagggctctacagaagttcctagtaggaaaacttcattcttttccaagccaggtctccagggcctggctctgacatggttaccacttccacggagaagctgacaacagctggtcacattcttttctctaccctattcctccccatcaggtgaagatagctaactgccatgtatcttatctaaggaggctaacttgcagcaatgatgtggcatgacaagtgaaaagtaatggggatcttgaacag

SEQ ID NO: 6120 - DNA, 1325 bp, Homo sapiens; identical to SEQ ID NO: 6119

SEQ ID NO: 6121 - DNA, 1325 bp, Homo sapiens
cagtgctaagtccactgctaataacagaaacagttaaagctgattgtgtgcttctacgtgccaggtccttactaggcatgtcaccttcactcactctaacttcacaacgtctctataagatagccagttattttgtgcacatttagcaacaagaacactgaggttctgggagattacgcaatttactctcatgataaaacttatatgtggcatagctaggatttgaacccaggtctctctgacattagcacttgtttggggttttgtttgtaccatgctgcttctcttggtttccttctgctaacttaagaatgcaaggagcctataatccaaaaccatactctaaacattaaatctcataacttgtaacttatgtcaccgatttggtgagcaaacagaattaagtagtccagggccaacagcagaatcttcagggacagaaaccagataactccaattaggtgggctaaacggataaattccacatcaaaggaacctttactaggaaaatatccggtgaccttcagcctctgataagacttcatctcatcatttctcctgtcccaacacccctacacttcaactagcttcaaatattctgtatccacaccaaagactgattcaacactttgcaatcacaaacccaaaggcaagttctctgggattgcatcagtatgaagattttattttgcaaagttacttccctgaccagcctccctgctgcagacctcttcaaatttcccagattaagaagacattcgaagtgacaattccaggccttatcatgttcaacaaactggtcacaatgtgtcagatgaagggcaagatcaattctctgggcctcttgcttctacatctcttatagaaagttaccatcatcaaaatctttcgcatcactcaaatcatcaacaatagttagaagaacaataacacacacaaaaaaattagtagcaaagataagccagtacaagtaagtgtgacacagtccaaaccaacctgggcacattctcacaatcccttggaaatgactttacctgaagtctacgtgactcatttaactcggcactaagatggaaaggtctagggctctacagaagttcctagtaggaaaacttcattcttttccaagccaggtctccagggcctggctctgacatggttaccacttccacggagaagctgacaacagctggtcacattcttttctctaccctattcctccccatcaggtgaagatagctaactgccatgtatcttatctaaggaggctaacttgcagcaatgatgtggcatgacaagtgaaaagtaatggggatcttgaacag

SEQ ID NO: 6122 - DNA, 397 bp, Homo sapiens
ccctagatgtgaatccattctcacatatataattactatattcaagtgtttaataaacatttagtaatgcttttaagtcaccagtatcttcacagaaatgaccatattgttgcccatctattagaagagatggtgttcaaggtatgaagtagtagaaggttcgtgatcatgaacccctgggcaagtcaagatcctcaattgccacctctataggtggaagtataggcctaacaatactaaggattaaaagtgaaatgctgctggcgcagccctgggctcacagaagcagcaaaacaagcactaaagccctcctcccgcccacggttctgctcaataaataacaagtgctgttaattctttaattgtggatccgaggaaaatgaaacagggttcaccc

SEQ ID NO: 6123 - DNA, 205 bp, Homo sapiens
ccagcactttgggaggccgaggcagttggatcacctgaggtcagaagtttgagaccagcctggccaacctggtgaaaccccgtctctactaaaaatacaaaaattagctgggcgtggtggcgggcgcctgtaatcccagctactcgggaggctgaggcaggagaatcacttgaacctgggaggcagaggttgcagtgagctgaga

SEQ ID NO: 6124 - DNA, 217 bp, Homo sapiens
acacctgtaatcccagcactttgggaggccgaggcagttggatcacctgaggtcagaagtttgagaccagcctggccaacctggtgaaaccccgtctctactaaaaatacaaaaattagctgggcgtggtggcgggcgcctgtaatcccagctactcgggaggctgaggcaggagaatcacttgaacctgggaggcagaggttgcagtgagctgaga

SEQ ID NO: 6125 - DNA, 397 bp, Homo sapiens; identical to SEQ ID NO: 6122

SEQ ID NO: 6126 - DNA, 397 bp, Homo sapiens; identical to SEQ ID NO: 6122

SEQ ID NO: 6127 - DNA, 183 bp, Homo sapiens
cagttggatcacctgaggtcagaagtttgagaccagcctggccaacctggtgaaaccccgtctctactaaaaatacaaaaattagctgggcgtggtggcgggcgcctgtaatcccagctactcgggaggctgaggcaggagaatcacttgaacctgggaggcagaggttgcagtgagctgaga

SEQ ID NO: 6128 - DNA, 984 bp, Homo sapiens
gcaggaagaaaaagagcataaaatttacttaaatagatgtctattcagttacagttatgagaggactccattaagttacacattttttgaaaaaacctaactcttaaatgagccaagcatacatcactaagtattctatttaagaggattcaacgtttagagaatcaagaagtaccagtggctgcattctcacaatttcctgcaagaatgagtctctcacttatctactttagtgtctcatttaccacttttggtgtgaaaagttcccatgatttatacatacctagactcttactgctaaagattctttacatactttgatgataatgattataatgataacccatacatagtgtttaatgcatgccagacactgctctaaggtttttgcatttaacgctcacagggatgcaattgtcctcatgttttcattttacagatgaggaaactgactcatagagagttaagtaatttttttcaagggcatgtagcttacaaatgatagaacaaagattggaccctggacaatctggttccagggtcctgttcttaaacattaccttttcctgcttcttacagaaattattaaatgtttactgtttacaaggctaatatttatgaagtcattagaaatgatgttggaaaactgctttgaatcacataagtagctattaacaaatgaggttctagtagaatttgacaataatgacatggtaggtaccatttggctaataaaggaaataaaatgaagccctgaaatagattttttaaattactttcattatggttttgctatgcacatcttgtgttaagtaaagaatgttgcatggtgcttttgggcaggggtttttttgtgctttttaaaactttatttcaacataactatgcttacagaaatacagtcatattggttaatagaatgcaacttaggtttaacttataatacacaatttggaccaaaaagttggtacatggtttaagatt

SEQ ID NO: 6129 - DNA, 152 bp, Homo sapiens
aaaaaaataaaaaaaaaaaaaaaaaaaaaaaaaataaaacaaaaaaaaaatataaaaaaaaaaaaaaaaaaaaaaaaaaaaaaaaaaaaaaaaaaaaaaacaaaaaaaaaaaaaaaaaatataaaaaaaaaaaaaaaaaaaaaattaaagag

SEQ ID NO: 6130 - DNA, 165 bp, Homo sapiens; identical to SEQ ID NO: 5838

SEQ ID NO: 6131 - DNA, 143 bp, Homo sapiens; identical to SEQ ID NO: 5839

SEQ ID NO: 6132 - DNA, 151 bp, Homo sapiens; identical to SEQ ID NO: 5841

SEQ ID NO: 6133 - DNA, 125 bp, Homo sapiens; identical to SEQ ID NO: 5842
  SITE (33): n equals a,t,g, or c
  SITE (49): n equals a,t,g, or c
  SITE (61): n equals a,t,g, or c
  SITE (90): n equals a,t,g, or c
  SITE (91): n equals a,t,g, or c
  SITE (116): n equals a,t,g, or c
  SITE (117): n equals a,t,g, or c

SEQ ID NO: 6134 - DNA, 126 bp, Homo sapiens
  SITE (9): n equals a,t,g, or c
  SITE (10): n equals a,t,g, or c
  SITE (14): n equals a,t,g, or c
  SITE (20): n equals a,t,g, or c
  SITE (95): n equals a,t,g, or c
  SITE (107): n equals a,t,g, or c
  SITE (108): n equals a,t,g, or c
  SITE (110): n equals a,t,g, or c
  SITE (118): n equals a,t,g, or c
gccaaaaannaaanaaaaanaaaaaaaaaaaaaaaaaaaaaaaaaaaaaaaaaaaaaaaaaaaaaaaaaaaaaaaaaaaaaaaaaaaaaaaaaanaaaaaaaaaaannanaaaaaaanaaaaaaaa

SEQ ID NO: 6135 - DNA, 195 bp, Homo sapiens; identical to SEQ ID NO: 5845
  SITE (3): n equals a,t,g, or c
  SITE (30): n equals a,t,g, or c
  SITE (32): n equals a,t,g, or c
  SITE (37): n equals a,t,g, or c

SEQ ID NO: 6136 - DNA, 10706 bp, Homo sapiens
aaaaaaaccacaaacgaaaaagcaagagtctagagagaggcattttcttggagggcagcttccttcctttcagctccgtgccagggccgggcctctccaagatgcctctgtgtctgccatgatcttccctggccttgtcacctgtaccgctctttctcttctcttcccagcttctgtgaggccaggcagggcttccctgttgtcgggtgcccgagtggccgctgccccagctctcaccgtggactcctgcctcaccgggctgtccagccctgcctccccagtcttgctgtggggtgctggggcaggcagtgtgtttgctgggaagctgctgcagcttagagcctctgactttttttttttttttctcccccctcgcccccaggatcgctacggttcctactgatccgagctctgtgactcaggcttacgatggtgacggcaacaagaactccacagttcccaggctggggatgctttgccttgtggaagctggggaggatttgttacttcgtatgtgtggtgtgtgtgtggggtggcctttgaggcgctcactcctgtgaggggaatggtcagtaccagcccttgtcctctgcctgtggactgagccctttattccctctcacaccaccctccgtgtgttagactcttgtccttctgtcctgcccccacagctgctgctcacttatcctgccatactgggaaagggggttcccccacgatggcttattctgggtccagactttccccaggtagggaaagcggaaggtagaaggctttttttgctggctctagggttcttctagttcgaggccttgggtccccatcctctggaaccagggggaggcctggaaggagttcactgtagacccgtcccatggggaaagaggctgcggacttgctgctgctgctgctgccagtggcctcttctgggtgccaggagaggggaaggacctttgtctgggcgttaccaagggctggaaactttacctggtacctaaaggtttcatttgggatcagaccggagacccttgggttctcccgtctcaccacccctttctacagtaagcacttggaagattgtttcagggtgtctcagggtccctctgtaccatctgctgtggaatgcaggaccctctgtgacattctttatcccttcttccccgggttggtggccatggagggtcttgtctgctgtgattcgactctggatgctgtgagcttgatgctggccagggaagcagaggatgtgagaggcagaggcaggctcctggggctgagctccttcctctgcatcattctgggcttggcctggacagcacccgccagtgagagctgtgggcctcaccctctggcagctgagccaagcactgtcattcttggtgccatcttcccctgccgcaccggcagtctcagcccagcccccacctttgggttgtaggttgggctcccaagcaacacagaccactcttccccttgcccctcccccagagggacttgactttctttctggactgtttgtattgaaacaaagtggtgtcaaaataaagcccctgcagggcctggctccctgttggtctgagtgaagcagtgtcctctggatcctgcctccctgcccagtgccggcccctggcctcactctctgggctcccaccggtaatggtagggcgtcggtaccgaagctgaggacactctctccagggcctcctgcttctctcttctctgaaagccaaaggcccctggctccttggctctgtgctgccgtgaggtccggtgcagcttcgacctcaccaccctgtggcacgcagaggaaagagctggcattagttggccctttaactcgctggctgagggcgagcgagcaacctcagcagtcctgccccttgtcacggcagtaggcttgactggggatgggtttcagtggagtttaagaaatatttaacgccgggtacagtggctcatggctgtcatcccagcactttgggaggctgaggcgggtggatcacttgaggctaggagtttgaaaccagcctggccaacatggtgagaccccatttctactaaaaatacaaaattagcggggtgggggcggtgtggtgcatgcctgtaatcctagctactcaggaggctgaagcagaagtcacttgaacccgggaggcagaggttgcagtgagactagatcgcgccactgcaccccagcttgggtgataaagtgagaccctgtctcaaaaaagaaaaaattacatatatatacatacacacacatactcttagacgttaatgggaccctttaaatttagggaagaaaaggtgtgtgtttgtgtgtaaatccttagcttggccacccctttctcttgggggcttctgaaacatctctgtgccaccttaggagtcctcacggtagttacagaccactggtctgggaagtggatgattagaaaggatgggcagagggagccagggggctgtaagccagggatttgcagagtgtaggtttgggactcattcagctttgggatcatctggaatttctggactccatcccaagttgatagagttagactctctggagcttggtaatttgcatcgtcagtaggctttcctgtgattctgaggacaccaggatttgagaaccatgtctcttatgggctgtgcatcattgtgggcctacagagctcatcacgcagcctgagcttttttttttttttttttttaagatggtctcattctgtcagtcactcagacgggagtgcagtggcacgatcatggctcactgcagcctcaacctcctgggttcaagtgatctacctcgggtctcccaagtagctgggactacaggtgcaagctaccatgcctggctaaggttattttgtagagatagggtcctactatgtttcccagggtggtcctgaactcctgggctcaagcagttggcccaccttggcctcccaaagtgctgggattacaggcaatgagccactgcatcctggagcagcttcggggctggaatgcctagtcttggcctcagctctgcaggggtttgggaggcagttcctgtaatgatccgttctgggtagggatgagcccaaggaaatgtgtatgcctagtagtggtgacatccaccttcagaggaggcagtcctgttctgcttgggcttctgggtgggttttgctttctgggggaccccgccccttcagccctcaatccaaagaagttgaagacactcgtccttacctgcctccagtcttggctgggatgtgtctgccccaggctgtgtctgtctgtctttcacagctgcatcccactgttctaaccccaagcaggtgcttggcaaatgttgactgaaaccctggctggaaggctgtgcagtattaaccctttatggccacggtctttaaagttatgggaacctggccttgaaccctctgaacctgtttcctgaaggccgttccagctgtgagcacttttcctctggaaggttgctcttgtgcgaagctaggcccctctgctcgttgtctgaggcaggtccccaggtctgagtgggccactggcctacctcctagtcctaccagaaaagcaccgaaaacccaaactccccctctcccttctcccctcagcctaggagctttagactcaccagttaccagacatgagggactttttattcgtttcacatgtttgtttagctattagacacaaaggggtcaagacttgaagcagtttttgcaagtgaaatcatcttctggcccacccttcatattaccaaggctactggctgttctccaacaggccacagcggttatgtcctcctggtacttgcgtcgcaggtgtcacccttgatggtgcaaggccctgcgtggctattcgggttctcccccttaatggagttgctgtgaggagatgaaccttattgggggaccgcagaggctggctcagaagagactgctcttaagaggttaggaggactaacaggctacggcgtgacaaggtggcctcagcacagtctgtcagcttggggcctaagtgaagttcacaggctgatagggccagggagagcaggccattcaccttccggggccactggctgggctgatcatcagagcccctctggctggtcttggggctgttattcaccttgtcagcagcagagggcagcacagcaaggtgctggagaggaggctgggtgggcacaccaagggctgggtgggagcaggtacagggcgctgtgggcaggaccctttggactcctcaagtctccgactcgtctgtctcttcagtggagccatcactctctccatccacttttcgggaatgatggagaggtctccagggagagccaacccggggaggggtccgggaaggcaggcaactggcctctggactggctgtgaccgagttgaccaggcctgggacctgggccagcctgaagaagggaagaagcctggagggcagcgagaggcctcctgtacagagagcagggcctccatgcccactcttaacactagggtaaacccgctggctgcagcccccaaaggactcagagggagggacacctcagcctccactggcccccagacccttccctggcagatgtgggatgttacagacaagtggtgttggccccagatggggcacagccgtgtccgacccgtctggcccccacaagggggcagtatcctcccacttgacacttacagccgttccagctcttcatccattgctgggtcgtgcatcagatcccccttgtcaggcaaagctcctaggagatcattgggggcacagtagttaatctgagggcccttcagccaggcaacagattcctccatgcccctcaccttcacggctgcctgttctgctgaccctgcgagggccgatctaaagatctgaggactgctagaggggccaagaacagtcacggagcaggaaggtgctcgctgttgcttgatacatttattgaatcccactgcctactttccctgcctggggcagacaccacagccaaggagtgtggtgatccccttccaacaccaggtggtggttgtgacctggtgctgggagttgagttccttcttgaggcctcaggtactgggctgaaaaggatatggtccaggctaagcccaaaggtcagacattacctaattttgtgtccctaaatcaggatgaccccactttggagacagatggttaaaaaaaaaatgctgcctctgcttctccaaggaggatcccaggggcaagaggagaaggctgggtcagggccagaattaacccggcacaggcagatttcccctttttccaaatctttttcagatgatgcctcctggcccctcttgccctaagttagtggttttcaaagtacatctcatagaaccctctcatttgtggggtgccctggggactaagggaacagggctgacctccgtgacgcgtcaaccagtgtatctccggatttctatttcatacgctggagatgcaggtgaggcctgagaccacatgcttctttctgtctcccattccatccaaccacccaatgttagtgtgcagtaaaagtggttgaatgagagtgactttttttttttttttttttttgagacagagttttgctttgtcacccaggctggagtgcagtgatcatggctcactgcagcctcgacctcccatgcccaagcgatcttcccacctcagcctcctgcgtagctgagaccaatggtacatgccaccacacccagctaatttttgttttttttctaaagagacggggttctccctatattgcccaggctggtcattaactcctgggctcaagcaatcctcttgctttagcctccccaaatgctgggattacaggtggagccaccatgtctggctattagtgtttatttatttgatggagtttcgctcttgttgtccaggctgaaatgcaatgatgcgatcttggctcactgcaacctccgcctccctggttcaagtgattcttctgtctcagcctccccagtagcaggaattacaggcatgtgccaccacaactggctaattttgtattttcagtagagacggggtttctccatgttggccaggctggtctcgaactcctgacctcaggtgatccgccgcctcggcctcccaaagtgttgggattacaggcgtgagccaccacacccagccagtgtcctttttaaaggcccttagaaaagggggatgaggttacttcaggctgtgacccagttgctaattggcttctccttcctagtggctgctactggtgggaagaaagagtggtcataacgaggagtatgaaagaacaccagggcagatcccacccgcctcccccttactcttgattcctgactctcgcctgtttttgttttttttttcttttttgagactgtcttgctctgtcgcacaggctggcgtgcaatggcgtgatctcggctcaccgcaacctccgccttctgggctcaaccgattctcatgcctcagcctcccgagtagctgggattacaggtgcgggccactatacccagctaatttttgtattttcagtagtgatggggtttcaccatgttggtcaggctggtcttgaactcctgaccttaggtgatccacctgcctcagcctcccaaagtgctgggattacaggcgtgaggcaccacgcctggcctgtcaattgcctcctttctagtcttagtccagtgggtaaccttggctaccaacttcagttgagggctccccagacctgtgcatgccccaagcactgactcagaataaccaggctgtgggtggcatgcagttcagcctgctggggtttgtgcttgtgtatcccagagcatccctggctaactgtatattgtgtaagataaaaaatataaagcatccagcacagtacttagcctgctgtggttggcatttagtgaatgttaactttccttcccttaatcccattccctcaactggcaaaaggaagggggatgctgtgtgtcttttccttgagactcaggcacctgggatcccaagcacagcaggaggatctctcgagacacaaaaaagaactccttgctgggcgtagtggctcacaactgtaatcccagtactttgggagagcaaggtgaggggatcccttgagcccaggagtttgaaaccagcctgggcaacatggtgaaacccagtctgtacaaaaaacacaaaaattttccaggatggtggcgcatgcctgtagtcccagctactagggaggctgaggtgagagcatcacttgagcccgggaggtcgaggctgcagtgagctgagattgtacacagcactccagcctgggcaacagagcgagactctgtcccaaaataaaacaaaaaacaaaaaaccttaaactgtagtagaatggaggcttactggctcttctcttaggagagcagtggctgtgggaggaggaacagtggggtgggtggagaaggctcagtgaaaaaaaacagcaggcaggaaaaactgggccactgcagacttcccctacttttgtttttctccctttcagattaatcagattttttttttcagcttggaaaaaaggtctccgcagacacacctgtgccttgtttataaatgggattcaggtctctttgatatataatctctagcgtcactgagtaaatagtcctgtgtctgcccgacctgcaggctgctccccaaagcagagctggggttctctgaggaggggctgggcgcttctgctatggggaggtggtttcatgttggggcagggctgcaggcagggagggctgtcccctaccatgggaatgtgtaagagccatgttttgtcgccatattcctgctccctgggattgagtccgcccctgggaagtcaaggcagagatggtgatgccccttcccctctggagccgtgttgctaacagaggccagctgctccctgtgttgtgcggcaggagaggctgacggctgcttagctctgacttaccgagggcttggttgattccacggtgctttgagagagccatgaggaatccatagaaggtcagtctctgaacattgctgagggcctctttgacaagtgctgggggtgggcagctaagaaggagagatgccacattcagagcctagccagcctcagggccacctctgcatccatactttcaggttcatgaggatacccacagccaagccagggacctgccttgggagccccaaggccctgggggatcaggccttcactatggtcaggaggggctggcatgttcactaactggtgctttcaccggggtggggagtgggggtgggaaatggctacgggaaaccaaacctgttgctcagtccctaagggtacttgtgccacacaggacagcttacccctctctttgtgtagaaaagttttatacaaggagtactctttccttctctctaaaatgttaaggccagtctgtcacccagtaaattggtcaactacagtggtcttgcctgagtgaaagcagtccttttgaagtgagctaattgagagcctttcagtcaacaactggtttgggggcaaatggcactgttacattatgaccagcaagggccctagaatgcctgggccgcgcagaacatcctgcggagctctgttccgcagccagcagtccgacccctggggctggggggctggggctgcatgcccgttcctcacctgtacttgtgccgatcacacaggttttccagacactggtagaacagcgacgcctccacgccctccagcgtgccggcccccccaaggcaggtcgttggcggtgctgcccactggacgacgtcggcacaatcactgtgttggggttcttgcctgacagcaggtcctcatagatggcagccacactgtccaggaattctggaaccgtgggggtgggggtgtgggtgtggacggctcaggcagggaggacatgttttgtctgttcactatgtcttcccttctctgtcagcccagttccacaccagcctcagtgctcagggcatggtgtcctgagagcagaagttctcaaccttgtttgacaacacattgatgagagatgacactaatctgtgtttttgctcaaatgtcccatccttggctcagttgttcctggaccaggtgagacctgccattgcacactttcatagcaccataggcttttttttttctggcacttagccagtgaggagctttctgtgtcattaattgtctaatctgtctccttgctggaatgcacaaaggcggggtcatgccttgttggcctctcctgcctagcactgtgcttggcacatattaaggccataaatattttttggaggagtgaacatgagtatgctcccactggtaagccccatggtgtgtggccacctgcctctctacctcaagaaagcgtgttggaataccagcgaggaacagagaaagcctgaaagctgctgatgagtcagtcatttgaaatggttttcaaatttcgtagttgagccattgttagaactgctgacttatggcccatctcgtctctacacacaccgctgggcagtgtcagtaatgctcccagcccaatgtggtggctgtcccatccctctgggggtgctgtgagaagagggctggggagacagtgagggaaaaatgttctcccagacatggctgctccttctctagggcccaagagcttcagagaaatgggaaatgactggtgctgctaagagcaggtggcgagaccccaggctccagcccctaactgtacagcccttgggctgccatcaagtaaacagaatgtggcgcccaaatgaggccagggctggctggggacaccagttggcaggaaggccacctctaggatctaaggacagccttctatttactggaagagcctgttttaagcaagtttgtttatgaacacagtcagcaatttgtaaacccggcactccatttgatgtctctgtgcgtgagctggtgtatatttatatttatttgtctatatttattccatctgattccagagagacttaagggtgcagctgtgtgaattggggagcagagtgggagtgtgacaaaggactggtgtatgcttttttaaagctgtggggtggaggagaatgtgcacccaaacgcacgatcagttgccaagggagagacccttgaaggcagtaaaatagcagcgaggttgggaacgctggctttggagtcagccttcaggtctggtctccaccacttatgagctgcatgactggctactacttctgtgagcttgtctctgaaaggactctctctcaaggctgttgtcaagattaaagtcagtgctgtgcctgggacatagtaagttttcagtaagcagtgaatgctgtggatgctatggatgttgttattgtcattatcacttaaactgatttgttgcgttgctgactgaaaacactgcggtgttcagtgtcttcaggaggctgaggaagtcggctctgcagactgaatcttgtgaccaccactgaacactagacatcctgttagcgacccgcagtgaagcacacccccaaaggaagtggggaagagaaacgtgtgtgccaggcacacagatgggcagggcagcagggcaggacagggagacagggtcctgtgcggagcagatggagccccggaacactcacctgagtagtaaaactggatctggaaggcaaagaggaaatctgaaaaagacatcaagcagtccatggcatcgtccatgagcacaatcctg

SEQ ID NO: 6137 - DNA, 14427 bp, Homo sapiens
agtcccgtaggctgtctttcccttgctttgcagatgccagccccagagtcccacctccaccgttggtaaggaagcccctcacccctgcctctttcaattgtgggaaagtgaactccagcctctctctccttcctcatcccagatcaacagcagatgttagtatgacccccctcctggctccctccgtgactccagctctgccccccacctccacctccacctccaccacttgcttgttcatctctcacctgggccaatgtccagccttctaagtgtttcccttctccaaactctcccttcccatttgtcaccctataagtaacctgccagattattttaaagcacagtgctgaggtcacacatgtactggcaacttctaatgcaagaccgactagggctagatctctttgaggctccctgaccacacgtccaacaactcctccctcagttcacaatttcacttctccttattttctctttctcttcctgatctgttctgtaaatttagtttctgctgtggaatttgcttgctcccttctttagttcaaatcaggcatttgctacccctcatgtctgtgacaccgtgtttatagtttataaaccactctcaaagctatttgtggagtactgaggttagccctggacatgctgtggtgagtaaaaacagatgtggctgtgtttcatgaataaagtcaacaaaatctgttgaggaccctgaccaaaagtcatctgtcccaaaatcctaagtggatttgtgaggaaagatattttcccattgtctctcttaacactcttccccctgactcccaaactatggcctccctggggtcataggaacaaagtacagaagacagagaagaagactgtggcttgcagattcttaaagaactttattaaccttgtgagtgtcatagaagcagctactgggatgttgcaagcccagtgcaaactggtatatcttgctatattgcaacatcttgaatttccttccctttatattaactacccacacataataagccacatctattatttgtgtgagcctatgctttttacttttattttagagcctctcgtttcctcatttgtaatatgtgatcagaaatctgtcattctcggcctgccgcggtggctcactgctataatcccagcattttgggaggccaaggcaggcagatcacttgaggtcaggagttcaagaccagtgtggctaacatggtaaaaccctgtctctactaaaaatacaaaaattagctgggcgtggtggcacatgcctgtagtcccagttacttgggaggctgaggcaggagaatcacttgaaccaaggaggcataggttgcagtgagccgagatcccaccactgcactccagcctgggccacagagtgaaactctgtctcaaaaaaaaaaaatctgtcattctcataaggttgttaggatgatcaaacaagataaaggtacataaaagagctctatagaattataatgtacaaggccgggcacagtggctcatgcctgtaatcccagcactttgggaggccgaggtacgcggatcaaaaggtcaggagatcgagatcatcctggctaacacggtgaaaccccgtatctactaaaaatacaaaaaattagccaggcgtagcagcgtgcacctgtagtcccagctgctggggaggctgaggcaagagaatggcgtgaacccgggaagcggagcttgcagtgagctgagatcacgccacactgtactccagcctgggcgacagagcaagactctgtctcaaaacaaacaaacaaacaaacaaacaaaaagaattataatgtacaacataaacgtattttatttattctttttttttttttttttttgagacggagtttcactcttgtcacccaagctggagtgcaatggcacaatcttggctcaccacaacctccacctcctgggttcaagtgattctcctgcctcagcctcccaagtagctgggattacaggcgcctgtcaccacgcccaactaacttttgtatttttagtagagacagggtctcgccctgttggccaggctggtcttgaactcctgatcttgggtgatccaccccctcggcctcccaaagtgctgggattacaggaatgagccaccacgcccggctactttcttctttaaatcaattatatggccattatttatttcataaataggcattcagtgactttgaaatattatggtccagatagagacaacagggttgtacaacagaaatatgtaggtcaaaattttaaatattctagtagtgacactaaaaaatataatagattggcaaaatttagtaatctataatcttgatctactacatccagaatgttatttcaacatgtgattcatataatagtgactaatgaggtatcttacactctttttttgtagtaagtctttgaaatcctgtgtgtattctacattgacgggacatctcattttggactaaccacatttcaagtgctcagtattcacatatggatactgtgcaggacagcacacactaattggtaatgtaaatacaagttagttaagatctgtgaagtactttatggtttccaaaactcttttggcatttaaatcttgcgtcagccccagcaggtagatgtttatcatttccattttgtagaggagaggctgcagcaattacctgtaagtcacccaagctcatccagctagtaaatggtgaactcaattcttgtcttaaacctgggcactttcccttttgcttgcttgcctaaacaagcaatacaaagacaaacttaatatttatacacatacgtcccatggctcattgcagtagtacaggacagaaacaattatttcaaaatccacctacaatctagtctccaaaaatcctgcccagtttaattgcaccacaatctactaactgtaattctaaaaatgtgtatgttggataatcttccagctctaaagtgctgtgaattaaaaaaatgccataggcaggcataaaaaaatcctaccctctattatattctccatctgatatagaatatatgatatatattctataaatgaatacatgatacagagtctatcatgtagtgatttactttttacttttgtgaattacaacgtggtagggtaggaaatgagaaagcttaaaaagcctaattttctcactaaagcataaccagacacagcagcctattaggggtttctccagaagatggcaggcagtcaagggggacagagttcgacccgcgacaggccaactgatttccccaaaaagatgccaagggcagctaaccgccctcctggcccgcgaagctgctccttgagggcccaaaacttcccggaggagccagaggaggccctcaggagccacagctctccctgacttggcctgtatttgcacccctagggatcccattccctttcccgacgcagcgcaaggaaggggagcggaatgggggctgaaaggcaataaaaaacttgtaaagccgtatctgctagttctcccagtgggctatgtccctgcaaatatcctccacaagaagtaaactgggtgggtaggaagaggtgaaggctccctcctcagggctgccgggaccgcctcgagggcttgtctgtttaggtcccaattcctcccggatccgtacattcacacgagcgcagggcaacaatctgagcgagtgttcgtgtgtgcccgtgtgactcgccatcgcgtggcagatgttcagtagaacattacagtaatttctgttacaggtccatgggcgcaggtccctgagcccacagcttcgcgggggtctggccgagcatgcgtcacaacctacgcggccaagagcagtgcgcacgcgcaacctaacgcgggactgccagcaacttccgggcgtttacaggcaggcaggtcagtgatgtgtcctaagggtccgaccgacctagatacccctctttgattcctcctcttgggattagtgtccatctctggaagcaggatccaggaggacgggaggggccgctgcggaccgcagtcgctccacctggaggagacaccagaaggaagacagcctgagggacgcagccatccccggctcctaccggcgccccgccccgcgcatgcgcacgcgcacagggagtcagctggctgcgcgggaggtcacgggaagtggggcggtgcccagacagctggagggaaggaggtgtcaggcggggagagacgcaaacggcgggaccagcagcgacggtagcagcagcatggccgcgatctatgggggtgtagaggggtgagtgcggcccggcggagggagcctgggcccgaagcggggcggaagccgtggcagcctggcaagctggtggccttgatcctcggcgtccgggcactttgggcggcgggaccttgcggtgaagaggtgtgtgcacgcgcagggggccctggagccacagctgtatgccttacggggactctgcctgtgcaacagccacaccccgggttggggatcctttgtgtttcttggcggaaccacgcccctttcttccacgaaacacccactccgctgtcttcagctggagaagcagctcctttttcctattcctgacctcggacagagttttgcagaacaggtgtcaggtgtgaaattgctgagcgcgggcagggtggggagtgggagtggggagaagcgggacaaagatcttggctgaggttatccgggagctggagcagctgcgagccagagtactaggttgtcctgatgtctgaaaaccgctccatccctgttggccttccatgctgctttcactagattgcatttttctgctcagaagcttgtttactgaactttttgtaatagctctgcccctgggtatgaccatggacaagatatttaccctccctgggctacagttaccgtatgtgcaaagtgaggatagggataaataagatcgctatgtccctgccagtggcaacattctgtgaatctgagtttgtcaaatcagggaataatgggggtcgctggcctctcagccagggcactgtactttcgaatctgtgattgttttcacttctctggcagccacaccccactgctgattcacagaccccaaagtcttttcacatgaattgttaggaatgatctttcccatcctgtatttgtagcacttaaaaaaaacagtataggagtctgcattcatccttgttatagtcatctgtaagatatgacccgtttcttccagttcgtcaagacatgcttttggatgtggaatctgccacctcatgtattaactacccccttgaaatttcatgtcctctttgagtttgatgagcggtcttcagtgtcttcttctgccattcctaaaagtaatgatcaataaagaaacatatatcccatcaccacagatctccctgtgaactactgtgacccccagtaatcaacatttgaaggtttagttgcttaagtatgtatgaagtcaccctgccatctggtcagcatttctagcaaaggtgtcttgaagaccttggcagctggatcttgaaatgcagtctttagctattgtgagggaagcagagagatgtgccatttttcttaggagtgtttgctgagcattgcctgtgccagctcctgtgctcgttctgagagggtaagtaagtgatcaggagcttgacccagtggagcttgaagtctagtgagaggcggacacaaagcgtctgaacacacacttcatacagaggagactttaataactttggaggcactatgaaggtttaactaacggagacttaactaattcgttggggtgggccacacctcagaaaaggtttcgaggactaggtgaagcgtaagtagagtcttgcaggataaggaggacatccccaagggaagaggagtgagaattatgtttcagttaaagagcactcaaacactgaaccacagaggcgggtttgggagtggtgattgagtttgtcgaagctgtctcctccatcatactgggctctgccagtgtggacagcacaagcttagctctctctgtgggtttttccgagcaagatcaagtgccctcttgtgttctgtaggggaggcacacgatccgaggtccttttagtctcagaggatgggaagatcctggcagaagcagatggactgagcacaaaccactgggtaaaaaccacactgaggggatcagagggcttggttctgattttattctctgtaattcctgttgaggtggtggctgggactcacagagcagcctgtgggggcaacatagcttctgtaagcctttgtaactccttcttcccttgattggggccagctgatcgggacagacaagtgtgtggagaggatcaatgagatggtgaacagggccaaacggaaagcaggggtggatcctctggtaccgctgcgaagcttggtgagtctggggcggagcctgggaattcagccatctgtgacactgagacagctagcaagtttggactagatgagtttgatgactgcagagggaaagacctccaagacttagtccctggtgtcaaaactgtcataatctcacccagtctcatggcttcagttgccacctacaaactacaaatgtgttggaagagcacagggctttggagagctgctgagaccttggtttgaatcccagctttgctgctcagtatctgcgtaaccctgtgtaggttactcaccttctctaagcctcagtttcctcatttggaaaatgtgaatagtagctacctcagagttgttgggaaagtaaaatggcatgatacattgcaaagtggttagtatagagcctgacccataagcactcattaaatgttagctattatttactcctggttcagatctttctcccaagttgcggtagctccagctactccctggacatatatgtgagatgttctgcagacacaggcaaacctcgtgtataccaaaccaagcttacctctctccatctcccctcaccttgccccgctgcctgatctttctgttaagagcactactgcccttccaagctccaaagctggcattgttgaatcccctctttcttctgtccatccccagtccaggttgttcttataaccacagccttctgaggggtcattgtgtggggagaaaggaggactggggctgggtgaacagggtatggccagatggggagaacaggaatcaggcatcaggagggggcgggggttgagaaaagagctggggctggggctctgcacactcgctcacctcccgcgtggcctagggcctatctctgagcggtggggaccaggaggacgcggggaggatcctgatcgaggagctgagggaccgatttccctacctgagtgaaagctacttaatcaccaccgatgccgccggctccatcgccacagctacaccggatggtgaggaagtggagggaggggtgagagtgagaactggtttttttgggaaagccccttagatatagctgacaaaacttgttctgcaaatatccagaaggcagccactcttatattcccctcaactctttaagtagtttaagtctctgccagagcaaggaccaggcagcaggaggaagggcaagaaaggtctcttgatgggaatccaggagtggggtcaaacataactcccctgcagatgagggaccacctgggggcggtgtagtgaggaaggcaggctggggaagctgtcagtgctgaggaggaagtggggtggccttgtgatagtgtaaagagttttggtgtcatgggattggtgtttgaatcccagttcctgttttgcctgctataccatgttggcgaagttccaaaactctgagtttcagttttctcatctataaaatagaggaagttgtattcataagatggtttagggtatgagtgaatatcactgtgagaacgggtctagcacaatcccagtaaagcaggtagagtcactggaagaccggctgggcaaggagccacattccctctaagaggtgcaggcttgcatttctctttgtccccctagacgagggcgttatgggattagagtttttctgagacccaggctctcaccctcaggcaggaaactagctgggctcagttttctcctctacaggactgggtggtgattcccttgcctggggctgttttctgtcctgtctttccacagtggcaagctgttgctctgtgccaggcctcggccacactgagcctcctattccctttccccaggtggagttgtgctcatatctggaacaggctccaactgcaggctcatcaaccctgatggctccgagagtggctgcggcggctggggccatatgatgggtgatgagggttcaggtgagctcactgactggcccagctccaggtcctggatctgctccttccttcactccctgtctttctctccttagccttggctcactgagcccttggggcttcctggggacaactcctgaacctggccattccatgtgcaggatcatgactgagatcatagaggtgcaaatgctggacgagctgctgaccctgctctccagcagtgacttgcacccaggactcagattcatccctcagcacaggggcctgcctgtgttgacttgctgtccttagggaggagttgaaactgagggtaaggccatagatgccaggagatgccataccagtctgctaggggaaagggtgtagaagcccttccaacatcacctctctctaggtagtgtgtgtttattttcataggggcccttgaggtccagttcatggcagtgactccggtggtatttgtgacaacagactgaccttgccttatccttgggtaggagctggtgtgacacagcctcacctattctgttttccccctccaactttcccttatcttggtcagtcagatacagtttgatagagaccctcccacccccctctcccaccccctgccacccctggctgggaatcaggaaacctaatttgtataaaattcaagcagatcactaacctgtctggatctgagtttccctcctcgtgagctcaggatgactgctcccatcttcttagccctctctgctccctgcagcctactggatcgcacaccaagcagtgaaaatagtgtttgactccattgacaacctagaggcggctcctcatgatatcggctacgtcaaacaggccatgttccactatttccaggtactcctcctgctcccagtaaacatgcgcacctggggtagggcagtgaaacactccaagtaagagtggatgcaggggagggcctgggcggaccggcaggaaatagggtgagttgtgggtctgagttgcagggtgaagtcataggtgaggacagggtgcattctaggaggtgcattctaggacagggcagtgcattctaggagggtgtcagtcatgaggaagcgatggtttggggacaggtgattagccagacttcattcttgggcagctagaacctgctgggaggtgaaagagatggcattctaggctagaatgaaaagtgcaggatgagatcacagggcagagacagcaggtagagtatgaatgtgtgcactgggctgtgagctgcttctggcctggatgggtcaagagagcccttaaagaggtggacagggagagttctgggggatatgcatcttcctcctctgggcgttggggattgactcctccttgtctgtgctgtgttcatttgtggtaagttaggaaacatctgcctttagcggaaccagaggtaaaaggcgggagagaaggtgaaagggagaggacaaggttgatgagtttgatagttacctgtgaggcccagttagtcttcctgtccagacatttaggtgggctggggctggggctgggaccaggaccaaggaaggaaaatagagatgctgggaagtagggcctggattatcagggctgagggattgatgattaaagaggggcccggctaggccaaggtgaggaataggaggggaccaggaagagaaatcacttgatgagcagttgtcataggaagtgcagttagtaactgttaagctatccggactcagccaattggttccaaactctactgataggtctactgctccctcttctatcctttagtcattcttacagggttgtttcaaagatcagatgagatagtatataacgtgcttactacattgctgtaggtgctcaagttttaccacccaccccctcagacatttacttaaaatatattctgggggctgggcacggtggctcacacctgtaatcccagcactttgagaggccaaggtgggcggatcacttgaggtcaggtgttcaagaccagcctggccaacatggtgaaaccccgtctgtactaaaaatacaaaaattagccaggcgtggtggcgggtgcctgtaatcccaggtactcaggaggctgaggcagagagaattgcttgaacctgggaggcggaggttgcagtgaggtgagagcacaccactgtactccagcttgggtgacagagcgagactctgcctcaaaaaaaataaaaaaaatattctggggaaccattggttcctcaggaccttagaggtgttaaagatgtataagtttgttgggattggaaggacctaccttctgtggtcaaataagttttgggagaaacaaattgatttcttgattgcaggacttctcagagcctttaatttgctaatgtgcattgtgactccccaagggagagttacaatatgcaatattccttggattcctttgaccaaagaaatcttttcaagagcaccccaacccagctactcaggaggctgacgtgggaggattgcttaaggccagcctaggcaacagcaagaccttgtccctaaaaaggaaaaaaaaaaaattacaaaaaaagagcagctcaagaaactataggaaacactttggttaacacaaatctgttctctgtgctgccttcaaactaatctataagaaataatgaagtccatgttagggaacacagataacttttctcaaatgagaaatctcaaatccctgtactttggagttaaaaaaaattattctagcttttccaacagtagagacattaggaaggccaactttggtgggcagattggggattttcctttgcttctgatgactctcttgtgccctttctcctctcaggtgccagatcggctagggatactcactcacctgtatagggactttgataaatgcaggtttgctgggttttgccggaaaattgcagaaggtactggaggtggggggtgggttttatctggctttgttctccaaagatccccagttgggagattgagtggggttcagacaggactgacaacaattttcctctcaccaagtgacctcagttctctgccaccactggccttggtggtggtgggccttggggtggaggcagaagggcacgtgggtcgtgttgacagttttgtattacctgtgtttttttctttaatagctatcatggcttgcttaggctgtatgcctgtttctgaggaatttatgaagcagttgtcctttggacaaatctataactttcttttcctagccaattatactcaaagaactaggggattatagagaggttaggcatattttgttgggtgtcaggagatgctgaacagagggcttgtatatctgtacattgctctttctccactgtgaggtccatcctgccttaatttgggttcctgcagcctcagggcattctagggctctcttagatcctgctggactgagtcccctctagaaaagaagcaggaacaggctaaccaacagcagactgttagaagttggtggagggcactgacaggagtaccagccagctgttcagctaggatcctgggtccccagagctgacagcctcataggaacagacttacagtaactcagtgtgagctggatgcatactaggtgccagtgcattcctttagtgggtgctgccctcccttcctgagttgggggcctgagtgagcacctctgtacagggcacccctctacagagggaggtagctggtatgtttgtcagtggagacttgcttctccacctgccacgaggcgggcatccatccggcagtagactcctagctcagggtgctcctgtgatggctgccttgcaacagagagaggatagcccaggaatggcagctccctcctttctcaccagtttccttcttccgtcctccctaccccaggtgctcagcagggagaccccctttcccgctatatcttcaggaaggctggggagatgctgggcagacacatcgtagcagtgttgcccgagattgacccggtgagttgaggtgggagtgaaggtggggagctgctgggtgaggagtggtcctttcccactgtggatgggactatcccatcaaaccctgcatagattggatactattttaaatgaacttagggtctaagaagcattctgcagaatgtctgtaacaaaaaagttctttggtcaaatgccgccctctgtaattggcctgtaatctgtatttatgtatagtaaattagtttaatgtacgtgtgtgtgtgtgctgtcccctttctattttattttttatttttttgagacacagtctcactctgtcagccaggctggagtgcagtagcgtgatctcagctcactgcagcctccacctcccactctacctcccaggttcaagtgattctcgtatctcagcctccccagtagctgggattacaggcgcgcatcaccatggccggctaatttttgtatttttggttttgccatgttggccaggtaggtcttgaactcctgacctcaagtgatccacccaccttggcccaaagtgccgggattacaggcatgagccaccgcgcccagcctgtcccctttctttcagttaatttcagttcagtcatgtttctgttcatttccctcacttctgtctttccttcctctctattgttgcttaacgctttttccttcctcttctctccttgccctttacaaatgtctcctattttcctccctttttttttcccctttcctgagtctgtctactgtttcttggcttgagggcgagtaactgggatagagtgggttggtcataggaaactcccgccttcagcactggagaggctaggttggcccccatatccattttctgctctccacccaggtcttgttccagggcaagattggactccccatcctgtgcgtgggctctgtgtggaagagctgggagctgctgaaggaaggtgagcctggggggaggctggaagggcaagggcaggggacggggctggaaaggaggtggcccaggaaagctttttgccccagagagaacctgcttcctggaccctgaggcctagacaggccactgatgctcccgtctaaggccctcaacctcattctgccattgagccctttaatgatgtcccatccaccttccttgaactcttgaaaagatgttgtgttccaaatgatttattgaataatagctacttttaaaaagttaaagacaaatcagacttaaaattggagcactgactggcatgtgataacctgggggacatccctagtcaacataattctagctagaagaaaagaggcctggcttcttagccctggcagccttatgccaggcagttggatggtttctaccggacattctgaagtagctcaaggactcccattgctaccatggaattcctggcattgggtcctttggagctgagaggagagcaggccccctatgttgctggctccaatactcgagtacccagtgcaccctgtgtgctgggcacttggcatgtaggcccctccagcatctctacaggagtacctcagggtctgggcgtccttgtctgtcttccttcctggccccagtacaggttgctgttctcctcttatctctgtccttgtgttcttccctccaggttttcttctggcgctgacccagggcagagagatccaggctcagaacttcttctccagcttcaccctgatgaagctgaggcactcctccgctctgggtggggccagcctaggggccaggcacatcgggcacctcctccccatggactatagcgccaatgccattgccttctattcctacaccttttcctagggggctggtcccggctccaccccctccaagctcagtggacactgggtctgaaaggaaggagtcttttgcttcctttctcctttttacaaaaacaaacatagaagaaaataaatgcactttatccactccccaattggactgcattatcaaacacatgtgctatgtacatcctcagtgcacctgccagcagatatcctggagggctcatgagtgaatttagtccaagatttaaagccctgcccccaggtgctcagcctgtgatctgtatccactcagcatgcacttgggcagatgatttgtctgtgtgctacccttccccccatattaccatacatatgcactgtgtggctgccagtta

SEQ ID NO: 6138 - DNA, 293 bp, Homo sapiens
ccgggcacggtggctcacgcctgtaatcccagcactttgggaggccgaggcaggtggatcacgaggtcaggagattgagaccatcctggctaacacggtgaaactccatctctactaaaaaatacaaaaaattaaccgggcgtggtgtcgcgcgcctgtagtcccagctactggggaggctgaggcaggagaatggcatgaacccaggaggtggagcttgcagtgagccgaggtcgcaccactgcactccagcctgggcgacagagcgagactctgcctcaaaaaataataaa

SEQ ID NO: 6139 - DNA, 3451 bp, Homo sapiens
gcgggtccgcatcatcgagccgctgctggtcttcctcctcgcctacgcagcctacctcactgctgaaatggcctcgctctccgccattcttgcgtgagttctgggggccttgcaggcagatagctgggagggggcactggagatggttgcccctcatagggacacaggcaggaacttcaggagtccataggtttccctgagcccttgtggtagtgggagcctcagactgtcctggggagtcagtaaacctcagcaatatttcaggagctgcccccagagctgtcctcagcaccctgaaaccctctgggtgtaggctgggctggaagtagactttaaggcctggggccaccagctctggaggccgcagcactccagaaggtgcattagagagcccgctagtcagagcacgttccttccaccttcccttccaggagacactgaatgggaagcctggagatctggactcttagcccagcactaccattcaagtcttcaggcctccctgggcttcagctctgagagtctgacatcctgtaatgggcaatgccccctcctgcagtatgctcaaaccctggaggctgagccccctggaacccttccccacttgccatgtctctccatcctctcccagggtgaccatgtgtggcctgggctgtaagaagtacgtggaggccaacatctcccataagtcacgcacaactgtcaaatatacaatgaagactctagccagctgtgctgagaccgtgatcttcatgctgcttggcatctcagccgtggactcttctaagtgggcctgggattctgggctggtgctgggcaccctcatcttcatcctgttcttccgagccctcggtattgctggcaccctctgctttcccactctccttcctgtcccgcccctccctgcagctcatctccctatctgagtccacatctttgtcaattcctaagcctcctcttgttgctcacctgtcccagcccctgttagacctcagcccagatacttggtcccatccggtcccacgtcctccactcccaacgctttgctcccactggcctccctcccgctgtaggcgtagtcctgcagacctgggtgctgaatcagttccggctagtccctctggacaagattgaccaagtggtgatgtcctatgggggcctgcggggggctgtggcctttgctctcgtcatcctactggataggaccaaggtccctgccaaggactactttgtagccaccactattgtagtggtcttcttcacagtcatcgtgcaggtgggagtgcccacaaggctgggtagggagagggttgggcaggccctgggggagtcttggagcctgtgggacaggggcttctcttcccgctgggagatggagggccctgacttcccagaccttgagtgcagtggggtaggggtactgaagctgaagcctcattacggggagagaaaggcagcagggaactgaataggaatagggcagggctcacctcctgcctgtccatagggcttgaccatcaagccactggtcaaatggctgaaggtgaagaggagtgagcatcacaaacccaccctgaaccaggagctgcatgaacacgtgggtatcagaaccccagccctcgcctgtccctctcgaccttctcctattttgggcagagtcctgatccagtccccctacccaccccccttctagacttttgaccacattctggctgcagtggaggacgttgtggggcaccatggctaccactactggagggacaggtgagggagctgccccgaggctccttcagcagcagcagccccaccagccagggaagcatgggggatgtgccacacttctgagaagggacagagccaggttcaggctgggtgacctctgccctgaagcccttcagtggcatcccagtgctctcaggttaagacaaggctccccagtgtggcctgcttggccctgcatggtttggcaactgccagactccagcctcatcatgctctgctctgtctttgactgtctgcctgctaattccatggaccctgtcttagatcctcaggacccaccatgctcccccagcctggccactgggaccttctctgtactagaacactccttcacctccctctcacttactcagcttcgattcatccttcacaactcaccataggcttcaattccttagggaggacttccctggcctccctggctaggacgtatctgtgtcatattctctaattatcctttgtagttcttgtcatggttgcaattttacagtgatttgtaataatttcagttactgtcagcctttcccatgacattgtaaattccatgagggcagggactagccttgagattctctctggctgaggcccatatctaaaaagccaggccagtgctgacggtgtccttgccccgtctgaggaagggccacctggccaggccttgggaatgggactcagggccgggcctggcatcctctgtaggtgggagcagtttgacaagaaatacctgagtcagctgctgatgcgacgatcagcctaccgcatccgggaccagatctgggatgtgtactacaggcttaacatccgggatgccatcagctttgtggaccaggtgggccagcagcttccaggtgggccagtggtgggtgggcagatggtcagcagagcaggacagaaaggggtggcaagcaggctggccctgagcagggagttgggaattcctagctggctccatggtctggtgaagtggcagcggcaggaagcagctgggtctggtgctgacattcagagtctggcaggcagtccagagaggtgggaaacagctggactctggggtcagctcaaccattatcacttccaagcttgtgaccttgggtaagcacactctctgagcctgtttccttagctgtaagaaagcaggcataagaggctgggcacggtggctcacgcctgtaatcccagcactgtgggagcctgaggtgggtagatcacttgaggtgaggagtttgagaccagcctggccaacatggtgaaaccctgtctctactaaaaatacaaaaactagccaggcatggtggtgcatgcctgtaatcccaactactctggaggctgaggcaggagaatcgctaaaatctgggaagcgggctgggcacggtggctcacacctgtaatcccagcactttggggggccaaggcgggtggatcatgaggtcaggagttcgaaaccggcctggccaacatagtgaaaccccgtctctactaaaaatacaaaaactagccaggcgtggtggtgggcacctgtagacccagctacttgggaggctgcggcaggagaatcgcttgaaccctggtggagtttgcagtgaggttgcagtgagctgagattgtaccattgcactccagcctatgtgacagagcaagactgtgtctcaaaaaaaaaaaaaaaaaaatc

SEQ ID NO: 6140 - DNA, 2100 bp, Homo sapiens
ccaccaaccttgcagctttttaagagcactaccaagaaccaccattggggaaatggttcttattcattgtttctgttggaatgtggtcttactttctggattttaggaattcaggttactcaatataaaactttgagaaatcagtgtgacttagtccttcaccttctaatataaagtgaagatttctttacagaagaattcatgtccttactgttaaagatgtaattttattttcaaaacatccataatatggctttcagaagcagttcatttttccaagattcctcacattatactagataaataataggcgctcagttaataatcttgggttgattgaattaatctagtttgcagagtgaggtgtacctaccaactttcgtctgctcccaagtgcactctgagaagtaaaatgctctgggaaatggaacaagaattgagtggatgctgactctgtgtgcccacctcctcaattgattgataatggctgaccttgggcaagtcacttctttcaatgcctcagttccccatctgtcaaatgggggtaataatactgacctacctcacaggggtgttgttgtgaggcactgtgaatcaagttaatagaatattttagggtcctctatggaggatgccttgagctggagtttaagcctgacacacaggctttggtcctcactgagctgtctccaagactggaactacttagtgactcggcaaattctctgccccccacccctcatcaaagctgctagttcagatgttgacagtgttttcatgaatattggcatcttactagtccagacttaattaggatgttgttggggaaggcatttaagattttctatgtcttgcaatcacagagggaggccatttcagattcaagaacattggattagggaatcgtgaggcagggatgctactgcttatttctctctgcaggttggggattaaagttccattctccatgggtttgaagcagactcagactgtctcaggatcaaagcaaccttcaatggttttgatttatgtcatttcttaccactccccaaactgatcccaggacagctgggtgactgtacccttttgtggtatctgtaccctctccttcctcatagggaccagctgattgaataaatgtgaccaccttgtttccacccccctcaaaaagctaccttggaattatttttcctagaagtgtgtataacactcagaattggacattgatccttaaagcttcatccgattccctgtattcagtatctgtcatctctttctcagtgtctgcagtctgaacctaaccttgaccttttttccctctggtttgagaaaactttggacactatttctacttgcccaggtgtgggctcaagagccttactctttccatctcagtttagaggcacagccagcttctcttcccaatacagctctttctcctttctctctccttggccctagaattgtaatccatgaaaaagcacaaggtcctggctccttgcagtcacattctggttctctgtgttttgtggactctgttctcactgttcacccagcactggcagtaccagacggttctgaggagtcctggggaatggagagaccacagtctgacgtcctgccaagtagccagtagtttacttgcccatggtccgctggctttcccaccacttcctacaggatgggatctaagagactcaagagctggatttctttcagcactctgtaccatcccgagtagcagacaaatcactttgtagccagatttctgaatggaaatgagaaactgaattctctgtggactttcaggtttatgggggagttttggttgtgtttcttggttttatttcagacaaatgtgtctgcctttgatttttaaataaaagcataagtggtctatatatatgttcaccttttaaatgtaaatgtttaaaaagtaagcatttatgtgtttccataactgatatctgatgcagacctcattctctccccctcttctaccctcctattttccctcttttcatactcttgtattggttctaataaatggttgcttttcaaaaaaaaaaataaagaaaattataaaatagaatgaaagta

SEQ ID NO: 6141 - DNA, 1363 bp, Homo sapiens
ttgactcggaaatcttcatcccaccctccaaaaggttactattggcattctttttaagcttctttgttcatatgatagttcgggagaggaacagagattcagatagagagacagcggaagacacagaaagagacaaagagagaaatgccttctcctctcttgagttccgtgaatacaaacactttccctactcctctttgcagtcgtagacccgttgcagggagattctcagtgccagttgtctggattttgtgaaggtgctcagggtatatagtgcagtggttcagaattgggggtgactttgccccccctccccagagacatttagtgaggtctggagaaattttgggggctgctacagacatctagtgggtagaggtcaggggtgctattaaacatgctgcaatgcatgggacacccccaaacaaagaactacctggcccaaaatgtaaatggtgctgaaatggaggacccctgatctagttggaatggagacagagcattactggaacatagtgagttgccaggtttaactcatcttcacataagtaccattgagcaccaactgtatacagaacatagtgccatgcatttcacagaacgcctggtttaaggagcttcagtctataatgggaagaggaaatgggaaagcagtgcttatccaggagacactgttggacaccatccatatgtgttctgaaccaacatcacaacagccatattatgagacaggcatgattcatacccattttaaagataacctgaagcccaaatcactcaactataaggtggtagaggaaagatttaaacctggagctaagtgattccaccacccatgttctcatgatgctcttgattaggcagatgaacaaatatacaaataattatgatacaggacatagtaagagcagtgctacaagagagatgcaaatagagcttagagcttagggtgggattaacagactacatagaagaggtggcttttgacatgcattttgggtgagctgtaggatgaggggaagaagtttcagacatggagatgcatgaatgtatatacacagagaggccaggcgtggtggttcacacctgtaaccccagcactttggaaggttgtggagggcagatgacttgagcccaggagtttgagaccagactgggcaacatggcgaaacctcatctctacaaaaaaatataaaaattagccaggtgttgtggcatgtgcctgtagtcccagctacccagtaggctgaggtgggaagatcacttgagcccaggaggtcaaggctgcagtgaactgtgatggcatcattgtactccagcctgggtgacagagcaagtgaagaccctgtctcaaaaaaaaaaa

SEQ ID NO: 6142 - DNA, 4018 bp, Homo sapiens
tagtacagacgtgtaaatccttccaccccgacccgcacacacacccacactgctgccctggcgggggccatgggggtgatgaatgaccctccaacagccccacatgggttgtttctgtttctttggcttttctcgctccgcagtggagggtttactaggatttaagcttttgagtgcattgagaaccaagacagggcctggctccaactctgtgggccagaggtgggggactgctaggtcgagtctgcagcttcgccagtttcttggttgggacactcctctggcagccccagcaccaccacaaccccttgcagtgtgccccagtcccctggattcgctggactgcaaaaaggagcaccagggaaagctcagcaaaggctcaggaggcctcccgggtcctcgggagatgaagcatccgtgcctaggaaaaggggacagagggcaaggagagaagtgagagctacaattccagcattggagaagcgaggggcggggcgtcaacggcactgcttcaggacgcgcttgctgaaacgactccaacagctagttcacagcccagctttgtacgttggttaccatagctactgctgtcactgtagctgctcccgtagggtcgttgattcctgaacgtatcacatctcacctgcccccttcctcgtgggacgtgtcaagttgactttaaagcctaaggtggcttgtggggactgcaccagaaagtgtctaaccttgtgttccccgaaatcctttctctgacttaggaaccagcgccccctgctggagaagttttttcattttgttagccgacttctggtagcttagcaaagagaccagctgactgtctctcggcccagcccaccacgccgagtagcttgtgtggatgcagtcctgtgagggtgtgcataaccgttcccaggtgtacgcacgcgcgcgcgcgcgcacagacacacacacacacacacacacacacacacacacacagtaaccacgggtaggcaccaggggctttgtacattcaggagctgcagagaggaaaggtctcccatgtaccagagaaggaaaagtctgatcccgaaacagcttgaacgaaaggtggttaacacgtgaccaatccccatggcagacagcgggctggtgaacaggaagagcacagaatctctgtggggcgatgctgcagcggctgaaaccacgtcaagtcccccagagcccggcattctatgtaagcatccacctgtgacgccgtggagcaggatcttcattcatctcaccagagcaacagcccagtcctgaggatgggagggacgtgacttagccttgggattccacgctcgccgccctcccttggccgccctactccccagtttcctggcgatgagccatttattgtgtctcacaccagcctcatttccaactccgacttcctacttagaatgtggcagtggctttgtgagtgagaatcctgatgagttttccagtggcctctgcagaagctggcccccttctaagggcatagctaacccccttcccactcctgagtcactgaattcgaggagggtggggcagggaaagggctggcccccctgctgaaatcttgattctgcatttgaggaaggtcagggtgccgctgggggagcagggagcggggagggaggaagaggggaatgcacatcttttgcgccactattaaggcacctgtcaccttacatctcaatctggaatcaaagtgccctgggttgagaagcagacctgggctctggtcacactttggtcactcattagctctaggaccagtcactaatctctgagactccattttctccagggaaacgaggcttgcccagatagactaacaaccctttagtgctccaagaagtgagaatttccgaaaaagatctgccggcccagagcactccctcttgccctaatcctggcagggtctggatgtatttacccaactctgatcttgcgtgcagggatgcttgctgatggatgaaagaccacaataaaacaagattagcagcaaaacaattttaattgtcagtgaaaagcaaacatgtttgtcagactctcctgtggagtcatttcaaatggtaactcttctcttgtaccaggaagcagctgtaggtggggtaatgggatctgtctcctggtgcagaggggcagcttatggcggcagcagcttcaacaagcccgtcccacggccagccctaactgggccaagtgcaagctcctgatgagctgctgggcctggcagcgttccccacttcctagtgccttgctcccctggaattccacagccaatcaaccacagcagccgtgtcctccttgccagaaataacatcattcgtacgtcctgcctttgtaaaaatcaagacccagttaaccatcacccacttcttgcccctgattgatggggtccctgagtacaagcgtcctgtgcaatcccctccctcctaccgctttcctagctaagccctgctagccccacaaatcagaatctgggtttggggtgctggagagatggtgggccccagctcttccccacatagcccacgctgctcagggcacggtctccaaccaggctcgagattgcctgcctgcccgctgcagccgcagggccccaccctgtggaaaaggaagcttcccccactcaactgcactgtccttttctgctgtctagtctgtgctaagggacactacttgtacacttttcaaacggtgccctaaattggaagagaaggaggggccaggaacacagccctctccgccgtctttctccacctccacttcaccactcctgctctagacttcttgtcttgcatctttgataacttggagtcataaccgagtggatgtcggaataaatgagagatttgaagtagaaatcccacagggtccttcgttcttcaccgggggaagtgaagggggctgttggtgtggatttaagggtgaagcctcctcttcaacacccagagcgtctgtgttccacgctctccctgctcccacggtagcaaacctccaccttgttgcctggcatgcccccattgcctcagtcagagttcaatcggcggagatttgctgtttgttgggaaagtggctgaagggccctgctgaggatagtgagtttccctgtggggcaacccaggcctcggcccctgctacctgcccttcccctcttcccaaccctgcacacacaccttccaggctggtggtcttcctgcctgtgtagctcagggtaaaatcacttctctgaagcctgaggagatcatgtcacatggccagccctttgttacaggggcagcaagggaagagaggggaattgggaccagatccccagtgcagcccagcagagactacagaagtggagagggatggagggggactggagaactgggaactagctttgtgtgtaggagggagaattcggggatgaagtgagaacgtcttttgtgtgtgtgtgtgtgtgtgtgtgtgcctgcacttgtgcacatgggtgtgtacgagacagctgctctctctccacctcagggcctcagggcgagccctgactgcagcttgggggtacagcaggcagcctgccccagcagtccagcacccaggcctccagccctgcagcagccttccctagcaccagtgggagcacagcttccttcaccctcggcccagggagcagttggccacagctctgtcaccacagctgttctatggaatcagaaaccagaccctgaggcacactcatcattgcatccatcccaacctccagccatctcctttgccgccgcagggcagccagcccggactcggcctccagcctctcacccggcacatctgcttggcctcatgcttgctggcaagtcacggccctgacccagctcttctccctggtggccctcaactgccttcagcctcagctccagctggggaggagggtggaagagcagcttgagtcagactgaggaatgcaagagaggtgctggccgtccttgtcactgttctttggaaaatgcctccatcagtgcct

SEQ ID NO: 6143 - DNA, 4014 bp, Homo sapiens
tagtacagacgtgtaaatccttccaccccgacccgcacacacacccacactgctgccctggcgggggccatgggggtgatgaatgaccctccaacagccccacatgggttgtttctgtttctttggcttttctcgctccgcagtggagggtttactaggatttaagcttttgagtgcattgagaaccaagacagggcctggctccaactctgtgggccagaggtgggggactgctaggtcgagtctgcagcttcgccagtttcttggttgggacactcctctggcagccccagcaccaccacaaccccttgcagtgtgccccagtcccctggattcgctggactgcaaaaaggagcaccagggaaagctcagcaaaggctcaggaggcctcccgggtcctcgggagatgaagcatccgtgcctaggaaaaggggacagagggcaaggagagaagtgagagctacaattccagcattggagaagcgaggggcggggcgtcaacggcactgcttcaggacgcgcttgctgaaacgactccaacagctagttcacagcccagctttgtacgttggttaccatagctactgctgtcactgtagctgctcccgtaggtcgttgattcctgaacgtatcacatctcacctgcccccttcctcgtgggacgtgtcaagttgactttaaagcctaaggtggcttgtggggactgcaccagaaagtgtctaaccttgtgttccccgaaatcctttctctgacttaggaaccagcgccccctgctggagaagttttttcattttgttagccgacttctggtagcttagcaaagagaccagctgactgtctctcggcccagcccaccacgccgagtagcttgtgtggatgcagtcctgtgagggtgtgcataaccgttcccaggtgtacgcacgcgcgcggcgcacagacacacacacacacacacacacacacacacacacacagtaaccacgggtaggcaccaggggctttgtacattcaggagctgcagagaggaaaggtctcccatgtaccagagaaggaaaagtctgatcccgaaacagcttgaacgaaaggtggttaacacgtgaccaatccccatggcagacagcgggctggtgaacaggaagagcacagaatctctgtggggcgatgctgcagcggctgaaaccacgtcaagtcccccagagcccggcattctatgtaagcatccacctgtgacgccgtggagcaggatcttcattcatctcaccagagcaacagcccagtcctgaggatgggagggacgtgacttagccttgggattccacgctcgccgccctcccttggccgccctactccccagtttcctggcgatgagccatttattgtgtctcacaccagcctcatttccaactccgacttcctacttagaatgtggcagtggctttgtgagtgagaatcctgatgagttttccagtggcctctgcagaagctggcccccttctaagggcatagctaacccccttcccactcctgagtcactgaattcgaggagggtggggcagggaaagggctggcccccctgctgaaatcttgattctgcatttgaggaaggtcagggtgccgctgggggagcagggagcggggagggaggaagaggggaatgcacatcttttgcgccactattaaggcacctgtcaccttacatctcaatctggaatcaaagtgccctgggttgagaagcagacctgggctctggtcacactttggtcactcattagctctaggaccagtcactaatctctgagactccattttctccagggaaacgaggcttgcccagatagactaacaaccctttagtgctccaagaagtgagaatttccgaaaaagatctgccggcccagagcactccctcttgccctaatcctggcagggtctggatgtatttacccaactctgatcttgcgtgcagggatgcttgctgatggatgaaagaccacaataaaacaagattagcagcaaaacaattttaattgtcagtgaaaagcaaacatgtttgtcagactctcctgtggagtcatttcaaatggtaactcttctcttgtaccaggaagcagctgtaggtggggtaatgggatctgtctcctggtgcagaggggcagcttatggcggcagcagcttcaacaagcccgtcccacggccagccctaactgggccaagtgcaagctcctgatgagctgctgggcctggcagcgttccccacttcctagtgccttgctcccctggaattccacagccaatcaaccacagcagccgtgtcctccttgccagaaataacatcattcgtacgtcctgcctttgtaaaaatcaagacccagttaaccatcacccacttcttgcccctgattgatggggtccctgagtacaagcgtcctgtgcaatcccctccctcctaccgctttcctagctaagccctgctagccccacaaatcagaatctgggtttggggtgctggagagatggtgggccccagctcttccccacatagcccacgctgctcagggcacggtctccaaccaggctcgagattgcctgcctgcccgctgcagccgcagggccccaccctgtggaaaaggaagcttcccccactcaactgcactgtccttttctgctgtctagtctgtgctaagggacactacttgtacacttttcaaacggtgccctaaattggaagagaaggaggggccaggaacacagccctctccgccgtctttctccacctccacttcaccactcctgctctagacttcttgtcttgcatctttgataacttggagtcataaccgagtggatgtcggaataaatgagagatttgaagtagaaatcccacagggtccttcgttcttcaccgggggaagtgaagggggctgttggtgtggatttaagggtgaagcctcctcttcaacacccagagcgtctgtgttccacgctctccctgctcccacggtagcaaacctccaccttgttgcctggcatgcccccattgcctcagtcagagttcaatcggcggagatttgctgtttgttgggaaagtggctgaagggccctgctgaggatagtgagtttccctgtggggcaacccaggcctcggcccctgctacctgcccttcccctcttcccaaccctgcacacacaccttccaggctggtggtcttcctgcctgtgtagctcagggtaaaatcacttctctgaagcctgaggagatcatgtcacatggccagccctttgttacaggggcagcaagggaagagaggggaattgggaccagatccccagtgcagcccagcagagactacagaagtggagagggatggagggggactggagaactgggaactagctttgtgtgtaggagggagaattcggggatgaagtgagaacgtcttttgtgtgtgtgtgtgtgtgtgtgtgtgcctgcacttgtgcacatgggtgtgtacgagacagctgctctctctccacctcagggcctcagggcgagccctgactgcagcttgggggtacagcaggcagcctgccccagcagtccagcacccaggcctccagccctgcagcagccttccctagcaccagtgggagcacagcttccttcaccctcggcccagggagcagttggccacagctctgtcaccacagctgttctatggaatcagaaaccagaccctgaggcacactcatcattgcatccatcccaacctccagccatctcctttgccgccgcaggcagccagcccggacgtcggcctccagcctctcacccggcacatctgcttggcctcatgcttgctggcaagtcacggccctgacccagctcttctccctggtggccctcaactgccttcagcctcagctccagctggggaggagggtggaagagcagcttgagtcagactgaggaatgcaagagaggtgctggccgtccttgtcactgttctttggataatgcctccatcagtgcct

SEQ ID NO: 6144 - DNA, 8925 bp, Homo sapiens
gttggattagctaagaaaattttattttgctccgtgcgttcaaggagctcacacacatgcacatgcatatgcatgcacacacacacatacacacacactcacatgcatacacacacggctaatactgctcaaggcatggctcctgggcacagagttctggggccagaattctgctctgggccctcctcactctgtcatctcctgcactgcagtccagggtccagatagatttccgggatacagcaccttcacacctccaggccaggacccttgcttagtcccagtgcctgcaccaggtcatctccgagcccactcttcaacgtccttctcactgcagggacagagcagggttggagggggttgatggggttcaggtgggcagtgggattgtggggggttacttacaagacttgcggttgccgcgggaacgcttgcgttccctagcagctaaggcacgaggactgctcttggtcactgactgcaccagaaggtccatgatctcatctgatgtatcactgggtaaactggagcctgggggttcttctggggatgcagtggagggccccactgtgggcatgattggggagctgctctggaccatgcctgaggaaggccagatagcaaagtcaggccaaggtggcactggagcccattccccacagctgctatgggcctcacctctgctgcggcgattgtgtgtggtgtcctcaggcctgctggtcagcagactcttcatactagcatgactgtcagcatctccccggcctggcccgctgctcactgctactgggacagaggggttgctgggggcttccccagccacacctgagaacttctctgtctggagaaagaagaagggtgagctgggaggagcgaaggaaaccaaggaggtggcagtcaagactaagacctggaagggcacccacctcggtgatcatgcgtccccgggtcttgttgcgctcacggtatgtggcctgcttctgctgctgctgtagcactcgttcccggcaagtccgatactcaagcgcaaattcccgcagcgtgtggcagaactgcatgatgcgcacttcacgggccgcctgcggggtgtagcccaggtagagcaggaaggcatggaacctaggcaggtcagagtagggagggacagtaagtcctgcttattgtctgagggagggtggtggccgtcctgcctctcttgggtccatgcccctacctattgcagacacggcggtgcactatccttagcatggcaacacggcgggcacactggtccaggaagtgggtgaggcgggcacgcagggctggggccagctcatgcttggccaagctccgcaggctctcctcggctgcccggctccggcgctccagctgccccaggttctcagtcagctgttcaaagtccacctgagaaagcaagggggtgcacatactgtccccccacaccctgtagacaagacatggcccgaggctgcttctgggccagagtggccagcttgggccctaaggacacagacatccaaatctcatagactagtgcaagagacacaagtccatctgatgtgaatggggagcagaaggtttactgggggaagtggcagttaaacagacccaaagactgagtaggtgtggccaggccaatagaggaaagagcatttctggcagagggcatagctcacacccaggtggctggagcaagccctggcacagcagcccaaatggggagaagggggaggagccaggcccaggaagcagcgctcctcatgccttgtccggccttggttgattctggcaggtgctaaccttggcacagcgggtcagggcagggatttctgaatagaggtcagaggactcaggccgggtctggagcactagggagcagagatggtgtagcagtgactgtcgacgcaccgtgtccttcacctctgacaccttctccaggtagctcagctcaaagccgctgctctgaaaggaccctttctgagcctgggcctggttggctccagaaccctgactccccctagtccccatgtactctcactcacctgggagccattgaggaagttgcccaccgctaggagggtagccaggatgcagcggaaggtggcattctgtaccagctgttccatacccactttcaggtcaaacagtggctcagcaatttcctggtatgggagaccagggactctcagactacatggtcatgatgcttacctgtccctactgactgtcccactccaagacccaggtacccgctccatgctgtcatagtccagcttgaaggcccagagttgtagacgagcagcgaggccgccaatggaggcaagagtcatcaggaagttctcggctgggcccaggggtatgtcagggttggccagctgggcttcctcaatcttctgccgctcttcctccgtgggcatcatggtcagtagcttctgaggatgtagccagagcctgacatggccccctcaatgcaggcctgaggcctgaggcattggtcttgacccctcagtcatctaggggaggccccagtgtctggggactgccctgcagaaatgccaagcccatgcccaccaccagagggacaggaaatgcccacctaccaaaggagaaggccagacctccccccaacacccatagctgggtgacctcacctcaatgccatccttgctgacagcaaactcatcaaagttgagcagagcagccttaatgacatgcacaggtggcagtgtggttaggccgatgttgatggcgttgctgcgcttggggtccagcactgtggtcattgtccggcggccctctccagctttctgcatggttgggggaagggcagtgtaagactgaggaagggggcctgacgcggtggctcacgcctgtaatcccagcactttgggaggccaaggcgggtggaccacgaggtcaggagatcgagaccatcctggctaacatggtgaaaccccatctctactaaaaatacaaaaaaaattagctgggcgtggtggcgggcacctgtagtcccagctactcgggaggctgaggcaggagaatggcgtgaacccgggaggcggagcttgcagtgagctgagatcacaccattgcactacatcctgggtgactgagcaagactctgtctcaaaaaaaaaaaaaaaaaaaaaaagactgaggaagggactagctgggacagcaacctcagagggcactccaaggccctcctctagattgccaaatgatcccacaactgacaaactggcaacctggaatgtgtaagtcatggggatgagcttagattcttttgagacagggcctggctctaccatctaggctggagtgcagtggtgccatcatcgcccactgcagcttatcttctgggattttcctgcctcagcctcccaagtagctgggattacaggcgtgtaccaccatacccaactatttttttttttaacatttttttttccgcctcccaggttcaagcaattcttttgcctcagcctcccaagtagctggtattgcaggcatgagccaccacgcccagctcattttcatatttttagtagagacggggtttcaccatgttggccaggctggtctcaaactcctggcctcaagtaatctgcctgccttggcctcccaaagtgctgggattacaggggtgagccaccatgcccggctaattttttttttaacatttatttatttttatttatttagttatttttgagacgaagtcttgctcttgtcccccaggctggagtgcaatggtgcgatctcgactcactgcaacctctacctcccgggttcaagtgattctcctgcctcagcctcccgagtagctgggattacaggtgcccgccaccacgcttggctaattttgtgtttttagtagagacggggttttgctaatttgaccaggctggtctcgaactcctgacctcaaatgatccacctgcctcggcctcccaaggtcctgggattacaggcatgagccactacacccagaccaacttttagtagagataatgtctcactatgttgcacaggctggtctcaaactcttggattacaggtgtgagccaccatgcccggccacatttagattctagttggggcactgctgatcccttgttaggagaccttggacaatttcctactcctttctttgccttggtttccccatgtgggaagtgagtgactagctccaacaggtcagatccttaagctctgattccctcctgcctcccttggggctaccttgcagatgagtggatttaccttggagggcagcacctctttggcacgagactcaaagaggtgttccagtcgggccgtgtccactgagacagggtccagtgaagcccagagggtggcgcagggcccaaagcggcttgcagagactccatggcccccagccagcttcagctcacgccagaaaagttttactgtcttcctcttagtggggagggctgagctgtcaggcactgaatggggaagaggggcagccagaggtagaggtggaggtggtgggaaggggcctttgatgggtgggggaggtggaagtgggggaggggggggtactcccgagagcaggggcagtgggggtgagggagctgggatgtctttcccagcctccacagactctacattcagcatgtcctggtcttcatcctcccctagatctgaaaagtccaggtccccaatagagagcctgggtgcacgggtagggagctcccagatgggctcagccttggggcttgctggtatcagtggctccttgggctctggtgcaaggcttcgctgggcccggagcaggacacagggggcagggctctggggtgttctggctgcaggggctgtctctggggagtcccagagttgccgggcatctaaagaaagggaaggagctgtcagtgccatgccccctgtggggcaacaaagcaacaggcaggctctgcctgctcacccacctactcacctgggtgtccacccgcctcattgggcatggccccggcaagtgtctctgcccggccctgggccagcgcaacctgcttctctgtttctgctgccgccacattctccaggaaccgggctctgagggaaggtgcttgtcactgacagcgtctgacacaccccagcccaggtgtacatgccttgctgagcccctggacaccacccccaattgcaggcacgcacagacacacagggaacagtccatgcgctgagcagaccagaaccacaccccccccaaggccagcccctcttcagtcctccacatctggggaggattactaccaacccagcattcccaggtgaaaacacagggagaggatctacttaacatctaacttgcaacctcgttcatgttcactgtcctggtttttttttggttggttttttttttagagacagggtctcactctgtcagtcacccaggctggagtacagtggtgtgatcatagctcactgcagcctcactctcctgggcttgaccctcagcctcccaagtagctgggactacagacatgtgccaccacgtccagctgattttttaatttttttgaggagacagggtctcactgtgttgttcaggctggccttgaattcctggcctcaagcagtcctcccacctcagcctcctgaagtgctgagattacaggtgtgaatgatgcacccagccaaattttaaaaaatttctttgtagagatgaggtcttactgtgttgcccaggctggtgtcttgagtctagacaaggactcttagagcaggggaaggggatagctgtcccaatgggcatatcaggctgtccctcccttggcatgtctggtagcttctgggagcctatgcccaggaaagggcctggtaaacaggccaggtgcggtggctcacgcttgtaatcccagcactttgggaggcagaggtgggtggattacttgaagtcaggagttcgagaccagcctggccaacatggtgaaaccctgtctctactaaaaatacaaaaattacccaggtatcctggtgcaggcctataatcccagctacttgggaggctgaggcaggagaattgcttgaacctgggaggcagaggttgcagtgtgctgagatcacaccactgcactccagccttggagaccgagcaagactctgtctcaaaaaaaaaaaaaacaaaaaaaaaacggatgtggtaaacagtggaccctcagtttatgctgaaataatgggtgcaatccagtgtttcttttctggcccctccagcctctgtcagctctcagtccctgcctttccctcagccttaggttacccctccacccccacaccacacaccacacagcaccctaggtcccctccctgctcgcttctgagctgaagacttggcagaatgagccccaggttgggtgtccacatccccatctctggctgctaaggtgttgctattgaagcacagggaccactgtgaccccagtgaattggttcccagtgcttagcctttgggttaccgaggaggcatatgtctgggagaggataggcctgagtcccccagctttggttgcatcaggcacgtgaaacccctgctgggggaagcaatgctgaagccctgagcacatggcaggcctggcaggccggcctctgtacttactccagcctggcctgcccaggaggggactgggggacgggtgggctctcaggggccctgggtaggggggatgagaggaagagatggtaactgtggtgtcagctccatggttgctcatacccacacagagctaggcagtgatattggggttccttcccagccgcagtgggaagtgggggaaggtatgacacgaggaaactggaagtggaggggagagactgacgtggagcaggacagggtgctggaagagacagaggcagcagaacaagggagtgacagatagtgggcgggagacatgacaagaggcaaagacaggcagaacgtcggaggagacaaaggaaaccacaggaggaggagatccagtcagagccgaaccccacccgctggcagtcacttaccaaacggaagcagtttggtgaagtctggaaagagagagagagaaagcacgcgtttgggcagaggaggctgagtgcccatggaggggcgcaaagcggagggacaatgggagagaggactccagggtggcctctgtctccctacttacttgtagatgctcctctcgctggaggtgtcagctgagggtgccacagagatggtaggaaaaaggttcactgaagcttggagaccggagggagggcccacagggctggaggcggggcctgtcagcagggcggggccggtggaagaggtggggcctaccggtgaggcggggcctgtggggctgaaagcaggggctgtcagtggggcggggcctgagaagctggaggcggggcctgtcagtggggtggggcctgcggggcgggaggtggggcatgtcggtagggcaggcccagtggaggaggtgggggctgtctgtggggcggggcctgagggggttggggtcagggcctgtcagctcactgggccatgcctagtagatccaccctttcccatctacagatgctcgtacttacccaggttccggggcacgcgcggggcagcccccgccttccagagaacggcggctcctcttgccctcctcagaagaaggctttcgtcgttcccgccgcccaccagcgcctggggcttcttcgatgtctccatcctccaatttcagggcgttctagcagaggcggaccaggatgtaagaaagtggttaacgtgtatgcaggtggggtggggcgctggggactgcgcttctctcttccctctttccaatccgcctcagagcgtaaggcccggcccacctcgtagagcacaagctgcgtgcgcaggtcgacgtcagtgcccgcagtgcccaggtggcgctggaccagcgcttccatgccctgctgctccagtgcatccgtcacatcgtagaaggagtcctggtccgggagcgccgccagcgtctggagggcggggataagaaggcaaggctgaggttggtggggaggtcaggagcctgagcatcccagagctggcacccagtccttggccacaccttgttgatgagggtgaccgtgtacaccaacaactcagggtcagcgccattcttctcctccaggatggacaccagattggcccagggaggagcacctgccacacagaaagtggagcagtcatgggggaacaggtaggagagagggctctgagcggtggggggagaaagggacagtctctgaccggtggtgctggccacagagttcactgcacggatgaacagcggtgcgttgttttcggagtattctacaaacaccaacagcagcttcagggctgtcttcaccaccaagcgggactgaggagagaggtcagtacatatgagtggggcttaggccagacctgtgccagctgttgctggggaaggggaagggctgctggggctggacccagagagaatctaggcagaatgaccctggccccaggcccaggcactgaagtgccttataggcttacagaggcctcagactcactcccttccagctcactttgcagaacaggaaactgaggcccagagagaagcaacaggcaaagggtataaggctgagtggagagccacttaccaggctggcacacaatgtgtacagccactgaatagtgtcactgtgggccaccacccccagcattccatccacaaagagcatcagctggccgagcgctggggaaacagggatgggcagagtcagcgagggtcgctggagcagaggtcatgggagaggggcggggctgacctctaaggatgtagctctggtagttgtggtcggcagcagcacccacacggatcaggcagctcagcccctctgaatgcacaaattcaggcaccaggtctttgtcctcctaga

SEQ ID NO: 6145 - DNA, 8924 bp, Homo sapiens
gttggattagctaagaaaattttattttgctccgtgcgttcaaggagctcacacacatgcacatgcatatgcatgcacacacacacatacacacacactcacatgcatacacacacggctaatactgctcaaggcatggctcctgggcacagagttctggggccagaattctgctctgggccctcctcactctgtcatctcctgcactgcagtccagggtccagatagatttccgggatacagcaccttcacacctccaggccaggacccttgcttagtcccagtgcctgcaccaggtcatctccgagcccactcttcaacgtccttctcactgcagggacagagcagggttggagggggttgatggggttcaggtgggcagtgggattgtggggggttacttacaagacttgcggttgccgcgggaacgcttgcgttccctagcagctaaggcacgaggactgctcttggtcactgactgcaccagaaggtccatgatctcatctgatgtatcactgggtaaactggagcctgggggttcttctggggatgcagtggagggccccactgtgggcatgattggggagctgctctggaccatgcctgaggaaggccagatagcaaagtcaggccaaggtggcactggagcccattccccacagctgctatgggcctcacctctgctgcggcgattgtgtgtggtgtcctcaggcctgctggtcagcagactcttcatactagcatgactgtcagcatctccccggcctggcccgctgctcactgctactgggacagaggggttgctgggggcttccccagccacacctgagaacttctctgtctggagaaagaagaagggtgagctgggaggagcgaaggaaaccaaggaggtggcagtcaagactaagacctggaagggcacccacctcggtgatcatgcgtccccgggtcttgttgcgctcacggtatgtggcctgcttctgctgctgctgtagcactcgttcccggcaagtccgatactcaagcgcaaattcccgcagcgtgtggcagaactgcatgatgcgcacttcacgggccgcctgcggggtgtagcccaggtagagcaggaaggcatggaacctaggcaggtcagagtagggagggacagtaagtcctgcttattgtctgagggagggtggtggccgtcctgcctctcttgggtccatgcccctacctattgcagacacggcggtgcactatccttagcatggcaacacggcgggcacactggtccaggaagtgggtgaggcgggcacgcagggctggggccagctcatgcttggccaagctccgcaggctctcctcggctgcccggctccggcgctccagctgccccaggttctcagtcagctgttcaaagtccacctgagaaagcaagggggtgcacatactgtccccccacaccctgtagacaagacatggcccgaggctgcttctgggccagagtggccagcttgggccctaaggacacagacatccaaatctcatagactagtgcaagagacacaagtccatctgatgtgaatggggagcagaaggtttactgggggaagtggcagttaaacagacccaaagactgagtaggtgtggccaggccaatagaggaaagagcatttctggcagagggcatagctcacacccaggtggctggagcaagccctggcacagcagcccaaatggggagaagggggaggagccaggcccaggaagcagcgctcctcatgccttgtccggccttggttgattctggcaggtgctaaccttggcacagcgggtcagggcagggatttctgaatagaggtcagaggactcaggccgggtctggagcactagggagcagagatggtgtagcagtgactgtcgacgcaccgtgtccttcacctctgacaccttctccaggtagctcagctcaaagccgctgctctgaaaggaccctttctgagcctgggcctggttggctccagaaccctgactccccctagtccccatgtactctcactcacctgggagccattgaggaagttgcccaccgctaggagggtagccaggatgcagcggaaggtggcattctgtaccagctgttccatacccactttcaggtcaaacagtggctcagcaatttcctggtatgggagaccagggactctcagactacatggtcatgatgcttacctgtccctactgactgtcccactccaagacccaggtacccgctccatgctgtcatagtccagcttgaaggcccagagttgtagacgagcagcgaggccgccaatggaggcaagagtcatcaggaagttctcggctgggcccaggggtatgtcagggttggccagctgggcttcctcaatcttctgccgctcttcctccgtgggcatcatggtcagtagcttctgaggatgtagccagagcctgacatggccccctcaatgcaggcctgaggcctgaggcattggtcttgacccctcagtcatctaggggaggccccagtgtctggggactgccctgcagaaatgccaagcccatgcccaccaccagagggacaggaaatgcccacctaccaaaggagaaggccagacctccccccaacacccatagctgggtgacctcacctcaatgccatccttgctgacagcaaactcatcaaagttgagcagagcagccttaatgacatgcacaggtggcagtgtggttaggccgatgttgatggcgttgctgcgcttggggtccagcactgtggtcattgtccggcggccctctccagctttctgcatggttgggggaagggcagtgtaagactgaggaagggggcctgacgcggtggctcacgcctgtaatcccagcactttgggaggccaaggcgggtggaccacgaggtcaggagatcgagaccatcctggctaacatggtgaaaccccatctctactaaaaatacaaaaaaaattagctgggcgtggtggcgggcacctgtagtcccagctactcgggaggctgaggcaggagaatggcgtgaacccgggaggcggagcttgcagtgagctgagatcacaccattgcactacatcctgggtgactgagcaagactctgtctcaaaaaaaaaaaaaaaaaaaaaaagactgaggaagggactagctgggacagcaacctcagagggcactccaaggccctcctctagattgccaaatgatcccacaactgacaaactggcaacctggaatgtgtaagtcatggggatgagcttagattcttttgagacagggcctggctctaccatctaggctggagtgcagtggtgccatcatcgcccactgcagcttatcttctgggattttcctgcctcagcctcccaagtagctgggattacaggcgtgtaccaccatacccaactatttttttttttaacatttttttttccgcctcccaggttcaagcaattcttttgcctcagcctcccaagtagctggtattgcaggcatgagccaccacgcccagctcattttcatatttttagtagagacggggtttcaccatgttggccaggctggtctcaaactcctggcctcaagtaatctgcctgccttggcctcccaaagtgctgggattacaggggtgagccaccatgcccggctaattttttttttaacatttatttatttttatttatttagttatttttgagacgaagtcttgctcttgtcccccaggctggagtgcaatggtgcgatctcgactcactgcaacctctacctcccgggttcaagtgattctcctgcctcagcctcccgagtagctgggattacaggtgcccgccaccacgcttggctaattttgtgtttttagtagagacggggttttgctaatttgaccaggctggtctcgaactcctgacctcaaatgatccacctgcctcggcctcccaaggtcctgggattacaggcatgagccactacacccagaccaacttttagtagagataatgtctcactatgttgcacaggctggtctcaaactcttggattacaggtgtgagccaccatgcccggccacatttagattctagttggggcactgctgatcccttgttaggagaccttggacaatttcctactcctttctttgccttggtttccccatgtgggaagtgagtgactagctccaacaggtcagatccttaagctctgattccctcctgcctcccttggggctaccttgcagatgagtggatttaccttggagggcagcacctctttggcacgagactcaaagaggtgttccagtcgggccgtgtccactgagacagggtccagtgaagcccagagggtggcgcagggcccaaagcggcttgcagagactccatggcccccagccagcttcagctcacgccagaaaagttttactgtcttcctcttagtggggagggctgagctgtcaggcactgaatggggaagaggggcagccagaggtagaggtggaggtggtgggaaggggcctttgatgggtgggggaggtggaagtgggggaggggggtggtactcccgagagcaggggcagtgggggtgagggagctgggatgtctttcccagcctccacagactctacattcagcatgtcctggtcttcatcctcccctagatctgaaaagtccaggtccccaatagagagcctgggtgcacgggtagggagctcccagatgggctcagccttggggcttgctggtatcagtggctccttgggctctggtgcaaggcttcgctgggcccggagcaggacacagggggcagggctctggggtgttctggctgcaggggctgtctctggggagtcccagagttgccgggcatctaaagaaagggaaggagctgtcagtgccatgccccctgtggggcaacaaagcaacaggcaggctctgcctgctcacccacctactcacctgggtgtccacccgcctcattgggcatggccccggcaagtgtctctgcccggccctgggccagcgcaacctgcttctctgtttctgctgccgccacattctccaggaaccgggctctgagggaaggtgcttgtcactgacagcgtctgacacaccccagcccaggtgtacatgccttgctgagcccctggacaccacccccaattgcaggcacgcacagacacacagggaacagtccatgcgctgagcagaccagaaccacaccccccccaaggccagcccctcttcagtcctccacatctggggaggattactaccaacccagcattcccaggtgaaaacacagggagaggatctacttaacatctaacttgcaacctcgttcatgttcactgtcctggtttttttttggttggttttttttttagagacagggtctcactctgtcagtcacccaggctggagtacagtggtgtgatcatagctcactgcagcctcactctcctgggcttgaccctcagcctcccaagtagctgggactacagacatgtgccaccacgtccagctgattttttaatttttttgaggagacagggtctcactgtgttgttcaggctggccttgaattcctggcctcaagcagtcctcccacctcagcctcctgaagtgctgagattacaggtgtgaatgatgcacccagccaaattttaaaaaatttctttgtagagatgaggtcttactgtgttgcccaggctggtgtcttgagtctagacaaggactcttagagcaggggaaggggatagctgtcccaatgggcatatcaggctgtccctcccttggcatgtctggtagcttctgggagcctatgcccaggaaagggcctggtaaacaggccaggtgcggtggctcacgcttgtaatcccagcactttgggaggcagaggtgggtggattacttgaagtcaggagttcgagaccagcctggccaacatggtgaaaccctgtctctactaaaaatacaaaaattacccaggtatcctggtgcaggcctataatcccagctacttgggaggctgaggcaggagaattgcttgaacctgggaggcagaggttgcagtgtgctgagatcacaccactgcactccagccttggagaccgagcaagactctgtctcaaaaaaaaaaaaaacaaaaaaaaaacggatgtggtaaacagtggaccctcagtttatgctgaaataatgggtgcaatccagtgtttcttttctggcccctccagcctctgtcagctctcagtccctgcctttccctcagccttaggttacccctccacccccacaccacacaccacacagcaccctaggtcccctccctgctcgcttctgagctgaagacttggcagaatgagccccaggttgggtgtccacatccccatctctggctgctaaggtgttgctattgaagcacagggaccactgtgaccccagtgaattggttcccagtgcttagcctttgggttaccgaggaggcatatgtctgggagaggataggcctgagtcccccagctttggttgcatcaggcacgtgaaacccctgctgggggaagcaatgctgaagccctgagcacatggcaggcctggcaggccggcctctgtacttactccagcctggcctgcccaggaggggactgggggacgggtgggctctcaggggccctgggtaggggggatgagaggaagagatggtaactgtggtgtcagctccatggttgctcatacccacacagagctaggcagtgatattggggttccttcccagccgcagtgggaagtgggggaaggtatgacacgaggaaactggaagtggaggggagagactgacgtggagcaggacagggtgctggaagagacagaggcagcagaacaagggagtgacagatagtgggcgggagacatgacaagaggcaaagacaggcagaacgtcggaggagacaaggaaaccacaggaggaggagatccagtcagagccgaaccccacccgctggcagtcacttaccaacggaagcagtttggtgaagtctggaaagagagagagagaaagcacgcgtttgggcagaggaggctgagtgcccatggaggggcgcaaagcggagggacaatgggagagaggactccagggtggcctctgtctccctacttacttgtagatgctcctctcgctggaggtgtcagctgagggtgccacagagatggtaggaaaaaggttcactgaagcttggagaccggagggagggcccacagggctggaggcggggcctgtcagcagggcggggccggtggaagaggtggggcctaccggtgaggcggggcctgtggggctgaaagcaggggctgtcagtggggcggggcctgagaagctggaggcgggcctgtcagtggggtggggcctgcagggcggaaggtggggcatgtctgcagggcacgcccagtggaggaggtgggtggctgtctgttggggcgggcctgagggggttggggtcagggcctgtcagctcactgggccatgcctagtagatccaccctttcccatctacagatgctcgtacttacccaggttccggggcacgcgcggggcagcccccgccttccagagaacggcggctcctcttgccctcctcagaagaaggctttcgtcgttcccgccgcccaccagcgcctggggcttcttcgatgtctccatcctccaatttcagggcgttctagcagaggcggaccaggatgtaagaaagtggttaacgtgtatgcaggtggggtggggcgctggggactgcgcttctctcttccctctttccaatccgcctcagagcgtaaggcccggcccacctcgtagagcacaagctgcgtgcgcaggtcgacgtcagtgcccgcagtgcccaggtggcgctggaccagcgcttccatgccctgctgctccagtgcatccgtcacatcgtagaaggagtcctggtccgggagcgccgccagcgtctggagggcggggataagaaggcaaggctgaggttggtggggaggtcaggagcctgagcatcccagagctggcacccagtccttggccacaccttgttgatgagggtgaccgtgtacaccaacaactcagggtcagcgccattcttctcctccaggatggacaccagattggcccagggaggagcacctgccacacagaaagtggagcagtcatgggggaacaggtaggagagagggctctgagcggtggggggagaaagggacagtctctgaccggtggtgctggccacagagttcactgcacggatgaacagcggtgcgttgttttcggagtattctacaaacaccaacagcagcttcagggctgtcttcaccaccaagcgggactgaggagagaggtcagtacatatgagtggggcttaggccagacctgtgccagctgttgctggggaaggggaagggctgctggggctggacccagagagaatctaggcagaatgaccctggccccaggcccaggcactgaagtgccttataggcttacagaggcctcagactcactcccttccagctcactttgcagaacaggaaactgaggcccagagagaagcaacaggcaaagggtataaggctgagtggagagccacttaccaggctggcacacaatgtgtacagccactgaatagtgtcactgtgggccaccacccccagcattccatccacaaagagcatcagctggccgagcgctggggaaacagggatgggcagagtcagcgagggtcgctggagcagaggtcatgggagaggggcggggctgacctctaaggatgtagctctggtagttgtggtcggcagcagcacccacacggatcaggcagctcagcccctctgaatgcacaaattcaggcaccaggtctttgtcctcctaga

SEQ ID NO: 6146 - DNA, 2177 bp, Homo sapiens
caaaagctgacgacttcggtctgcgccggaagtgcatgagctgccgatgtggtgcttagtgattgcggtttcggtcgctctcccgtgtttcccgggctgggtatttgcctcgcaccatggcggtaaggaggatggatagggcggggtccgcaccagcaaagctctccaggggctgtgagagtgaaaactgagaaagaacattaagggatatggggtgggccagagcggggcgccatccctggccagaccgtgctagagctgggctggggggatggcggcgcaggaccataccaggactagtgccagagcggggtgggcatcagtaccagggcaggccagagatctaagtgacctgaggtgggggttaacccagatcgggactacgccagcggaggcctgagagaggcaccattcaactccgctcaggagtacccttggaagagtcgttagcctaaagccagactaccacgggatccagaggcggtattagcttaggattgaattgttccagggcgagcaagaggcgattgatcctagctgcgggtgctggagagatggcgtcagccctaggcagaatggactggaggatgggtggacatcccagggattttgctaggtttctgcactacggggacctggctgagttgcggatggagctctatagctcaccaggctggtggggagaatgaggaggaccgtggcctcctgacggcatctcatcattcctctgcagcccaagggcaaagtgggcacgagagggaagaagcagatatttgaagagaacagagagactctgaagttctacctgcggatcatactgggggccaatgtaagtgcctacctccttgcttctatgcccacttatagtcagttccctagtcctcagccctgcttggtgacgaggagtggtacccgaaaaagctctagaagagagctccagtcaaaaagaaatgagagatctgggcacagagaaagtgctaactagtaaaacacaaagaaaatgaaggcgtgagtcgtagctgaatttgagagctcttcctacctccaagtacacaaaggcttctttcctgggctgagttgggtgtcagaggagagtgggtatttgggattcagggagcagggccctttcttcaaccctgtaagaacaaccttgctcctcccacagcctggcctaattcttggtcagagttgagggagacccatggtttggaggtaacttctgaccccaacctgatcctgtgattgcttgcaggccatttactgccttgtgacgttggtcttcttttactcatctgcctcattttgggcctgggtaagtatctccatcctgggaggtggatgagtgcgtagggtcagtggctggcctttgataccctcattcttgctctgcagttggccctgggctttagtctggcagtgtatggggccagctaccactctatgagctcgatggcacgagcagcgttctctgaggatggggccctgatggatggtggcatggacctcaacatggagcagggcatggcagagtgagtgtcccccaccgccagcccaggtgagcggccccagggctggggcccagatagcccaagaagcacagctacttgtaacttgaaaagggtggaagggagttgcaacttgaaaagggtggaagggcccatatgctgtctttccagctttatttctatccacaggcaccttaaggatgtgatcctactgacagccatcgtgcaggtgctcagctgcttctctctctatgtctggtccttctggcttctggtatgtgggctgggggcgctcccaagaaggggcatctaaccctccccatcttttattccctgcatcttgcttcaagttaccgtttctcttgtaggctccaggccgggccctttacctcctgtgggtgaatgtgctgggcccctggttcactgcagacagtggcaccccagcaccagagcacaatgagaaacggcagcgccgacaggagcggcggcagatgaagcggttatagccattgacattgtggccacaggccactggccctgggtggctctgtcagggtgcacagcccctcatgcctggagcaatgagggtctagtccaggggccaaaagcagtctgaggtattgggtatacttatactctatagggtcgttgaataaatggcttagaatgtgg

SEQ ID NO: 6147 - DNA, 2177 bp, Homo sapiens; identical to SEQ ID NO: 6146

SEQ ID NO: 6148 - DNA, 3418 bp, Homo sapiens
gaactgcaggagtttgccaacgccattcttcagcagatagcagaccattgtcccgacatcctagagcaagtggtcaacgccctggaagagtcctcttgaccctgctttatggggaagcctgaggtagtcaacccaggagccaagaaaagagaactacgaggaacaggtgcccggaaccttcttggcaccaaacactacaaacttcatcccaacttgctcacttgaagaagtgtgattccagcaccgtttctacatctgccatcttactctgcctttctgctttggatgtggtctctacactaaccttcttgatgtccagggtagataaagggtcgaatctctctgaagaactgccacctggtcatcagcagtggagaactgtgggagctggtggctctgccctgacagagagccatggagcagaggagcctctcacctcctgtcctctgacatgagaatgaaaccaggaatggacttggagttcaacaggctgagaggatgcctccaatggaccagagagctgagtgttctaatatcacaataggtgctttctcctaaaagggcaaaaaacaatctcaaaaagattagaaaaagagaaggggggaagggaagagaaaatcgactcttctttttactgtctcttctgcttactttccacatgagatgctttgtaccggggagctgtgagcaggcctcacgatggcttgggagcactcgttctcccaaggtctgagtcttcatccagccctgcctgtctgtcgcagccttcctcactctgttcctcggccagttaacaagaagatggtgtgaggtgttctccaccagtctctcctgtttgagactgttgacgttatcatactgaggtgttagatcaaatatctctaattgaagaacatgtgaggttgaaagagcaccagccagggcaacatagcgtgaccctgtctctacaaaaaattaaaaagagaacatacaaagttgacatatgagaccctgttgtccccgcctgcagctttgccccagtaacagatgcccgttgctcttgggctggtttcccctgaacacctccaagaggctgcctgccttgccagcacccgtgtcctgagctcctgcagcccagtggctgctgaagttgtgatccctcactcaccctgctagctttgcccttgactcgtcttctctgaacctcagcctcgtgcattgcctggaaccttcttctagcataaatgaaggtttttcctcctacacacattccttcctcggttatttcattcagagaatatttatgaaatgcctactgtgtgcaagtcatccatccttgaaaaggccacttctcagtgagggagagatgtagtggattctgtgagacatacctgctggagttgaagcagtaaatagcatgtccttcccctccccgatcttaaggtgtgttttctagaaaagttccctaatggaattcatgagtttgggggtctcagtcacccgcttgcctgtaggattccatttgatgattctggatttttgctgtttgttattgcccttagaggggctctgagtatctacttgtgggtggccatttcctgacatctgcatgtacctcgtggaattcagccagcttcatgttgcaaatcagaaagctgaccccaagactgcaaatcaatgaaggtattggcattgttaaggacgtagcgtagacaacagcagtcataaataattaggcaggaacttaacccaaatctagttctttgaccacctctaccaccagaacccagcagacactcacatctcctgataagagttgctggactcgatgtttttgttttgcattttctcctctccttccccacttactcagagaatttaaagtctgtagagtcagcacagccccatcagtccaggaacttcccaccaccagcccttgactgtcccattaactgacatggtcagatttccagctccccctactccctgctgtgaaacaatccctctccctgtgagaggaaactgtggagcgtttcttatcgaaggttaaatggactctgctcataaacctcttactgagatgcttcctgatagccaggctggccagagaggggtgcaggggttagatagtaagtggtggtcgtttgtggtcagttacctcaattctgttcattgcagtgcccgtaaaccatgtagaaagctcccagcactgaaaggcaggagtgttagcatctcgctttatccaccataacgtaaagaactgcggtgtgataacagccttcacggggccacggtggaaccaagacagcaggcgaggccatgcctaaacaagtggtctggcacgggcactggccagctgctctctccaagcaggtggcccagatcccacccacgtggactttctcatcaggtgcagcgcctgccactctcagccactgggtgtgtcactctcctcttcatctcagcattctccatcacttcccctccagaaaaacggatggaaggaagccctctgtgacactgcttctgagaagaagcatttccgggaccgatatcatctgtctggtctctgtgaacagcaaggaatcttcttgaccgttcttgggcactggaggctggctaggagttcagtaataaacgtggccttcgtgctgtagggcagagtggatgcagtttgtagctttcagagtgtctcattgagtctagatcattgaaccaacacttaaccaaatgtcccactcccatcacactaggacttgtcattccatgcccctctcctagtggtcatggtttcatatgggcatacaactgctactgaagttatatagccttgaaaactcagtgcaggttgcccttaattttccccaaacccctccatcggcaagtctagttgccctttagcacctaaagatctgcaccccaaaccaatgtcaccataaagagggcacgaagaagagtgggtgtgatcccaacggggttttgtaactgaagaagcccagtgtgagcttctcatcttttcatatacctctaacccccggtactcattgaatcattgatgaggtatctcaattgagatttgcaaggactttgataccatttgaaatggaaaaattttgaacgggctttaacatgtttaagaaatatggatggggccggccacagtggctcacgcctgtaatcccagaactctggaaggctgaggcaggcggatcacctgagatcaggagttcgaggccagcctggccaagatggcaaaaaccccgactctactaaaaatacaaaattagccaggcgtggtggcgtacgcctgtaatcccagctactcaggaggcaggagaatcgcttgagcctgggaggcagaggctgcggtgagccgagatcgtgtcactgcactccagcctgggtgacagagactccatttaaaaaaaaaaaaaaaaaa

SEQ ID NO: 6149 - DNA, 376 bp, Homo sapiens
aaagaaggaaagaaaagaaacgagagagagagagagaaagaaaagaaaagaaaggaaagagagaaaaaggccaggcgcggtgactcaggcctgtaatcccaacactttgggaggccgaggcgggcggatcacaaggtcaggagatctagaccattctggctaacacggtgaagccctgtctctactaaaaatataaaaaattagctgggcgtggtagcaggcgcctgtagtcccaggtactcggaaggctgaggcaggagaatggcacgaacctgggaggcggaggttgcagtgagctgagatcgcgccactgcactccagcctgggtgacagagcgagactcacgtctcagaaaaaaaaaaaaaaaaaaaaaaga

SEQ ID NO: 6150 - DNA, 209 bp, Homo sapiens
aaccttttaacctttgtccttgcactttacaatctaaagatctacctgtggctctcagacttcctcacacttgggttttagaaataacttgtaaagcagactggacccaaggccgccttcagtgtcaagaagggcattgtgacttgcccctcaatttctgtccattgaagtctggttttccatgaggaacttgcgggctcacccacccc

SEQ ID NO: 6151 - DNA, 95 bp, Homo sapiens
ggaggcggagcttgcagtgagctgagattgcgccactgcactccagcctgggcagcagagcgagactctgtctcaaaaaaaaaataaataaataa

SEQ ID NO: 6152 - DNA, 8113 bp, Homo sapiens
cggcgggcgaggccaatggaaaggagactgaggggagtcccggcagtgagcccgaggccctgggacctggagcccgcgctggcctctccccagcggagcctgcacgttacggagaccatcacatgtgggcgtggtcagtgcccaggaccgcaccgctgctcatcttgtcccttttcaattcccttctggttcatgatgcataaagcgctaggccctagaactccagaaacagcacagctggggcggggacccagccttgccctccacccgaggctctgggacaaggcgggaggttcgggggccttccggcaggtgaacgcagggctggagagtatttggtgccagatgaggtgaaagcttatagaagggcctgaggggctcggctgcctcatcccctggcgggggaggctgggagctgggcctcctgcgtggggtgggactcgcaggggccgggtctccgtgactggggcaacgcctcgtcctgcagagggagccgacgacctcttttctgcagaaaagctccagcaggcgctgccttcacccacggatctgcccaggctgaaggcacacgctcaatgccccacgtgccttctccaggaggaacgaagcagggtttgagggttgggtggatggagctcagaaggaaaccccagccccaccacggatgacaccatccctcccgtcccatccccagcatgggcaaggccagcctttctggcagaaggagctgtcctcaactcagggccgctgtgagcaaagctgaccccagcccccacccccagttaacactgctgcttctctgaatgcatgtcacgctgcaccccatgctccgggcccacaccctgcaggacaaggagctccagacaggacgtccataagtcaccgaggtgtgccacccagcaggtgctggaggtgcccaatgctccctcctaggacctcgcagccaggcaaggctgtcaggttgttttgggggaagagggggtcatggatggctgagcagagagcggggaaaatgcaggctgagtggggcgacctcctgcctgccaggagccccctttcaggacacagcgggggtctcacacttgctgtccccatccatggcccgagggggaacctggtggtctcttctgagcttttggacttggggatgccaaacacgtgctcaccctcacactcgccccggcccgctgcgcccctaattgccaaagggtagggaaatggcgaagccagccaccaggtcgctggtgacagggccagggttatgcaggaaggtggtgcggcattgccttccacatatgtaagtctctgggcggcgccctcccagctccctgcctctgtttccccatgtgggccgtggggaactcccagagctacctcttgggggagcgtggtggcagcgatgatggggagacgcctggaagctcacagaacttgggtctggctggctcctgcccgtgacgccttgcccagcagcaaggtgcgcaacatggctgccagccccgcctcccacccccaccccgagtcctgagctcactttcgccttctccatcccctgccgtgggggccacagccacacctcaccgcccagtccagctgtctccagaaggggacaggcagtccgcggtctctggacaatcaactcaaggtacgcccactgcaaggcctccctcccaccgcggcccctgcctggccacctggcctctctgcaccagggtgacaaggggtcctcgtctgccccccaatgctccagggccagtcctaaggagctgagggtctgaggacgcagggagggtggaggtgtcctgaggctgatggacagtgaccgccactggcccccaacatgaccacacgtgggtgctgaactcggggcgccgtgcccaccggcatggtcctcccgagctccgacagcattacctcacccggccccatctgttgccccggtccagccctgatggcgcgcgcctggtctgtctgattcccctagccgccaccccacgtttctgtaccgggtctctgcagtgttaaacggacgtgtaaatagtggtaaatagtgaaagcctgtccttccctaaatgtaaagccatctgtccggcgtaaggacgacaccgtcagctgtccgactcgcacacatttaataaactgagctcttgcattgcctgccgccatcacctcttcctcaaaatgggctgtgggcgggtaggttcatcgctgtctatgtgctgccacagaattgctgagaccccccaggttagatccctggaagcagagccagaaagcagaaactgggggcacagggtttgtgggcaccccacccagatgggccggggaggcactggctgaggccaggagtctccccctggtcccaagggagggcaggctccagggggtgcacagcaccccagacagggggtccaacctgggcattggtacctgggccagttattatggcaggccccagtgtggggcaggaggcacccatgagccactaggagctgtggctggtgcaacagctgggatggggcagccacagcagccactaccggggagagtcaatggtggacaggggctgcgggagctgggacggccccacgtcaaagccacttcagggagcacagccctggcccagctggggggacaaggaaagctatgactgcaagcagcacagaagtgcagggtgggaagggatggcaggagccggccccctccccaccttccaccctgggacactgccgggacctccctcggccaggtgagcagcttcagaagcatgaccagtgagaagtccctagggcccaggccgggctagccaagtcccagtttctggatgaggcgcctcccaggctgtgtgtggcaggccccctttcttcagggaataagaaacatcttccacattcaagaaacaaagctggctgtgggtctggagagagggtgaggcagccccaggtctctgggtcaggcggacggtccctgcatgcagtgcccggcaggactgagcagggttcccggggtcgccggtacccatccctccccagcttccggggccccgggacggagccgctcacagaggcaccattcagacggccagacacacacgaaagctttatgtgcagggcccagcctctgggccgccttgcccaggtttccactcaagttgctatttaggatgaaaagcctttggcaagaccctccgccgcactaacgccccctcccccagggccagaacccgcagggaagcaggcccaggacctgctgcagctggcagggtggctatgagactcaggacaccctgggctcctggccagtgactcacagcggtcctccagcaagggcagtggctgggagacacccgtgccgtggagctaggcccagcctggctgggtctcagggctgcttctcttgggtgaccccagcggcccagggtcgttgtgaagatcaacgtggcttgtgggaggagcccggggcccagaaggaagtggggtcaggggctcaggctggccctcgggctgctctgacattgggtgggcactcgctggatggaatcacagttaacacctcgatcccaacacctggactcagaagtggacaggcgagtgcctgccccgggagaggaaggaggtggcacctgctcccaggggccccactgcagagcacggccactgtgagctgacgacagaatcacagtacagcaataatgtccctatcctcttccagaaccccagtggggccctcaggtcacgcaggacggagccagctgggtgggtcccaccaactcggcatgaatgagacgacggatgaaccgcagccccagcatcaggaggggcgcctgtgtcaacacccacgtgggctgggaccccgtgaatgccagtctggggccgacggacccccagggaaagcctgggtgcaggccaccttgtgcgctgcccaagcctgcaggccccgagaggtcagcctgaggaggcagcctcggctgccggtaatgctgcctgcttcatctgggccacctcccgctccaggtcctcgccggctcgctgcaggagctcacacctctgcctcagcacgttgcccgcctgctgcagccgctggttggcagccacgtaggcccggctttgctggtagagctgctctcccggggcctccgcatcctccatcatcctgaagggaactggggggtctgagacaggacacagcagcatcactgcctgctgaccaccccatcctcctgggcacccctcactactgcccccaaagggcagggttccctgcagtccccgagtgagcttgccagccggggtcttcttaacatgacggatgcagccaggtgtggtggctcacgcctgtaatccagcactttgggaggccgaggcgggaggaacacttgagcccaagagttagagaccagcctggacaacatagtgacacccccatctctaccaaaaaatacaaatacaaaaattagctgggcgtggtagcacgcatctgtggtccctacttctctggaggcagaggcaggaggatcgcttgagactgggaggccgaggctgcaataagctatgatcgtgccacggtactccagcctgggtgacagaatgagaccctgtctcaaaaataaataaaaacaaaaatcaagtaatggaggcttcctcgtccatcagctgggagaggcacagtggctgggtggcaggaggggcttccagctctaggctacccgccttagcaaagcgtgtgaccagggggatcgggtcacagaaagagctcaagcctcgccagcagtggccctcctgggggcggggcttccattcctgcaaaagccgtggcacccaccgggatggactccactgagctggcctggctctcattcctgctgtctctggaagccagagacgcaacaagcccgccaccgaaaacctctccaggggccgtgcaacctcctggagcacacacttagggaggcaggggtggcgaaggtgagaggtgggcattgacgtcctggtgactcccacattcagcagaaactacgtatggctccctgctcccccacgtatgcaagcccagtgcagcagggctgaagcagcaccgacttcagggtcactcagagaagcgtcaggggcccctcggctctggcctgcccctcggcagtgtggtctcccacggacgaaggctccacgtgccgcacgggtctgggctgatcaaatcacctctgtcatcacctgctttagcaacagggtgggaaaggccgggcagtgcctggatgaaggcacaggaggccccctaccttctgtgagcgccccccgtcccccgcacagcgtgcctcagtttcgccacactcaacggccatggacctgagcccatgaagctcaaaccacggccccagcaccctcaggtgaccgaactgcatgctgggaataaaaccaactcatgcaccttgaccagtaccggcccacagaaccttccagatgatgcgcacacctcccaccgatgctggtccacaccagccaccagccatgtgtggctcctgggcacttgaaatatgtctaaagggaaaacacaactcaatttttctctttttttctttttcagagacagggtctcactctgtcactcaggctggagactccaactcctgggcgcaagcaaccctcctgcctcagcctcctgagtagctaagaccacaggtgcatgccaccacacccagctagtttgtgtatttttggtagatataggttttgctatgctgccaaggctggtcttgaactcctggcctcaagtcatcctcctgcctcagcctcccaaagtcctgggattacaggcatgagccactgcacctggccccagaattttctaatattactttttaaaaatgttcccttagaaattcacagtttctatcattccacatggctcattttcttttttcttttttttttttgtttgagatagagtcttgctctgtcacccaggctggagtacagtggcacgatctcagctcactgcaacctccgcctcctgggttcaagcaattctcctgcctcagcctcccaagtagcagggattacaggcatgcgccaccatgcccagctaatgtttttgtattctcagtagagacggggtttcaccatgttggccagggtggccttgaactcctgacctcaaatgatccgcccacctcagccacccaaagtgctgggattacaggtgtgagccaccgcacctggccgattcatcttcatttgtttcccgccagccccagaacagcctggggcagacattcttgtttcttttgttcacttgtccattagcagtgctctaagcgcagagcccagcacacaggaagtgctcaagaaaaggattgttgaatgaatgaatgagcctcatccagaacacaaaattcacccaactgcactgctgaatcctttggtctctgactagcttccacctcgtaaatcaggagtggacaagctttcctgccaaaggctggagtctctgctcccactactcaactctgcccttctggtgtgagagcagccactaaccgtatgtgaatcatttggctgtgtgccgtaaacctttacttaccaacactgaaatctgaatttcatacctctttcaggtgtcagaaatgttctttttcacccacccccatttaaaaatgtgaagtccattcatagctcccagaccttaaaaaaacagccaggggcagggtttggggggccctagcttaccacctctgttttactttatttatttctatttattaattattattataattattgaaacagagtctcactgtggtccaggctggagtgcagttgcgtgatctcagctcactgcaacctccgactcccaggttcaagtgattctcctgcctcagtctcctgagtggctgggattacaggcccatgccaccacacccggctaatttttgtatttttagtagagacaaggttccaccatgttggccaggctggtgtccaacctctgacctcaagtgatccacccacctcggcctcccaaagtgctgggattataggcgtgagccaccgcaccggccacttatttatttttgagacacagtctggctgtgttgcctaggctgtatcctcccactttagcctccaagaagctggggctacaagtgtccaccaccacacccagtaatttttttttttttttgagacagtctcgcactgtcacctgggctggagtgcagtggtgcgatctcggctcactgcaaactctgcatcccgggttcaagcgattctcctgcctcagcctcccgagtagctgagattacaggcgcctgccactatgcccagctaactctgttttgtttttgtttttgtttttgttttgttttttcatttttagcagagacggggtttcaccatgttggccaggctggtctcgaactcctgggctcaagcgatcctcccgcctcatcctccgaaagtgctgggcttacaggcctgaaccacagcgcccggcctccacccctgtcagaagaaccctctgaaaatcggtcccactctacggaggagtagagggagactcggagaggatacggaccgtgcccatgttgcgggggttcccagggcgtggggtcaggagttaggggtgtgcttctctcccgtccccttgctgccggggtctcaggtccgcttttccccgggaccgggctccccctaccttccggggccaggatggtgaacactggatcctctgccggcgcaccccgcacatcctccaggatctgctccaccgtggggggcgctgggcgggtgggcagcagcacgcgcttctttgccttggagcccatctctgaaggcggggaagggggcgctgaccggggcgtccacctctccgcccttgcccgggctgctcctcccgcccagcgaactcgtacgcacccgtcgcggtcccgctcccggggaagcccgccctgtcccgcccctctgagctcgccccaggccctgaccctccctccgcccaaaaacacggtggccaaggcttcagggtctggctcaacctctgcctcagtttccccgcggtcaccccagtcgccggcctcttcccacctgggcgcgggacccgaaagcccagcgtcgacgacgca

SEQ ID NO: 6153 - DNA, 533 bp, Homo sapiens
ctgcggcgcggtctggctgccccatgggcctgcgctgtagacgtcccccataggtcgccccagggcctctgcccacccgagccccaccactctcagaacccccgcccagcgcacggcgacctcgcgcctcaccggaagaccttgcctctgtgccgcggaggtccaggaggaaacggggcggccgctaggcctcaagtcccgaccgtggagcgctggcaagggcgtcctggcccagccctgagcgcgcggcccttcccctgtcggaagccgttgcttgaccccgggcgagggaggcggtagcctccgggtccgggtctgggtctgggtccgctgcttcgcagggacagcgctggggaggtgacggcgcccgccgcaggtggggcgaggctgggggagggcggcgccgcggcgggcctgccagctgggggcctttgcggcgcgcaggggcgaagcctgtaatcactgcagccgccggtaattcgctaatgagggctttgcagggattgttttcattctcagccccagctgtggga

SEQ ID NO: 6154 - DNA, 99 bp, Homo sapiens
ttttttgtattttagtagagatggggcttcactgtgttgcccaggctggtgtcaaactcctgagctcaggcaatccgcccgcctcagcctcccaaagtg

SEQ ID NO: 6155 - DNA, 2227 bp, Homo sapiens
aaagaatcttctaggttgcattattaacgcttaaggcaaaaatgactatgacaaatggaaacctatttcaaattttgaaaggattttcaacttttgaaaacattggtagcagtgttatattccagcaatacttccttgcgatttttacgttgaacctgaaccttacaaattgtatgtttctttgaataaggaattcttacttaagtgactcaaagatcagttttgtattgttgtacatcacaggattacagaattgtcagtagcccgccgtaatttttacttttgggtacatgcgttgttgatcatatggctaatacctccctactgccattccatttcaaatcctgtttctctagggaaagtgggaagtgaggagtcaattcaggtgggtggagagtgggaagtatcttagagtatcaaccgttctttcctcttggcttcctcaggagttcagatgtgttctaagcctgctggagtgaccacacttccaagacctgatggaggccagagctcagagtggcaacgggtcgcagcccttgctgcagacgccccgtgacggtggcagacagcgtggggagcccgaccccagagacgccctcacccagcaggtacatgtcttgtctctggatcagatcagagccatccgaaacaccaatgagtacacagaggggcctactgtcgtcccaagacctgggctcaagcctgctcctcgcccctccactcagcacaaacacgagagactccacggtctgcctgagcaccgccagcctcctaggctccagcactcgcaggtccattcttctgcacgagcctctctgtccagatccataagcacggtcagctcagggtcgcggagcagtacgaggacaagtaccagcagcagctcctctgaacagagactgctaggatcatccttctcctccgggcctgttgctgatggcataatccgggtgcaacccaaatctgagctcaagccaggtgagcttaagccactgagcaaggaagatttgggcctgcacgcctacaggtgtgaggactgtggcaagtgcaaatgtaaggagtgcacctacccaaggcctctgccatcagactggatctgcgacaagcagtgcctttgctcggcccagaacgtgattgactatgggacttgtgtatgctgtgtgaaaggtctcttctatcactgttctaatgatgatgaggacaactgtgctgacaacccatgttcttgcagccagtctcactgttgtacacgatggtcagccatgggtgtcatgtccctctttttgccttgtttatggtgttaccttccagccaagggttgccttaaattgtgccaggggtgttatgaccgggttaacaggcctggttgccgctgtaaaaactcaaacacagtttgctgcaaagttcccactgtcccccctaggaactttgaaaaaccaacatagcatcattaatcaggaatattacagtaatgaggattttttctgtctttttttaatacacatatgcaaccaactaaacagttataatcttggcactgttaatagaaagttgggatagtctttgctgtttgcggtgaaatgctttttgtccatgtgccgttttaactgatatgcttgttagaactcagctaatggagctcaaagtatgagatacagaacttggtgacccatgtattgcataagctaaagcaacacagacactcctaggcaaagtttttgtttgtgaatagtacttgcaaaacttgtaaattagcagatgacttttttccattgttttctccagagagaatgtgctatatttttgtatatacaataatatttgcaactgtgaaaaacaagttgtgccatactacatggcacagacacaaaatattatactaatatgttgtacattcggaagaatgtgaatcaatcagtatgtttttagattgtattttgccttacagaaagcctttattgtaagactctgatttccctttggacttcatgtatattgtacagttacagtaaaattcaacctttattttctaattttttcaacatattgtttagtgtaaagaatatttatttgaagttttattattttataaaaaagaatatttattttaagaggcatcttacaaattttgccccttttatgaggatgtgatagttgctgcaaatgaggggttacagatgcatatgtccaatataaaatagaaaatatattaacgtttgaaattaaa

SEQ ID NO: 6156 - DNA, 4802 bp, Homo sapiens
gaattctctttttttctcccgccgattgctcggaagttggtctaaagcagaggttggaaagaaaggaaaaaagtttgcatcgagactggatttatttgcacatcgcagaaagaagagaatccaagggagaggggttggtgcaaagccgcgatcacggtgaggcacgtttggctcttcccctcctggcgccgcggccggcgcgttgtgggcaacatggagtaggtgcagccggaccaggagttgggtccgtctctccccgagcctccctttctcaaatcccgcagggtcttcgcgaggatccggggcgctccccgcggacctgcctcgcccggggcttgggctcggcctgcctctgcggggacttctgtatgcaccccgtgcagtgtccccgacaggcgaccccgcgcgcccgcgctctagggggttgggacggaggacagctagcctgaagtctgctcccagccgtgcactggccgcgaattcggcgctgagagcgggagagggagagaaaaacactttgtattttccaggttgcctttgcaggcgcccgcatttctaacctgttcttcctcttggtggaaggcaaagtccagggagaggctgtccctaggcggggcgctggtggggctgggggacacaggttgcccgcctcgggggcaggagacttccagggtgagaaaaaggcagggtgccgggtggagggagtgcccgcctctgctccgtgtggacagtctagcccggagcgggtgggagcgtcgccctgcctggcgccgggtctctgcggttcggaagtgcagctctctctcttccgttcttcgtggtcagcctgggtcacacttattttatttttggaagctcgggctgacccagcgcaggaagaaagtcatcaagcggtcgcgatcattttccattacctgaaagtaggtggcaaaataggcaattttttatttccttttgttgttgttgttgctgtgttttaatttggattcttgtgtgttttttacaaagcagtttctgtgtccgtttgccccaccctagagctgaagttcttttcccctaatcctcagtctgatcacacactgttcttaatgggggtttcaaagcactttcaaaggggaggggggactgggaaagagaagaggggcggaggtagggagtccagctttgaagaaggaggccagggatcggatcggcagaaatcacttaaaaaataaaaacaaaaaagcccccttttatttcaaagatgctactttgactgcaagcaaatctgcaccgaaagtttacagctccgggagctgggtcctgcgcgcccggagtgagcagtgggaccctggaaaatgccctttttttaaaaagccatttttctttcactttaagaaatatgatatcttttttttttctctcgacccaaaaggagataggcgtgtgcagattacaggcaatgcccccttcggtcagtgcagcgtggagtcgctgtgtgtgcgtgggttggacttgtgcgtcctggctgcgtgtctcaggcagggctttcgtgctcgcagtgtcggggtgggaaacctgtgccggatgtccgaggggctttgcagaaagcctggcagtgggcggcgtgacctctgcctgggggcggagtggctccttggggctggaaggcagttctcttgagttgggggagatcttagctggggagagggaggcgggggaagtgtgctcctgcatttcgtgacacgtacccttcggaggcgcccgcggcccccgcctgtctgagtctggggatcgtaagcaggggggcagcctggcccatggacagcgtcagtccgcctggagaaactcccctggggatcggctgtgtcccacctgctggggacggtgttggggcacagagaggcgataaactaagtgaaagcaaagagcagcgttgtcttctgccattcttttggaggtgaggagatccggtttccagcactgccttgctccgaattgggagacgtttgtcacctgccttgttcgctgtggcctctattctaaagagcggagatcggataaaggtccacttttgcctgttttatactttttattgtcatataggcttgggaaagggggtgatcgttttgaaattgaagaaggactgcagtttaaggaattccttgacagaatgctagatacgaaatgtgacatttgaatttttaaaacgcttttctggttattatcacttcgtttgtgttctcaattagcagggagaacaaccttttagctgcagaatctaaggtggtgttctaggctatcagactgtaaaatagttaattcttaagttgttgagaagttgaaaataaattcatgtcttcttcttgttaagtttgctttaatgtgtttctggcacctaataggatttgatttgcttttagttctataactttgtgctactatacaattaataaaaaatggcatgattgttgtagaatttgggtatttacttttttgcatgccatattcattctacctggtttgaaaaagttacagaatgccgtatacgtcacagttaaagtgtttgatgtaaaagtaaaaattaagaaccaagaaagaatcttctaggttgcattattaacgcttaaggcaaaaatgactatgacaaatggaaacctatttcaaattttgaaaggattttcaacttttgaaaacattggtagcagtgttatattccagcaatacttccttgcgatttttacgttgaacctgaaccttacaaattgtatgtttctttgaataaggaattcttacttaagtgactcaaagatcagttttgtattgttgtacgtcacaggattacagaattgtcagtagcccgccgtaatttttacttttgggtacatgcgttgttgatcatatggctaatacctccctactgccattccatttcaaatcctgtttctctagggaaagtgggaagtgaggagtcaattcaggtgggtggagagtgggaagtatcttagagtatcaaccgttctttcctcttggcttcctcaggagttcagatgtgttctaagcctgctggagtgaccacacttccaagacctgatggaggccagagctcagagtggcaacgggtcgcagcccttgctgcagacgccccgtgacggtggcagacagcgtggggagcccgaccccagagacgccctcacccagcaggtacatgtcttgtctctggatcagatcagagccatccgaaacaccaatgagtacacagaggggcctactgtcgtcccaagacctgggctcaagcctgctcctcgcccctccactcagcacaaacacgagagactccacggtctgcctgagcaccgccagcctcctaggctccagcactcgcaggtccattcttctgcacgagcctctctgtccagatccataagcacggtcagctcagggtcgcggagcagtacgaggacaagtaccagcagcagctcctctgaacagagactgctaggatcatccttctcctccgggcctgttgctgatggcataatccgggtgcaacccaaatctgagctcaagccaggtgagcttaagccactgagcaaggaagatttgggcctgcacgcctacaggtgtgaggactgtggcaagtgcaaatgtaaggagtgcacctacccaaggcctctgccatcagactggatctgcgacaagcagtgcctttgctcggcccagaacgtgattgactatgggacttgtgtatgctgtgtgaaaggtctcttctatcactgttctaatgatgatgaggacaactgtgctgacaacccatgttcttgcagccagtctcactgttgtacacgatggtcagccatgggtgtcatgtccctctttttgccttgtttatggtgttaccttccagccaagggttgccttaaattgtgccaggggtgttatgaccgggttaacaggcctggttgccgctgtaaaaactcaaacacagtttgctgcaaagttcccactgtcccccctaggaactttgaaaaaccaacatagcatcattaatcaggaatattacagtaatgaggattttttctgtctttttttaatacacatatgcaaccaactaaacagttataatcttggcactgttaatagaaagttgggatagtctttgctgtttgcggtgaaatgctttttgtccatgtgccgttttaactgatatgcttgttagaactcagctaatggagctcaaagtatgagatacagaacttggtgacccatgtattgcataagctaaagcaacacagacactcctaggcaaagtttttgtttgtgaatagtacttgcaaaacttgtaaattagcagatgacttttttccattgttttctccagagagaatgtgctatatttttgtatatacaataatatttgcaactgtgaaaaacaagttgtgccatactacatggcacagacacaaaatattatactaatatgttgtacattcggaagaatgtgaatcaatcagtatgtttttagattgtattttgccttacagaaagcctttattgtaagactctgatttccctttggacttcatgtatattgtacagttacagtaaaattcaacctttattttctaattttttcaacatattgtttagtgtaaagaatatttatttgaagttttattattttataaaaaagaatatttattttaagaggcatcttacaaattttgccccttttatgaggatgtgatagttgctgcaaatgaggggttacagatgcatatgtccaatataaaatagaaaatatattaacgtttgaaattaaa

SEQ ID NO: 6157 - DNA, 2227 bp, Homo sapiens
aaagaatcttctaggttgcattattaacgcttaaggcaaaaatgactatgacaaatggaaacctatttcaaattttgaaaggattttcaacttttgaaaacattggtagcagtgttatattccagcaatacttccttgcgatttttacgttgaacctgaaccttacaaattgtatgtttctttgaataaggaattcttacttaagtgactcaaagatcagttttgtattgttgtacgtcacaggattacagaattgtcagtagcccgccgtaatttttacttttgggtacatgcgttgttgatcatatggctaatacctccctactgccattccatttcaaatcctgtttctctagggaaagtgggaagtgaggagtcaattcaggtgggtggagagtgggaagtatcttagagtatcaaccgttctttcctcttggcttcctcaggagttcagatgtgttctaagcctgctggagtgaccacacttccaagacctgatggaggccagagctcagagtggcaacgggtcgcagcccttgctgcagacgccccgtgacggtggcagacagcgtggggagcccgaccccagagacgccctcacccagcaggtacatgtcttgtctctggatcagatcagagccatccgaaacaccaatgagtacacagaggggcctactgtcgtcccaagacctgggctcaagcctgctcctcgcccctccactcagcacaaacacgagagactccacggtctgcctgagcaccgccagcctcctaggctccagcactcgcaggtccattcttctgcacgagcctctctgtccagatccataagcacggtcagctcagggtcgcggagcagtacgaggacaagtaccagcagcagctcctctgaacagagactgctaggatcatccttctcctccgggcctgttgctgatggcataatccgggtgcaacccaaatctgagctcaagccaggtgagcttaagccactgagcaaggaagatttgggcctgcacgcctacaggtgtgaggactgtggcaagtgcaaatgtaaggagtgcacctacccaaggcctctgccatcagactggatctgcgacaagcagtgcctttgctcggcccagaacgtgattgactatgggacttgtgtatgctgtgtgaaaggtctcttctatcactgttctaatgatgatgaggacaactgtgctgacaacccatgttcttgcagccagtctcactgttgtacacgatggtcagccatgggtgtcatgtccctctttttgccttgtttatggtgttaccttccagccaagggttgccttaaattgtgccaggggtgttatgaccgggttaacaggcctggttgccgctgtaaaaactcaaacacagtttgctgcaaagttcccactgtcccccctaggaactttgaaaaaccaacatagcatcattaatcaggaatattacagtaatgaggattttttctgtctttttttaatacacatatgcaaccaactaaacagttataatcttggcactgttaatagaaagttgggatagtctttgctgtttgcggtgaaatgctttttgtccatgtgccgttttaactgatatgcttgttagaactcagctaatggagctcaaagtatgagatacagaacttggtgacccatgtattgcataagctaaagcaacacagacactcctaggcaaagtttttgtttgtgaatagtacttgcaaaacttgtaaattagcagatgacttttttccattgttttctccagagagaatgtgctatatttttgtatatacaataatatttgcaactgtgaaaaacaagttgtgccatactacatggcacagacacaaaatattatactaatatgttgtacattcggaagaatgtgaatcaatcagtatgtttttagattgtattttgccttacagaaagcctttattgtaagactctgatttccctttggacttcatgtatattgtacagttacagtaaaattcaacctttattttctaattttttcaacatattgtttagtgtaaagaatatttatttgaagttttattattttataaaaaagaatatttattttaagaggcatcttacaaattttgccccttttatgaggatgtgatagttgctgcaaatgaggggttacagatgcatatgtccaatataaaatagaaaatatattaacgtttgaaattaaa

SEQ ID NO: 6158 - DNA, 5325 bp, Homo sapiens
gccgcggccgccgcagaagctccctgcctcctccggaaaggcgagggcgcaggccaacggcgagccccccccgggcgggccccagacccttctcctcctcctcctcctcctcttcctcctcctccgcacccaccgcccccgcctcggcctcgctgcctcgcctccacaacgcccagtctgcaccgccgagagctgcgcgccgcagcgctagcggaggagaggggccggcggagcgcgcagcgcccaggcccccgcgcccgcccggcccggcccggcccgcgcccccgcgccgcctccgctacgacgcggccccggccgcaccacttggcgatctggctttaggttctccgtaaggccgttttcttttcccattcgctcatctgccagaaaaagggacttgccgttggcgcttcggcctcttgttcattgagaaaaaagaggaaatactccgcgtgcgcttgtagaaggggagtcgtctccagctccgaaccccggagtgttcatcagcggggaatctggctccgaattctctttttttctcccgccgattgctcggaagttggtctaaagcagaggttggaaagaaaggaaaaaagtttgcatcgagactggatttatttgcacatcgcagaaagaagagaatccaagggagaggggttggtgcaaagccgcgatcacggtgaggcacgtttggctcttcccctcctggcgccgcggccggcgcgttgtgggcaacatggagtaggtgcagccggaccaggagttgggtccgtctctccccgagcctccctttctcaaatcccgcagggtcttcgcgaggatccggggcgctccccgcggacctgcctcgcccggggcttgggctcggcctgcctctgcggggacttctgtatgcaccccgtgcagtgtccccgacaggcgaccccgcgcgcccgcgctctagggggttgggacggaggacagctagcctgaagtctgctcccagccgtgcactggccgcgaattcggcgctgagagcgggagagggagagaaaaacactttgtattttccaggttgcctttgcaggcgcccgcatttctaacctgttcttcctcttggtggaaggcaaagtccagggagaggctgtccctaggcggggcgctggtggggctgggggacacaggttgcccgcctcgggggcaggagacttccagggtgagaaaaaggcagggtgccgggtggagggagtgcccgcctctgctccgtgtggacagtctagcccggagcgggtgggagcgtcgccctgcctggcgccgggtctctgcggttcggaagtgcagctctctctcttccgttcttcgtggtcagcctgggtcacacttattttatttttggaagctcgggctgacccagcgcaggaagaaagtcatcaagcggtcgcgatcattttccattacctgaaagtaggtggcaaaataggcaattttttatttccttttgttgttgttgttgctgtgttttaatttggattcttgtgtgttttttacaaagcagtttctgtgtccgtttgccccaccctagagctgaagttcttttcccctaatcctcagtctgatcacacactgttcttaatgggggtttcaaagcactttcaaaggggaggggggactgggaaagagaagaggggcggaggtagggagtccagctttgaagaaggaggccagggatcggatcggcagaaatcacttaaaaaataaaaacaaaaaagcccccttttatttcaaagatgctactttgactgcaagcaaatctgcaccgaaagtttacagctccgggagctgggtcctgcgcgcccggagtgagcagtgggaccctggaaaatgccctttttttaaaaagccatttttctttcactttaagaaatatgatatcttttttttttctctcgacccaaaaggagataggcgtgtgcagattacaggcaatgcccccttcggtcagtgcagcgtggagtcgccgtgtgtgcgtgggttggacttgtgcgtcctggctgcgtgtctcaggcagggctttcgtgctcgcagtgtcggggtgggaaacctgtgccggatgtccgaggggctttgcagaaagcctggcagtgggcggcgtgacctctgcctgggggcggagtggctccttggggctggaaggcagttctcttgagttgggggagatcttagctggggagagggaggcgggggaagtgtgctcctgcatttcgtgacacgtacccttcggaggcgcccgcggcccccgcctgtctgagtctggggatcgtaagcaggggggcagcctggcccatggacagcgtcagtccgcctggagaaactcccctggggatcggctgtgtcccacctgctggggacggtgttggggcacagagaggcgataaactaagtgaaagcaaagagcagcgttgtcttctgccattcttttggaggtgaggagatccggtttccagcactgccttgctccgaattgggagacgtttgtcacctgccttgttcgctgtggcctctattctaaagagcggagatcggataaaggtccacttttgcctgttttatactttttattgtcatataggcttgggaaagggggtgatcgttttgaaattgaagaaggactgcagtttaaggaattccttgacagaatgctagatacgaaatgtgacatttgaatttttaaaacgcttttctggttattatcacttcgtttgtgttctcaattagcagggagaacaaccttttagctgcagaatctaaggtggtgttctaggctatcagactgtaaaatagttaattcttaagttgttgagaagttgaaaataaattcatgtcttcttcttgttaagtttgctttaatgtgtttctggcacctaataggatttgatttgcttttagttctataactttgtgctactatacaattaataaaaaatggcatgattgttgtagaatttgggtatttacttttttgcatgccatattcattctacctggtttgaaaaagttacagaatgccgtatacgtcacagttaaagtgtttgatgtaaaagtaaaaattaagaaccaagaaagaatcttctaggttgcattattaacgcttaaggcaaaaatgactatgacaaatggaaacctatttcaaattttgaaaggattttcaacttttgaaaacattggtagcagtgttatattccagcaatacttccttgcgatttttacgttgaacctgaaccttacaaattgtatgtttctttgaataaggaattcttacttaagtgactcaaagatcagttttgtattgttgtacatcacaggattacagaattgtcagtagcccgccgtaatttttacttttgggtacatgcgttgttgatcatatggctaatacctccctactgccattccatttcaaatcctgtttctctagggaaagtgggaagtgaggagtcaattcaggtgggtggagagtgggaagtatcttagagtatcaaccgttctttcctcttggcttcctcaggagttcagatgtgttctaagcctgctggagtgaccacacttccaagacctgatggaggccagagctcagagtggcaacgggtcgcagcccttgctgcagacgccccgtgacggtggcagacagcgtggggagcccgaccccagagacgccctcacccagcaggtacatgtcttgtctctggatcagatcagagccatccgaaacaccaatgagtacacagaggggcctactgtcgtcccaagacctgggctcaagcctgctcctcgcccctccactcagcacaaacacgagagactccacggtctgcctgagcaccgccagcctcctaggctccagcactcgcaggtccattcttctgcacgagcccctctgtccagatccataagcacggtcagctcagggtcgcggagcagtacgaggacaagtaccagcagcagctcctctgaacagagactgctaggatcatccttctcctccgggcctgttgctgatggcataatccgggtgcaacccaaatctgagctcaagccaggtgagcttaagccactgagcaaggaagatttgggcctgcacgcctacaggtgtgaggactgtggcaagtgcaaatgtaaggagtgcacctacccaaggcctctgccatcagactggatctgcgacaagcagtgcctttgctcggcccagaacgtgattgactatgggacttgtgtatgctgtgtgaaaggtctcttctatcactgttctaatgatgatgaggacaactgtgctgacaacccatgttcttgcagccagtctcactgttgtacacgatggtcagccatgggtgtcatgtccctctttttgccttgtttatggtgttaccttccagccaagggttgccttaaattgtgccaggggtgttatgaccgggttaacaggcctggttgccgctgtaaaaactcaaacacagtttgctgcaaagttcccactgtcccccctaggaactttgaaaaaccaacatagcatcattaatcaggaatattacagtaatgaggattttttctttctttttttaatacacatatgcaaccaactaaacagttataatcttggcactgttaatagaaaggtgggatagtctttgctgtttgcggtgaaatgctttttgtccatgtgccgttttaactgatatgcttgttagaactcagctaatggagctcaaagtatgagatacagaacttggtgacccatgtattgcataagctaaagcaacacagacactcctaggcaaagtttttgtttgtgaatagtacttgcaaaacttgtaaattagcagatgacttttttccattgttttctccagagagaatgtgctatatttttgtatatacaataatatttgcaactgtgaaaaacaagttgtgccatactacatggcacagacacaaaatattatactaatatgttgtacattcggaagaatgtgaatcaatcagtatgtttttagattgtattttgccttacagaaagcctttattgtaagactctgatttccctttggacttcatgtatattgtacagttacagtaaaattcaacctttattttctaattttttcaacatattgtttagtgtaaagaatatttatttgaagttttattattttataaaaaagaatatttattttaagaggcatcttacaaattttgccccttttatgaggatgtgatagttgctgcaaatgaggggttacagatgcatatgtccaatataaaatagaaaatatattaacgtttgaaattaaa

SEQ ID NO: 6159 - DNA, 329 bp, Homo sapiens
tctaacttggttttcttttttttttttttgagacggagtctcgctctgtcgcccaggctggagtgcagtggcgcgatctcggctcactgcaagctccgcctcccgggttcacgccatcctcctgcctcagcctcccggctagctgggactacaggcacccgccaccacgcccggataatttttttgtatttttagtagagacggggtttcaccgtgttagccaggatggtctcgatttcctgacctcgtgatccgcccgcctccgcctcccaaagtgctgggattacaggcgtgagccaccgcgcccggcctctaattcagttttttaa

SEQ ID NO: 6160 - DNA, 98 bp, Homo sapiens
tctaacttggttttcttttttttttttttgagacggagtctcgctctgtcgcccaggctggagtgcagtggcgcgatctcggctcactgcaagctccg

SEQ ID NO: 6161 - DNA, 329 bp, Homo sapiens; identical to SEQ ID NO: 6159

SEQ ID NO: 6162 - DNA, 434 bp, Homo sapiens
aggggaacagaaaaggggagaggtagacttgaaatggattctggataaagtcttaaaacctgcaacttgtttttcatgctaacactgcgtggcccagattagtcttaaatgttcattcccctttcctggtggcaaggagaaagttccctaagtcagctcgagcctctggctcgtcctcattgcctctgggcaaaccttaaggtcagtgtttccttgaaactagataaactgaccctgcagtgcccagcccggccccgcgggcgccccgcgtgacggcgctcgggcggcaggaccggcctggggacgcgcggggcggcgcggttgcccttttgaatgcctcctgcggctcggagcgctggcgggcgctggagtgtgagtgaatgtagccccgcggagccaatgagctgggaccggatgcgatatatcctctggga

SEQ ID NO: 6163 - DNA, 5711 bp, Homo sapiens
ttggttttctttttttttttttttgagacggagtctcgctctgtcgcccaggctggagtgcagtggcgcgatctcggctcactgcaagctccgcctcccgggttcacgccatcctcctgcctcagcctcccggctagctgggactacaggcacccgccaccacgcccggataatttttttgtatttttagtagagacggggtttcaccgtgttagccaggatggtctcgatttcctgacctcgtgatccgcccgcctccgcctcccaaagtgctgggattacaggcgtgagccaccgcgcccggcctctaattcagttttttaatgggctctgatctctaaagtataactcattggtttgaatattgagcataaagtgatagtcaactgaaatttgaagaggatttgaattaagtatattaagtcctatgaaaataatttgtttaaagataaataagaaaattggagcccaggcatggtggctcacgcctgtaatcccaacactttgggaggctgaggcaagtgaatcacttgaggtcaggagtttgagaccaacctggccaacatgatgcaaccccgtctctactaaaaatacaaattagtgggcatggtatcaggcacctataatcccagctacttgagaggctgaggccggagaattgcttgaacctgggaggtggaggttgaagtaagccaagatcgtgtcactgcactgtagcctggacaacagagtaagactctgtcttaaaaaaaaaaaaaaaaaaaagaaaattggatttttcaagaagcttccaactaacctgttaaatgttgactttatctatataccagcatagaattaattttcaaaatatggaagattaaatatttatgtctaatagattaaaagcaactggcactcattcactgcattaaaaataatttcttatttttatttttattttttgagacaaagtcttgctctgtaacccaggctggagtgcagtggcgccatctcaactcactgcaaccactgcactgccgggttcaagagagtctcctgcttcatttcagcctcctgaatagctgggattacaggtgcgcaccaccatgcccggctaatttttgtatttcagtagagaggggttgcactatgttggtcacgctggtcttgaacacctgtcctcaggtgatctgcccacctcagcctcccaaagtgctgagattacaggcatgagccaccgcacccagcaattttatttattttttaggttattattttttgaggcagagttttgctgtgttgcccagactggagtgcagtggtgggattttggctcactgcaacctctgcctcccaggttcaagccattctcctacctcagcctcccaagtagctgggactacaggggcacgccaccatgcctagctaatttttgtatgtttagtagagattgtgttttgccatgttgaccaggctggtctcgaactcctgatctcaggtgattcatcacacttggccaaaaataactgttttaatgttgcaaattatctcacttgggaaaaaatatggaggaataacctcaatttcttaatctctatttaaagttcatgaaaaattataacatgataaatttgtaatccaatggccattattttgatgtgatagagtaaaagtatgatgataatgcaaacataactgctaagcatttaggggaattttaatcatttttgtggtttcttgctttttaattttttttaaacctgtggatgctctatatttgagattcatataagaatgacaacttgattgttgttacttaaaacattcatttatgtgttttgaggaggagattttaaggccctgccaaatttctgccatgttgtagcttgctctggggattgtctgtgaaagaagaaagccaaaacccaggcaagtaatcccaaccaaactttttgcataacttctttcttcagtatacttctgtctcaaggactacttgactccaggatatgtaagttaaggtactgatgatgtcagataaatgaatttgctcttgcacagtgctgtaaggtatttgataggcagttgatgggtttgatgtaatttattaacttttaagcatttaggtcaaaattttcaaaggtttaatggttttagagtttcacttgaagtcatacccacaattggccatttgtcttcctctcctaaatgtgcacaaggaccagggtataaacacagaagtttcaactttgaaaatgggctgaatttgtacagctcaaaaacaggtctgtcaacttgtggagaatattttacattgttttcataaagaaaacatataatagtaggttattaactagtcacgtcattattgtatcagtatccagtctctggtttgcaatatccgttaaggcaaaagtcatgttaatttctattttaatttggtctaatgcctcacttctttatgacatactaagggtgggtctccattgagtggagatcagattagaattttaacaaggcctatctgatttgacataaaactgatcatcagagtaaagctatacatctggagtatttcatcatgggtttggccattcacaagaggataagagtaagactgtatatgtcctatactgtagattttatttgtacaccacactgccactcccttttcaccacaagagacaactgtgtgaataatgagaggcaaaatgtgaataccgctgatgatactgcacctctggtcaaaatttaacttaatacattcatttaatttacaatcaaagaagaaaaaagggagatagaaatatagcaaaagaggaaaaaagtaacatttaaacttttttccacgcctagcaaatattttacatttttatttaatactacattttgattgattgacttaaataatttttaaaagtcagtcttatttggcaactcatacttttttttttttaaataaactgttaaaggagattagaaagaagccttggcctctggcttggctagatgagacatgtaaggcttcagcatcacttatgaatttatttctcaaaacagttgctaatacacagagatgaataaataatttgacttaatacaaggactcacttggaagagaatttgggcacagaaatataaatttggcatttcaacctagtttttggatgcctactgcttacaaattactgggctagttgatctaatgcaaaaggaaagcggtagcaactctaatgcaagacaggacttagaagcacaagcaagatgctatgagagtgcagaaattgagggaaacgttgatgcattctcgttagttggtttgatcgccatgtctttgcaatggtttcagatacttaaatacctcaagagtttttgctaagacagttgcaacagaattagcatcactcattaaataaaactatgctcaccatcccatatccacatcctaaaatgaattgtagaggtgtttaatgaatatgtgaacaactacatgttgctatgtgcattcttttttttttttttttggagatggagttttgctcttcttgcccagggtggagtgtaggggcatgatctcagctcaccgcaacctctacctcctgggttcaagtgattttcctgccttagcctcttgagtagctgggattataggcatgtgccaccacacacggctaattttgtatttttagtagagacggggtttctccatgttggtcaggctggtctcgaactcctgacctcaggtgatctgcccgcctcggcctcccgaagtgctgggattacaggcgtgagccactgcgcccagtcgctatgtttattcttaattttaagattcatgactcactaaaatcttcccttaaaaaaatacaaataaaaaaatactttttcaagatgtagaactaagaaacaagttgaaaagatctgtctattcttgttcttccagttcttgctggaatttaccttttgccattaacccatagttttagcttgcttctgaacctagagaaggatgaattggaaataatcaagttaggggggcaaaaaaaaaaaaaaagtgtaaatgatattgtgaaaagaagtggttgagctttggagcaattctgcccttgtcaaaaaatacccgagacctggctgctcaggctcacatgcctctcaaaacctatgtgaccctctccagttcctaggccaatgcaactttcatttttggaacagtttttgctccaaataaaatctagtttattgacttgcaccaatagtgtttacagtcaagcagggttccaataaatatcatgtttgtatcatctctcatttctccagattcctagtaggcatagtgcacccatcctggcctcaaacgcagatttcctcctccaaagtagtcataaaatagccaaaatatatctgtagctactcacactagaaggccgctcctgagtttcctattagaaagtcatgtttgtaagttcagaacagcatttaagtttgcatatctaggctgggtgtggtgacttatgcctgtgatcccagcactttgggaggctgaggccggcggatcacaaggtcaggaggttgagaccagtctggccaacatagtgaaaccccgtctctactaaaaatacaaaaaattagccgggtgtagtggtgtgtgcctgtaatcccagctattcgagaggctattcgggaggctgagacaggaaaactcgggaggttgcagtgagccgagatcatgccattgcactccagcccagatgacagtgcaagactctgccacaaaaacaaaacaaaacaaaacaaaaaatttgcatatctaatggccactgtgaacattataaaatgtagtgaccaagcagcctagcatgtatcaagcaatagcacatacaaagcctttggataaatttagtacctgctctgttggcaaagctaatggctaggatgccccaagagatgtttgtctctgacacatgactctagtagtgagtaactgactccaggaacatgggcaaccacacaatcaacatttgcatttaggtcttgatgtcacctggactctgacctacacaccattaggatagagcctaattgatttagttttgtttgaactgtaagtgtaagcttaaactttggaaatactgaaaatatgaattattttacagagtactggtttacttcaaaccatctgtgaaaagtcacatgatgtgactctgataatgtgtcatctgtttctttgcccttttacatgaacaaccaaaactataggcccagagtgtaattacttgtcactaatttagtatttattgtgtatcttcagtgtaaaaggtattatggtagatagggaaaaagcattcgttagatctatgactatgaacaagcaaatgaggaatgactgctcatgaccctttggaagctgattatctaggaattagattataaatcatagaaaatgactggtagccggccgggtgcagcagctcatgcctgtaatcccagcactttgggaggccaaggtgggatcacaaggtcaggagtttgagaccagtctggccaacatggtgaaaccccatctttactaaaaatacaaaaattagccaggcatggtggcaggcgcctgtagtcccagctactcgggaggctgaggcaggagaatcacttgaacccgggaggcagaggttgcagtgagccaagatcgcaccactgcactgcagcctgggtgacagagcaagactccaact

SEQ ID NO: 6164 - DNA, 2258 bp, Homo sapiens
tttaaatgagaagtactgactttgtaattaaaaacaaaaactattttaaaatgtgctaaattttggacctatctcagcctgagaaggtttttttctaaaaaggttcaggcatctttttattttcctactgctctccttacctgtgcacacctcattgcctgtatctgtgatgcctctatttggagggaacctgggttatgcctgggcctggtttactcccataacatgggttgctgtacttgcccacttaattgtgagctctatccatccaggaaagtaatctgttccttattttgaatagcgtgttcttagaagttcatgggttctaattgaaggaaactagagggaccccttccatccttcagcaagggtccccaaagataggcagggtgcccagagaatgcctcaactgctgagaactccaccctttcaggtccagtgcaggctcatctccagaaaagctgggttagagttgtctcactgtttgggttggaatattgtgatttctaggagtggaaatgcacttgctaatttagctatctcctctttataagacgctcatggaaataaagattagccataaaatacctttaatgagcttccaaattttatctgcaaggaacccagggcctgtggcattatactggtttgtagaagactcctgtggtgtctgcagaaactttctctggtgaatatctagaatttccattactttgaatgtgtacatgttattaatcaaggaattaatcatccccattctctttgattgaaagtcacattaccttggaaggacaaggtgttgtcaaatgggcaaggcagatcatatgttttcttttactggactccttatttttctaattacagcctgtgtatcctgtgctagagagcctcttgaaattaacttaatttactatcacacttgtaacatacccatttatttgggcctgtgaatatgtgtgcactccatttgattacatctaatgttctccctaaataaagagtacaattaattcattagaggatggtttgtttccaggggtaagtgccagtttatgatgattccatcaacacttgcaccacattaatttatttccaatttaatcagtgtttaaattgaactgggatcaggcagaacaaaacacatggttttgcataattataatggagcaaatggaaatagtcatagcacttcagcattagaaacctcactgcagaagcacagatgggttaggagatgttgattaaaaaagatgtctaggaataaatcctctgtaagcactgtattaaaatccaagtgcctgcaggacaagcgactttgcattaattactaaaaaatttcttattctgggtatagctttctgtagaaatcctacagattgagtaaactgtggaggcactccttttcatgctccatttaacttaaattattagctggttcagaaagttgtttcttcccagacttgtctaggaagttcaatatttagcaattacccctttgtgcttctcgaaccttctccaagccagtgtcgttgaaggacagatttgccatgtgggaaggtgggctaccttggaaaacagatttttggttcggagcttgtctgaaactctctagattaagaattgtggccgggcgcagtggctcgcgcctgtaatcccagcactttgggagaccgaggtgggcggatcacctgaggttgggagttcgagaccagcctgaccaacatggagaaaccccatctctactaaaaataggaaattagctgggtgtggtggcacatgcctgtaatccaagctactcgggaggctgaggccaggagaatcactggaacccaggaggcagagattgtgttgagccgagattgctccattgcactccagcctgggcaacaagagcaaaactccatctcaaaaaaaaaaaaaaaaaaaaaaaagagagagagaaagaaaaaaaaagaattgcactggatgggtttgctccttcaaaactaacaggagagagaggctgaacaaatggtgttcttcaggcaaggggcttcctgacgtgtagtcatttgttaactgcccgagttttggtcttagaatttcttttccctctcctcctcttccttcttaataaatcatcacaaatacagttgaagtctccccttccacactgtgttccatttctctccattcagagaacccctagagaaccaccccctttttttaaattaaaatttattttgaaataatttcaaacttagagaaaaatcacaagg

SEQ ID NO: 6165 - DNA, 300 bp, Homo sapiens
ccagaaagtgcctttacatttttgtcttggaacaactctgcaatttcatcttgatttaatatttctagtaataaagcatcttccgactccacattcttatctctgggcagacattttattcttaagaattgtagtgattgataagaagctaaatggaaatgattaacgtgtcaatgattaataattataacaacattcaaacacttagaaattatagtatttcatcagatgtctttttaaagaggcatttctggccagttgtggtggctgacctttgggaggctgagacggctggatcac

SEQ ID NO: 6166 - DNA, 577 bp, Homo sapiens
gacattgcaggtaagtgcagtggcataagcagaaggaagggaaggacatatttgggcacagtcattctgctaccaccaaaagcatctgcctattggtgaactttccacatggcttttctttcattttgctgctgcgcctttgctttgtattattggagctcagccttctccctttctattgtttttttttttctttatcgtatatacacacctaagtttttccatcttgcatcttcccacaatctcacttctccctctggctcctgccccgtctttctccttttgttcatactcagtctcaaaggaagagtctatagtcactatctccacttctccacctgccatttagctttccaccctctgcagccagaatttgaccctcagaactccactgaaactactctgtcaaaagctacaaattattgcctaattgtcaaagtcaatgggttatttttcatattcatcatatatggcatttaacattatagctctagattttgcccccaccttcctttatgaaactcaataccaaaaatctcacacagcaactcaatagcaaaaaaaaaaaaaaaaaaaa

SEQ ID NO: 6167 - DNA, 455 bp, Homo sapiens
gcactattcacaataaacaagatatggaatcaacctaatccatcagtagatgaatggataaggaaaatggggaatatatatacaatggaatacgattcagccataaaaagaatgaaatcctgtcatttacagcaacgcagatgtaactggaggtcattaagtaaaataaggcaggcccagaaagacaaatattacatgttctcactcatatgtaaaggctgaaaagagggatctcatggagatagagagtagactggtggttgctagaggctgggaagtggggaggttgaagagaggttgatgatgggtataaaaatacagttagatagaatgaataagatctagtgttcaatagtttggtagggtaactatagttaacaatctattgtatatttcaaaatagctagtagagaagaattcatatgttctcaacataaagaaaagataaatgtttg

SEQ ID NO: 6168 - DNA, 856 bp, Homo sapiens
gagttttattattttaccttttacatttaaatctacagtccacctggaattgatttttaggtatgacatgaggtagaggtcaatattgtttttgtttttttttttccccagatggatatcaaattaatccagaacaatttatttaaaagactttccctttccagctactctacagagccaattttgtcataagtcaaagattcatgtgtggatatgtttctggactttcttttttgtcctgttggtctctttgtaagtctttaagtcactctcttcattctcataacttgaaggtcttgctatctgatagtgaaagtcttccactgtgttgcttctccaagagtctcttggcttttcctggtcctttgcatttcatttaattttagaattagcttgccaatttctaccaaaaaaaaaagtgatggaattttgatacatgggatgaataaattaattggaggagaactgctatctttacaagattcagttttacaatccttgaacgtggtatgttcctccatttaaccaaatgttttatagttttccgtgtagcggtctcatacatcttgtgttagatttagtcctagagaactatactaatataaatggtaactttttaaattttcctttttttttttttttttttttgagacagcgtttccttcttgttgcccaggctggagtgcaattgtgtgatcttggctcactgcaacctctgcctcccagattcaagcgattctcctgcctcagtctcccaagtagctgggatttcaggcacccaccaccatgcccagctaatttttgtatttttagtagagacggggtttcaccatgttggccagactggtctccaact

SEQ ID NO: 6169 - DNA, 549 bp, Homo sapiens
gtttttttctgcatctatgaagctatataattatataatttttcatctttattgatatttatctttattcccatttattgatttggggatgttaagtcaatctgtctttcctgaaataaacttaacttgacagtgttatattattctacccataattatttttaagattttttttgcatctgtgttcatgagagattggtttctaattttcttatcaagtttggtatcaaggttatgctaaaaatcagctgggtgcagtggctcacgcctgtaatcccagcattttgggaggctgaggtggccggatcacctaaggccgggagtttgagaccagcctggccaacgtggtgaaaccccgtctctactaaaaatacaaaaattagctgggtgtggtggcacaagcctgtaattccagctacttgggaggctgaggtaggagaatcacttgaacccaggagctggaggttgcagtgaggcaagatcaggctactgcactccagcctgggtgacagagcgagacttcgtcccagaaaaaaaaaaaaaaaaaaa

SEQ ID NO: 6170 - DNA, 310 bp, Homo sapiens
gaagtttttttttttttttttttttttgagacagattctcgctctgtcacccaggctggagtgcagtggcgtgatctcggctcactgcaagctccgcctcctgggttcatgccattctcctgcctcagcctcctgagtagctgggactacaggcgcccaccactatgcccagctaattttttgtatttttagtagagacggggtttcaccatgttagccagaatggtctcgatctcctgaccttgtgatccgcccacctcggcctccaaagtgctgggattacaggtgtgagccaccacgcccggccaaa

SEQ ID NO: 6171 - DNA, 3647 bp, Homo sapiens
gtagcaatggggtttcaccatgctggccaggctggtctcaaactcctgacctcgtgatctgcccgccttggcctcccaaagtgctgggattacagatgtgagccactgcgcctagcctgaaaataatgtttaactcccatttatatgttaggctgctcagatatattaaacacatacacacacaacacacacacacacacacatacacactgcacaaggaaacagagggacaaagcaggaagtccaagtttccattaaaccagtctttaaatggttaaatttagtaggaaataaaggcatccttaatagaagttgagaagcacaattcaatagtgacacctaaaaaaaaattaagacttgattagttgaataaaatcaattgtgaacattgctcagttactggtgatgctacaggaaaaaaaaagtgatgccaggatagatttgttaggcttgtttaaaaaatacataaaattgttcattaataagactttaatatccagtttttatgtctgtgattaaatatcattttttatttttaaatggtatagtttttaaattttgaaacaattaattttgcataaatatttgtctatgtacatatatacatgtgtattcacatatatatatgaaggacacttagctatcttatttactgaagctaaagaagtaggtccttaaaaagccattgacaggtcttgagtttgcaacgtgactgtgaaacaggcatccttgttactcacacgtttgctgaaaggataacagaaagccctcgatagaaaaatctcactagattgtttataatttgttgatatttggagtatcttgagtggtaaactttaaatgtggatttattttttctttccttttaggatttggatctctccaatcttttttatgattaattgttcagtgtttatgcattattgcgaagtgataatgaaaatgctcaaactcagggtcctgcaggcactgtgggggaggcagtggggacgtgaggggattacagatccagtagaagccccccgacccccatctgcttccaccccatctccttccagaacaccaccgatagccacaccgaagagttctcccatttgctggttcccggacaaaaaagctgctgatcccttgagcacactgcagtgaagctcccagctgacatgtcctgtccatgtaaacagaacttcctccatgtaaacagaacttccagcattgtttgtgttttcctcttaactatgtactgacatccaagggttgttaggaatgtttggaaagtctaggtacaaaagagagacctaaataaaataaagcaaacaccagccaccataacaaaaggaccccagagataggcagcgcagggaacggaagactcaataaactataattgtggtatccaaagaattagtatagaaggcaaaatggaatcaaatatcatgatgaaaagtgtaaatgagggaataaggtcagaagagaacattcatttatatgatttcttctttttttttttaaccttttaaacctctatttaggttcaggatacatacgcaggtttgtgacataggtaaactcatgtcgcaggttgttgtgcaggttatttcatcccccaggtactaagcctagtacccaatagttattttttcctctccctcctcccacccttcaccctccaccctctgataggacccagtgtttgttgctcccctctttgtgtccacgttctcatcatttagcttccactcataagtgagaacatgcggtatttggttttctgttccctgcgtgtgtttgctaaggataatggcctccagccccatccatgtttctgcaaaacacatgatctcattcttttttatggttgcatagtattccatggtgtatatgtaccacaatttctttatcccatctgccatgcatgggcatttaggttgattccatgtctttgctattgtgaatagtgctgcggtgaacattcgcgtgcgtgtatctttatgggagaatgatttctattcctctctcctctggttgtatactcagtaatgggattgctgggttgaatggtagttctgtttttagctctgaggaatcgccacactgctttccccaatggttgaactgttttacacacccaccagcagtgtgtaagtgttcccttttctccacaaccttgccagtatctcttaatttttgactttttaataatagccattctgactggcgtgagatggtatctcattgtggttttgatttgcatttctctaatgatcagtgatactgagccttttttcttatggctgttggctgcatgaatgtcttcttttgaaaagtgtctgttcatgtcctttgccttctttttaatggagttgtttgttttcttcttgtaaatttgtttaagttccatatagatgctggatatttgacctttgtcagatgcatagtttgtgaatattttctcccattccgtaggttggctgtttactctgttgatagtttcttttgctgtgcaggagtgcttaagtttaattagatcctatttgtcaatttttgcttttgttgtgattgcatttggcatctttgtcatgaaatctttgcctgttcctatgtccagaatggtattgcctagattgtcttccagggttttttatagttttggcttttacatctaagcctttaatccatcttgagttgatttttgtacatggtgtatgtaaggaaggggtccagtttcagtcttccagagcagaactttctaacttgtgtgtgggtgttgtgccctgggcaggttaacagatccctccaactcgaggagtctgggtggctggagctctgcactggtcacctttggggtgagtagcctggccccaaagtgacatacaaacatcattttctgtgtgtgtcacagcctggagaaaggtgagaagtcccagatgatatcagtctaagagttttgtacttgacagaaaaagagaacaaagagccagtctggaggaaatcagcaagtgccttacatttttttcccaagctaggcttggtggctcatgcctataatcccagcactttgggaagccaacgtggaaagatagcttgaggccgggagtttgggaccagcctcggccaccgagcgagaccctgtctctacaaaaaataaaaatgaactgggcgtggtggtgtgcacctatcatatctagtctttggactagaaaaatctaaaatggtttggtaagactttgctgttgctttaaagcaatggtccccaacctttttggcaccagggaccagactggttttgtggaagacagtttttccactgataaagttgggggtatggtttcaagataaaactgttccacctcagatcatcaggcattcgattctcatacgcagcatgcaaccaagatcaccacgtgcacagttcaccgtaggttcactctcctacaagactccaacgctgccactgacctaacaggaggtggagctcaggcggtgatgttcgctcacctgctgctcacctcctgctgcgtggcccagttcctaacagaccacagacggatctgctggggactcctgcatataaagtaagtgtgtttggagggaaagtaactaatttaaagagattcccaccagccaattagaacaagaagaaaaaaaaa

SEQ ID NO: 6172 - DNA, 761 bp, Homo sapiens
gtattcccatgtcattactgtgatttttattattattagccctatttatatcccataatgttgtacataatgttttattatgtacaaaacctgtgagttttaccttcagtgaaattcctagaagtggaatttttaattcagatagtatgaatgtttccatgacattttcttttcttccttcactttattgtattttacttttatttttgacataattctaaatcatactcaggaaatactggtgtaccaatttacagtattgttactgatcgtgggttcttagattctcatgcagtggaaattgacatgagacagagaaagtgtcccagacaaggctttataatgggcttatgctggagcaggagggcagcggcacaggggcaggagttcccgggctggccctcgggacaggtgttcctggtgttttagggtgacatggatagtcatgaggtgtgtcagcagcattacacacgctagtggcaggcaccggggaacatcatgttagcacagatgtgtcatgatcagggcatggcagatgagcccctgaggagagggttttagtaatacaacaaggcaagaggtcaggatcgtcgttctgatcctgtatgcatgtgggcatcaggcttaactcccttgggtaagatttggggtggaacatggcttatcttgtttccctccctggtttgcatggtctggtgggcaggtgtgatggcgtgggggatgtatggaaaatacgggagtgggtacgggccaagctctgt

SEQ ID NO: 6173 - DNA, 710 bp, Homo sapiens
tgtcctaaagattggcttcggaaaactgaggtacagaaaattaataattaatgttcacatgctgtcaggaatactcagatgcgagggggcatctgagtccattttttgggcacttttgctttctgggatgctctcgtgcctaatgacagccctgcagctgcctgcatcctttctggtgggggtcaggcctgatgcgatgagatctgatgtgttcagtgaccttctagttaaggtcctgggccggccttgtattgctggggcttttatgtgtgctgggattaacaccagtgactgctgttatcagcatagatggcgtttgttctcatttcaggaccgtatctgagtaattgcatccattgtgatgtgccaccaaagagaaaagtactttggtcatactcgactatgtaaactaagtattttaagttaaggccaattccaatgcattttattacaattcagcatgaaacagttaacacggaccagtaacagtagagtgaaattagcatgaatagaaccaacattcttttccacatatgtaataataagggcacccaagcagatgttgtacggtcccagggaagaccacacaccttacatttccaggcttactgcacttgggattaagccaaggcatccaaagaaagaaaattttttttttttttttttttgccaggctggagtgcagtggtgcgatttcggctgactgcaac

SEQ ID NO: 6174 - DNA, 808 bp, Homo sapiens
aaagagggggcctccttccctggaggccatctgatgagggtcgatgggccagtttgagaaccatttgtggcaagcgtttaaatcccaggctgctttttgccccagtacctggtatccagccatcgattgatgtgctacgagagaagatgaaccaattttattattagcctgaacaaaacataattaggaggagaaatttgcttctgctgttgcagttgctgcagcaaagaagttacataaggttcattcggatgacttgggaacaccttccctacttccctattcctgttcccgtttctctggcttgaaccaagtaaatagaggtccagagcctccactctgccctctagaaattcccaagacagaaatgtgctcaaggagcagatctaagaccctcagcctatagcggacacggaacaagggcacaaatcgaataagtcagtgcattgtcatgatgaacatgtggacaaaggcaagaaaagggagaagggacaagagagaggagcagactggaggagaaggaataaagagctgaggcatagctctgctcctgtgatgttagaggaagggaaggtggaaaaaaaaggcattgaattattctcagacaatttcagaaggaccagatggattctggaaggaattaactctgttatgtcctgtactagtatcattactacactctaagatgggcaaacgaaaggatttggagcattttggcagatactctttgggtgattgagagggggaggtaggagggcatggctgttggggtgactatatgggggtcgcatttgggctgaaagttaag

SEQ ID NO: 6175 - DNA, 430 bp, Homo sapiens
agcacctggtcaggatatcccagtcatcacctccgggaagatgatgttccctggatagcccatacattttctcacctccatacctagctaacactgctgcatcagtcccaatgaccccacttcccatcctttactctctgagatctggatttgccttcaagatgcaccccccatgccactttcttaaggtagtcttctcaactccccccaaagaatgaactattatttttggggggcttccaaagcaaattgctttgaaattccaaaagatcatacattctgttttaatcatagtgggttgttaagctcctgcactagactataatgctacttgtggatagggactatgatttgtttatatctgtaacttccgtctcttgcctcttttccccagcatagagcagaatgactgccatacagtaaatcaaaa

SEQ ID NO: 6176 - DNA, 408 bp, Homo sapiens
aaattagctaggcatggtggtggcgcctgtaatcccagctacttgggaggctgaggcaggagaatcgcttgaacccaggaggaggaggttgcagtgagccgagattgcgctactgcactccagactgggtgacagagtgagactctgtctcaaaaaaacaaaaataataaaaaataaatttctgagaaagaaaatagtttctttttttttctatttttctgttttttttaaacctctttcctaattacttacaaggaaaaaaaagaaggcagccctccctctcaatctctcagttcttttgcttagaagacaaaagatccttcagaattagagaggaagaggggaaaagaaaaaaaaaaagattccagttaaaaatcttaaaaatcttcatcagggtcaaaaacctga

SEQ ID NO: 6177 - DNA, 14175 bp, Homo sapiens
gcgacgcggaaccgaggcggcggcggcggctgcggcggcaggaaatcggggctcggccccgccggcgcgcgaccccatccccatcccggtccctgcagagcgatccccgggcccagatatggacgcagcagagccgggtagggggtcggggatccgggaggggcctcccccgaccatcccctgcttcctacattgagggcacacacttgtcccgctccgtcctgagagccaggagaggagttcctgaatgggaaggacccagggatcctccattgtggggagccctgtgcccggatgggttcaggaccccagcccttcactccccctcccccttttgatccctcaccccagacgcctgggggagggggcccaggaaggggaagtgactgcttctgcttctgatttttgtgatgggggcagggtgccacgactgctgagggagagggcaacgcggtaggatccccacagggcccctctgtagccctggggagtcggcagtgctggtctaggccccttaggagagggggcaggggggcagcagtagaaatgtggcggggtccgacttggtgtttccggccgtctttgtgtctgtgttgtgtatgtggagtgtcattcggtctttatgtccctcacggcttcagtctctccatgtgtgtttctgccccaggctctgcctggctgtcccttgtgtatttccatctgtctagcccgtggttccattgtcagaccggctttcttctcgggacagcctggttgcatctggggcatctgttttgttggtttgcttctgggtgcaggcagacccagggagtgggtgtctctgttccccgagcagctgtctctggtctctggtggtgtgtgagtccatctgcctgcctcgagttggccccaaccaagccccccccagccctctctttctctctctcactcttccctttctcttccaccccctccaaatgagactggttgaggtgccgtgggtggagggaggcagtggttagcccatgtattacactcccctcccctaggactccccccaggtcctgagggcaggaagaggtacagtgacatcttccggagcctggacaacctcgaaatctcactggggaacgtgtgagtctgagcctggatcacccccaaatcctgccaagatgccccaagcccctaaccatttaggtgccttgcagtcccatttggaacctgtaacatctggacctacatacctaataaccagagaagtctaggatgggaccctccaaaatgcctcggtatcctaaaagtgtccccctaaatagactggaaatccccaaagtggtcctagaacccctacatatccttgtaaccccttaaaatatttgcgatccctataatcccactctatgaacctcaaagttatctggggcccttcagatgctttttcaagtcctatttaaaaaaaactcacctgattcccccaaaacaccattcttcagacctcccagacacaagagatgccacagaggtgatgtttgccacaaacaaccctaaggtccccagcaccccttggcaggacagactgggtgtaaggtggcatcctgacacacctttatcccccaggacccttgagatgctggctggagaccctctactctcagaagacccagaacctgacaagacccctacagccactgttgtgagtggggagtaggggaacagggaggaagacctcaagcagagggggccttaggaaggccaggcccctgccctgtttgcttctgaatactgtctccctcccgcacagaccaacgaagccagctgttggagcggcccctccccagagggtcctgtacccctcacaggtaggggggtctggaggccaggacagtggggacagacaggagtctttccttcaacaaatcaccactgatcccctgttccatgcaaggcatcgtttaggttttgggaatatggcagtacacacaacagatctcagtcccagccctcagggagaccccaggcagggtggaggctgaggtaggaggatcacttgaagccaggaattcgtgaccatgctgggcaacagtaagacaccatccctaccaaaagaaaaaatatttttttaattagctgggtgtggtggtgtgtgcctgtagtcccagctactttggaagctgaggctggaggactgattaagcccaggactttgaggctgcagtgagatacgattgtgccactgcactccagcctggatgacagagcaagaccatgtccaaaaaaatcaaacacaaggccggacgcagtggctcacgcctgtaatcccagcactttggaggctgaggcgggtggaccacgaggtcaggagatcgagaccatcctggctaacatggtgaaaccccatctctactaaaaatacaaaaaaatttagccgggcgcagtggcgagtgcctgtagtcccagatactcgggaggctgaggcaggagaatggcgggaacccaggaggcggagcttgcagtgaggcaaaatagggccattgcactccagcctgagcgacagagcgagactccgcctcaaaaataaaaataaaaaaacccatcaaacacaggccgggcacggtggctcatgcctgtaatcccagcactttgggaggccgaggcgggcagatcacctgagattgggagttcgagaccagcctgaccaacatagagaaacctcgtctctactaaaaatacaaaaaattagccgggcatggtggcgcatgcctgtaatcccagctactcaggaggctgaggcaggagaatcgcttgaacccgggaggcagaggttttggtgagccaaaatcgcgccattgcactctagcctgggcaacaagagcgaaacacagtctcaaaaataaataaataaataataaaataataaaaaataaaaaacaaaaaacagtgaatctgtaaaattgcaaccaggacaagtgatcccaaagtagtgtttggggagctgtgaggctgtaggacaggtgccactgggctggtctgggggcttagggaagacatccatagcagactagggtgcaaaggtcagaggtccatccatcttccccaggggaggaactggacttgcggctcattcggacaaaggggggtgtggacgcagccctggaatatgccaagacctggagccgctatgccaaggaactgcttgcctggactgaaaagagagccagctatggtgaggacctcttccgcccagccccagttaccaggcagtccccagaccccagctagacccagagcccggctctctcttcccccagagctggagtttgctaagagcaccatgaagatcgctgaagctggcaaggtgtccattcaacagcaggtagtcatgaccagacccccccggagagcccaagccccctagaaccccacctttgtcccccacagatcttcagtatcctcctacaccactctgtcttccccagagccacatgcctctgcagtacatctacaccctgtttctggagcacgatctcagcctgggaaccctggccatggagacagtggcccagcagaaaagagactactaccaggtgaggggggcagggtggaatgttacagaggtcaccctgctatcctgctgtccttcaggcctgatcccctcgtttcccagcaagctgggaggaaggcaccactaccaacgtcgccatttcattgatgaggaagctgaggcccggggatgcttgggaacttgcccaaggttacccagcaaagattcaagctgggcttcctgtgcaattgcaaaacttcactttactttttttcttgagacagaatatcttgctcttttgcccaggctggggtgcaatggtgcgatctcagctcactgcaacctccgcttcttgggttcaagcaattcacttgcctcagcctcctgagtagctgggattacaggcgcctgccaccacgcccggctaatttttgtatttttagtacagatggggtttcaccatgttggccaggctggtctccaactcctgacctcaggtaatccacctacctcagcttcccaaagtggtgggattacaggcgtgagccaccacgcccagccaaaaacttcgtttttgtttgtggggaggggaacgaggtgctgagtgttctcaggaggaaagccttggtgtctctgcttccaagcagaaaggatggggtgactacatgagacttctggactcaggggtcggggagagcaggtctggagaagaccccaggaggagaatactgactcagaaaagggtccagcctggcacggtggctcatgcctgtaatcccagcacttctgggggccaaggagggaggattgcttgagcccaggagtttgagaccaacctgggcaacatagtgagaccccctgtctctacaaaaaaaaaaaaaaagttttttaattagctgggcctggtgcacatgtctgcagtgctagctactaggaggctgagggtggaggattgcttgaggccaggagttcgagactaacctgggcaacatagtgagatccctgtctttatctaccaaaaaaaatttatttatttatttttttttttgagacagagtctcactttatcatccaggctggagtgcagtggcatgatctcagctcactgcaacctctgcctcccgggttcaagtgattctcctgcctcagcctcccgagtaggtgggactataggagtgtgccatcacatctttataatttttgtatttttgtagagacggggtttcaccatgttggtcaggctggtcttgaactcctggcctcaggtgatctgcccactttggcctcccaagtgctgggattaaaggcatgagccactacacctggccaaccaaaaaaaaaaaaaaaaagaagaaattgttttttaaattaactaggcctagtgcacatgcctgtagtcctagctactgagaggctgaggctggaggattgcttgaactcaagagttcaagttcaatgctgcagtgagccatgattgcccacttgcactccaacctgggcaacaagagcaaaactccgtctcgaaaaaaaaaaaaatagagtccagaggtggcaaagcacatggcgcaggaatggaaggactgggtggctgcttctgggttggccctaaggcagcgtctccatccccatccccaacccttgccagcccctcgccgccaaacggactgagattgagaagtggcggaaggagttcaaggagcagtggatgaaggagcagaagcggatggtgaggcttggaattggtggaagggtagggtgagagagaggccgggacgctgaccttctcatcatcccccagaatgaggcggtgcaggcactgcggcgcgcccagctgcagtatgtgcaacgcagcgaggacctgcgggcacgctcccaggggtcccctgaggactcggccccccaggcctcgccgggacctagcaagcagcaggagcgtcggcggcgctcgcgagaggaggcccaggccaaggtgggcacccggccccgagcccctgtagcgctgtggcgccccctgccctccactctcgcccacacgcgccccaccccgctcctggcctcccgtttccccaggcgcaggaggccgaggcgctgtaccaggcctgtgtccgcgaggccaacgcgcggcagcaggacctggagatcgccaagcagcgaatcgtgtcgcacgtgcgcaagctggtgtttcagggggatgaagtgctgaggcgggtgaggcccatccccaaggccatcctcccctcaccccgttggggccccgactgagtgccccactcctcgcccctaagccaccctggagacaccaggactaggccatttccctcgacagccagttcccgcccccagacccactgtctcggctccgccccatgaggtcctgtcccctggatgaccagcccctgctctgaccatgcctgggtcccctggccgactgccctagttcctaagccgcccaggtgcgtcccaaaccctgaccacgttcgcgtctctcaagccccgccccagctctggccctgcccccaggctcccaggctccgcccctccccaacctgctgtctccacccggcaggtgacgctgagtctcttcgggctgcggggggcgcaggcagagcgtggcccccgcgccttcgccgccctggccgagtgctgtgcgccctttgagccgggccagcgctaccaggagtttgtacgggcgctgcggcccgaggccccgccgcccccgccgcccgccttctccttccaggagttccttccctccttgaacaggtgggtcactggagcagggagtcgggaacgagccccggaatcgcgatgccaggctgttggcaccgcaggctggttactcgaggttagagaacgcaaagccttagtggaatttagtactccaggctctcgggggccataggagggtgaatgggttgtcccagtcctaggggcaggggcaggaatgtggggctactgtatttcaggggccacaatgccctgggtgtcagggtttgcagacccaagtgcttggagttggtacctagacatgatgcctgggtgccatcaccccaggccagtttcctgggattcaaaccttcaaacttctgtcttctcagctcccctctggacatcagaaagaagctctctgggcctcttcctccaaggctggatgagaattcagctgagccaggcccttgggaggatccgggcacaggctggcgctggcaaggtgagtgcaatgagggccaggtgggagtggtgccaggagttcgttccaccaacacataggtgggctgcaggagtggggtttgtgagcaggggaccatccttattgacctgtgccacctagggactccaggccccactccgggcagcgatgtggacagcgtgggtggcggcagcgagtctcggtccctggactcacccacttccagcccaggtagggataggacctggtcctgacccacactccacctgtgaccatcctccagcccctggccaagctctgaccctcaatctttaactatctttgacctctgacctaccccacacccctgacctatttcctcaacctctttttttacctttttaaaaattatttatttatttatttgtttgtttatttgagacagtctcattctgtcgcccagcctggagtgcagtggcgtgatctcggctcactgcaacctccacctcccagattcaagcgattctcctgtctcagcctctggagtagctgggattacaggtgtgcactaccacgccggctgatttttgtattttttagtagagacggggtttcaccatgttggccaggctgatctcgaactcctgacctcaggtgatccacctgcctcggtctcccaaagtgcagggattacaggtgtgtgccaccacgcccggccttttcttttcttttctttctttctttttttttttagggagacagagtcttgctctgttgcccaggctggagcgcagtggtacgatcttggctcactgcaacctccgcctcccaggttcaagcgattctcgtgcctcagcctcccgagtagctgggactacaggtgcctgccaccatgcctggttaatgtttgtatttttagtagagacaaggttttgccatgttggccaggctggtgtcaaactccttgcctcatgtgatcctcctgcctcagcttcccaaagtgctgggattacaggtgtgagccactgcgcccggcctatttcctcaacctcttgatccagcttatgaaccacccccctcaggttgctgacccaattctccaacccttaaccactgacctgtccaatccccctcctgacctctgaccccttgggaattagtgggtggttctggaagccctaaaaaccaggagtgcctcccatagcccaggaatctcccatgattcctctgaccccaggcgctggcacgaggcagctggtgaaggcttcgtccacaggcactgagtcctcagatgactttgaggagcgagaccctggtgaggctgaagcagggtaggtcaggatgggacagggcagggcaccaggcactcctgaccctgtctccctgcagacctgggagacgggctggagaatgggctgggcagccccttcgggaagtggacactgtccagcgcggctcagacccaccagctgcggcgactgcggggcccagccaagtgccgcgagtgcgaagccttcatggtcagcgggacggagtgtgaggaggtgtggcctgggttaatgaccaaatgacctttgctgacccttgatcatctccctgacctgagattcctacagcctttctgcccctgggacccaccctaacctgatgtctcccatgagcccccattccttgaggatccttgtaaccttctcttcccctactggtccctaatgacctccctgtccctgtgaccttccccacagtgctttctgacctgccacaagcgctgcctggagactctcctgatcctctgtggacacaggcggctcccagcccggacacccctttttggggttgacttcctgcagctacccagggacttcccggaggaggtaccctttgtggtcacgaagtgcacggctgagatagaacaccgtgccctggatgtgcaggtgctgccctgacccttcatcatccccagaagtgacctgaccgaatcgatggcctatcacgaaccaggtgtctgtttttcaccctcaccctgcagggcatttaccgggtcagcgggtcccgggtccgtgtggagcggctgtgccaggctttcgagaatggccgagcgttggtggagctgtcggggaactcgcctcatgacgtctcgagtgtcctcaagcgatttcttcaggaggttggtgctcaggacactgagggggacgcgggcaggagccctccacagcccacccacactcgtgttgcgccctccgttccacccccagctcaccgagcccgtgatccccttccacctctacgacgccttcatctctctggctaagaccttgcatgcagaccctggggacgaccctgggacccccagccccagccctgaggttatccgctcgctgaagaccctcttggtacagctgcctgactctaactacaacaccctgcggcacctggtggcccatctgttcaggtgtgcatgggtccctgagccttgaaacgcgacccttttccctggacatgcgactactaacttccctggctgacccctgacactgacctctgacctttgacctgtgttttctgaactctgaaccttaatccatgattcataactttgggtactgacccctgacctccagttctggatatgtggctgctggtctcagacgacttacacctgtgacatgggcaagtcacctctaggctggcctgcgtgtcccacccttaccctcagaccaatgagcttgcatcctgtaccctgacctttctcttcacaccatccccagggtggctgcacgatttatggaaaacaagatgtctgccaacaacctgggcattgtgtttgggccgacactgctgcggccgccggacggcccgcgggcagccagcgccatccctgtcacctgcctgctggactctgggcatcaggcccagcttgtggagttcctcatcgtgcactacgagcagatctttgggatggatgagctcccccaggccactgagcccccgccccaagactccagcccagcccctgggcccctcacaaccagctcccaaccgccacccccgcaccttgacccagactcccagcccccagtcctagcctcagaccccggcccagacccccagcaccacagtaccctggagcagcatcccacggccacacctaccgaggtaagaacccactgggcccacagctatggagagggccttatctctgttcaattctcttaccttctctttcaccttccttcctttttaaaatttccttcattctcttcctcccttcctcatttaacttatgttcattctggaaggaatagtgaggaatgagcagtgggcagtgatgatgtaacaaaaggggacagccctgcagaggtactaacatgggtgatcattcattcctccaacagaatatttattgaacatgtattttgggccaagcattgtcgtaggcattgcagatacatccaggagctaaatatccaaagaccctgccctctcagtgcctgtgttttagtggggaaagaacaaccatatacatgacacaaagtcagttatctggaatgtgatgaggtgatgatgataagggtaatggatcatgaaaaggtagagtaatggctgggcgcggtggcacacgcctgtaatcccagcactttgggatgctggggcaggcaaatcacctgaggtcaggagttcgagactaatccaaccaataaggagaaacctgtctctactaaaaatacaaaaattagccaggtgtggtggtgtgtacctgtaatcccagctactcaggaggctgaggcaggagaatcgcttgagcccaggaagcagaggttttagtgagccgagagcatgccactgcactccagcctggacaatagagcaagactttgtttcaaaaaaaaaaaaaaaaagtggagtaagacacatgacaccagggagcagcacggtgggaggtggagtttgtatcactaagtaggatggtgggggcacgtcttagagagcagacggacttgagcaaagactggaaggacatgaaggagtgagctggcaacatggagatcaggtgaagggtgttccaggcaaagggaacagccagtgcaaaggccctgaggtaggatcgtgcctggtgtgttaggacgcagccccatcctgtaatgaatgacaggaaggtggtatgaagtgataccaaagaggagtgggcccaggtggctctgccagctatcctgaccttgcatctgctattcacaggcacagaccaccactgaatgtgcacctgctgtgcaggggacactatagaggcttcctgttgtcctctccacagtcctgagaggtagacagtgttaatgaaaatcatttacagattaaacaatgaaggctctgagcagttaatggccctaaaaggggactgtaagcagttggaatcttttatttttttttggagacagaatctcactgtgttgcccaactggagtgcagtggtgcgatctcggctcaccacaacctccgcctcccgggttcaagcaattctaatgcctcagagacaaggtttcgccatgttagccaggctggtctccaaccccctacctcaagtaacccacccacctcagcctcccaaagtgctgggattataggcgtgagccaccacacccggccgcagttggaatcctttatttttttagacggagtttcattcttgttgcccaggttggagtgcgatggcgtgatctctgttcaccgtaacctccacctcctggattcaagcgattctcctgcctcagcctccagagtagttgggattacaggcatgcaccaccacacccagctaattttttttgtatttttagtagagtaggggtttctccatgttggtcaggctggtctcaaactcctgacctcaggcgatccgccctcctcagcctcccaaagtgctgggattacaggcatgagccactgcacccggcctagaatcttttttttttttttgagatggagtctcgctctgtcacccaggctagagtgcagtggtgccatcttggctcactgcaagctctgcctcccaggttcacgtcattctcctgcctcagcctcccaagtagctgggactacaggcacccgccaccacacccggctaatttttttgtatttttagtagagacggggtttcaccgtgttagccaggatggtctcgatctcctgaccttgtgatccacccgcctcggcctcccaaagtgctgggattacaggctggagccactgcacccggccgcctggcgtagaatctttaacaaaggtcaccagtctggatccagagctcagctgtgaaccaggaagatagcagcacccgctgctccggattgctagaacagtccatgcccaaggcctgtgctgctggtatcttgctgcatctgccattcctgagagcaaggatctctcctgcagcagcccagagctgggaagcggctgctggtgaactgtgggtctctgagagctggaatgcctcataaagtgctcgggacagtgtctgatgtgtagacactgccaaccatttagctaaggatggaacagtaaagttggtaaggttgcagagagcagcccaggatagtagttcagaggcaccacctggtcctaatgtggagagggctgagccactccctgggctggccatttgctaaacaaggattttcccaccctcatggagcccacggtccagactcaatgaatgacactgctctatgctggaagggcaagcagtacacttattattatttttgagacggagtctcattctgtcacccagactggagtgcaggggcatgatctgagctcactgcaatctccacctcccaggtccaagcgattctcctgcctcagcctccctagtagctgggattacaggcatgcaccaccacgcccggctaaattttgtatttctagtagagacggagtttcaccatgttggccaggctggtcccgaactcctgacctcagataatccaccaacctcagcctcccaaagtgctgggattacaggcatgcaccaccatgcctggccaagcagtacacttataagggcatcgtctatccccaaacaccaaaactgcaaaggatgacaggtgcacagtcagtggtggtccatgccctgtgcataggaggagttcaatggtagtccacacccagtgcagagtaggtgcaaagtcaggggtggctggcagagccacctgggcccactcctctttggtctcacttcctaccacctttccctcattcattacagggtggggctgcgtcctaacataccaggcatgctcctacctcagggcctttgcactggctattccttttgcatgtccaggaacaagcccttggctctccaggaatctcaaagaactgggattttagtgttggggtctcattcttgggtttctccctgcagattccaactccacagagtgaccagagagaggacgtggctgaagacaccaaagatgggggaggggaaggtgagtatgttagagagaggctcaggagttctgggggtgccctggccccagggtggcttgctaaaagatgactcctggggggatatacagagaacttggaggtgctctgcactgaccacccaccccgtacacagtgtccagccaaggcccagaggactcactcctggggacacagtctcgtggccacttcagccgccagccagtgaagtatccccggggcggtgtgaggcctgtaacccaccagctgtccagtctggccctggtggcttccaagctgtgcgaggagacccccatcacatcagtgcccagagggagtttgcgggggcgggggcccagccctgcagctgcctcccctgagggcagccccctgcgccgcaccccgctgcccaagcattttgagattacccaggagacagcccggctactctcgaaattggacagcgaggctgtgcccagggccacctgctgcccggacgtccagcctgaggaagccgaggaccatctctgaccaccctggcaccttaaataaggaagaggcccagattgtgaagacggacccatatatccctacctcccaccacctagtggccaaacaccccgccaggagttcaatgctgggagaggtccagagggttcctataaggaaaaactatttaatacatgacctaggggaggcctaaaacccttttggggataatgtcccagagtccccccactagacacaggtcactgccaagcatcagggccactcgggctcagaggtcactcagggtcaatactcagggtcagtgcaggttatgagatccttggggtccaccctagtctctgacacctgggacaggggtgcttttgctactttggttgtggtcactcccccacacctgcctgcctccttcacggactcgaagtgaccttcctggaggaggtgggcagctcagactccacatgctggtggtgcctgaggtctgatggcctctaataaactgtgtcctatatgc

SEQ ID NO: 6178 - DNA, 406 bp, Homo sapiens
ggcctcttttttttttttttttttttttttttttgagacggagttttgctctgtctccaggttggagtgcagtggcacgatctccgctcactgcaacctccacctcccgggttcaagcgattctcctgcctcagcctcccgagtagctgggactacaggcgcctgccaccatgcccggctaatttttttgtatttttagtagagacggggtttcagcatgttggccaggatggtctcgatctcctgatctcgtgatcgtcccgcatcggcctcccaaaatgcagggattacaggcgtgagccactgcgcccggcctcaaggcctccttcttgcatcatcaaacaccctgcagcacctacgtaaaggcagttggagctgggtcgcagcacccggctgagtcacgcca

SEQ ID NO: 6179 - DNA, 287 bp, Homo sapiens
gtggctcaagcctgtaatcccagcactttgggaggccaaggcgggcccatcacaaggtcaggagatcgagaccatcctggctaacacagtgaaaccccatctctactaaaaatacaaaaaattagccaggcatggtggcgagtgcctgtagtcccagttactcgggaggctgaggcaggagaatggcgtgaacccaggaggtggagcttgcagtgagccgagataacgccactgcactccagcctgggcaacagagcgagactccaactcaaaagaaaaacaaacaa

SEQ ID NO: 6180 - DNA, 1998 bp, Homo sapiens
gaaaaatgcgaagactgctttatattttgtttgctcctctacactgttaattgatgaacataaatccaccagggaatgtgcaagatgtttaatctgccattccttttgttggtctcagttgctttatggtgcaagcaactgaaaacattgaatgtttatactataaggcctcgaaggcaaatgaaatacttcttttagggctcaactgaagaattagtaatttttcccaattgtggaggatttctaaatatttgtcagtattaagctaaaattaatgagtgaaaaaatgtatacagtctttacttcacttttaatttatgggatatgtactttattacatcatttttaataatatgaaataatttaaacacatagataatatacaacgtatacgatgtataaagagtagtgaaaggaaccacccaggttatgaagaagaagatctctaatattatcaaagccccaagaatagtttttctctattcaatcacttaccttgatccccagggtagcatcaatctgactttgttgcttcccattgtctttttttaataggtttatatacatatatgtatatctctttaacaatttctttaattataagtgtttttacttttacaaaattggtatcttatatatggttttcatacttgccttttttactcaatattgggtgtctgagattcctccaggtttttaatcagttttcctaagataaatattttgaagttgttttcagcttttcactattgtaaacaatgctgcactggatattcttattcatgtttcctgatagacatatgcaaaagtttctttaggcaagggattattggtccataaggtatgcacctgtgtaactttattccaaaatgccaaaatgcctttaaaagatttttgattacactcttgccatctttttatgacagttctacttcctccattcctcgccaatagttggtattgtccattattttattttacttttaaattttattttatattatacttttgtcaatgtagtgagtgtaaagtaatatttcattatgtgtttagctcagaagtacaactgccggattgcaggatatactaaatagttttccaaggcttcctttaccaccctctgctcctgtatctaatttccgctctacaatgagggtaaaattatatcccattgtggttttaatttgcatcttcatgattaccagtgaggagcttttcatgtattatttagctattcatgtttcctttcatgtagaataactgctcttgtttttgcctatatttatagaagtttttgtatgttctgaataatcttttttaggtcatatgtgtggcacatattttatcctagtttttgtcttctctttttatttgcaatgtattgtcttatgataagcaaaagtttataattttaatgcatagagcttttaatataattgttttcacattttctgatgtgcttaagaaatcctcaatgctgtggtcatgaagttattctcattttttttcctaaaaaatttaaggagttgtttttcacatttcagtgtttatttggagaatgtgtgtgtatgtgtgagcaggtgtgtggtaggaggcaggaatccaatttccctttttccaacatgagtcctagtaccccttgtcaaatatgccccattaatgtgcaatgacaactctgtcgtatatgagttgccatatgtgtttgggtgtgtctgagttcccaaatcaattccatttgtctttttcttccatatccataataatgtgccgttttcattattacaactttattataggtcttaatatacagaatgggcaagtcacactacttgttcatcaggaaatcttaactattttccttttatcttccatatgaatattggaatgagctcactaatttccatgccaacattgtgactggaattacattgagactaaagatcaatttgggaagaaatgccatctttataataatatatcaataaatccttaatatta

SEQ ID NO: 6181 - DNA, 528 bp, Homo sapiens
tgcaaattcgtaagctttctgaaaacattttgagactttgtaaaagatttttttaatttttatttgagcttatcagctattgttagtgttaatgtattttatgtgtggcccaggacaatttgtgtttatccagtgtgtctcagaaaagctaaatgattggacacccctgcaacagtacatgcctggaaaagacataagaagcagacacaatagtggtaaaaaagcattacacaagataaaaggtaagtctgaggccacagcttacaaggtggcctacacaggaagatgcaataaaaacagtttctcggttatctcctatctttgtgaagctactcctattcatgctttcttcccacttcttttcttccttcttcttcttgttctttcttcttcctcttcctcttcttcttcttctcttcttgttcttcttcttcttcctcttcctcttgctccttctcctcctcctcccccttcttcttcctcttcctcttcctcttccccttctccttctttctccttctccttctt

SEQ ID NO: 6182 - DNA, 1931 bp, Homo sapiens
cttagaatgactaatttggtcataagttttacacttagattttcttctttcccagtgttgcccttttgccttcttttatgtaacatagcatttgggttaaataataccttttcttagtagaaacacacatgattatctgtagtgaatgtaatttaatttgtaaactccttttgtgcggcattcctgcaggactgtgcactgtgacatggttttctattcatcaatcccttgccttgtatttttcaagtgttggttgaaccaattcttacaagtgaattattacaccctcccttgcagctcaaaacaaacaaaaaagttctcctttccaagttgaaacctataatttgatcagtttgcataaagtagttacagctattctcttccttagtgtcatctattgagagtacaccttagggaaagaagttctggagaatgagctgctcctgtcctcacggtagagatagaaaggtctgctcaatgtctccaatgccctctaatattctgaacagtaataaccttaaagatattaagataccccacttgaccatgccccttgggggtcctctccatcagtgctatctttctgtgaagatagagatgttctataatctgcaagtccattgtggtaaccagtagccacatgtggcttttgagcacttgaaatgtagggtaatgcaatagggggactgattttaacttttatttaatgttaagtaatttaaatgtatatagccacatgtggctaatggttaccacatcaaacagcatagctctagacagttgtgtggttctgaagaatctcaatgttcaaaaaaaaaaacattgacctctcttaccctcatattttattacaaacaccctgagtaaattagtattgaagacttggctgtcgaggcactctggtttgtgaaaaggtgggatttggagtcacaggccttgggtttagttctagccctaccaatcactgatcgggtggcctgggcacacattgtcccctcacatcagtttcctcatatataaagtagaaatgatggcacctatctcctaaggctattgtgaagatgaaatgaaacaacacgtgtaaggcactgagtgtaccctgtctaaattatgctggtctgtgtccacatctgactcaggcagagatttctcagttttccttatgtttaaaaaataaacaaataacagatcatctctgaagccaagcatgtttccaaagagaactctgaaaatcagctttattattttaatcctgtgctgtctgtgactgtctccagatgtgtgtctgtggagaaatagatcttcataagtctgagaaaggtatttagtctgtccgaaaatgtgtttctaagtatactcatctataattttattactgacatcttactagtaccactaacaagtaaagggaagttagtttaacataaagattattgatattgtttcctgagctatcagtgttacttcatttaattggatagagaggcttacttttctagattatctttgtaattgtttacttccctttaatgtgtctatgctatggtagagaataatggaaggcattaccatgctactccattttcatttggcctatgaagactggcacagtaagggctttatagaaatggaagttgtagaaaattgaaagtttaaacttattaagcatcaggacattaactttaactgctttttaaatagaaatattcctgaaatgtagaatgtttttgtaaattagaagtgttttaccagcctcctaaaaaatctgttgtttgaaaacttgggtcataaaagagataaaatcttaagtgcagagttaagcatcacaagaccagattgacttctagtacctggtgcatcaaacaaaaattctgatattggcagcctgggcaacatagtagaacttcatccccacaaaaaaattgtaaaaa

SEQ ID NO: 6183 - DNA, 106 bp, Homo sapiens
gcatgttttttttttgttttgttttgtttttgagatggagtttcactcttgttgcccaggctggagtgcaatggcacaatcttggctcaccgtaacctctgcctcc

SEQ ID NO: 6184 - DNA, 665 bp, Homo sapiens
atataagctctaaaactctcctgtaatatctctgacccaatttagcaccacttttttccatttcattttttaggactgaaacataaaagaaccagtgtccagaggcaagtgacatatgtcttacacttgtggccatccttcatttcttcataaactttgcttaaaagactaaaattcccaattccttataaaaaatatattcttgccctcagccccagtggccactggcaaagactgttatttcccaatggataagagagcctccttcatcttcttggccatagttgggatgaggtgcgtgtggtcatccacacacttggtcacacaaccgtccagctgctgcttcacctgaagctccttactcccagtatccattgaatctttggctttgttgttgcaatgcatggcgcaccgggccaggtggtgccggaacttctccaactcactggtgagcaaagcccgggcttgagccagaggcacatggcagtgctttgatgtactggtgcacctactgcatggaggcctggctgtcctcacaacagctggtgctgcaccggaacatgagaccctgcatcttccagatgttctctctctccagactcttcaccatggagtccaccacctcctgcacccacagctgctgcagctctgccatggcgtcccca

SEQ ID NO: 6185 - DNA, 783 bp, Homo sapiens
ggtttggccatgttggccaggctggtctcgaactcctgaccttaggtgatccgtccatcttggcctcccaaagtgctgggattacaggcatgagccatggcgcccagcctctgtctttcaaaaaaaaaaaaagggacttactagggcctgctttgcctgggtccctatgcatcctgggattggtcagagtgaaccaatgagaagactgagctgctctcaagaagggctaccacaagctggttttgaaagcttcttggttctgagaacaaccagccctagatccttttcatctctgatgccaaatgatgtggcactgagaactgaagaggaaacgtgaacagaaagaagagtgagggctgaataagaagcctcgccagtgggaaatagggcccttggtaccttttgctcctaatagtcacatctgtgtttagaagggccaggaactcccacctcctgcgtcagagcctgtcaagcatgtcaggcctagagtggctttctgatccctgttatacacctatttataagttatctaagctaattctgagctcagagtaattttcctgaaggagcttcaggtaaataaggatgacaaagaactaaaaccaaatttactgtaaatgataacttcagcttctaagaaaagaattactgactccacactgatgtcaatagctggagagcaagggctacgaggaagaaaaccagtgaaataatccatggtcatgccacttgcccaaatatctgaattgcttatcattaaaaaagagcaaatttacgtttata

SEQ ID NO: 6186 - DNA, 762 bp, Homo sapiens
ctgtgtcctgtgcactagagcttcatcccccaactcaaaaggtcagctggctgagcccgacctggaacaggccgcacatctcattcaggctctcagcaaccacgaggatgtattcacgtctatgataacattgaataaccaggctacatgtgcccccgggttccttcctagaaatgtggcagcccattccagcacacaggcttctgcagcaatctctgagggtaaagccggtgggaggctcagcaggccaggaggcccaaggacaggacttgcgaccttgaagccaaaggaatctcacttgtggggcctccttgtcagctctgctgctgtctcagagccatctggatgagtgtcccgacaccctctcggatgcagggcaggaccacccagctggtcagactctgatgttgggtagctggcctctgtggggattgtaagtgccctgaggcgctctgtactagaaactgctcttaataataacggtgattattggttgctgcattgctgttgtatggctcttgagtcttcctgagtttgtgtccagctgttgggatcctctggactaactttcaagtccctaggcttagctctactactccaatcccaggattatttttttaattggccatagaaatgtagttgtatccaggcactccatggtctgatgctggtcttacagcctaaacctgtcattcattcatgcaactaatatttctggaacactagctatataccaagaactgtacttatctagagcataag

SEQ ID NO: 6187 - DNA, 3557 bp, Homo sapiens
tatgagatagggaagttctcctggaacagcatgtagattattttctagagcactttagttaaatggtacttaatgatgataattcttctgaacacaattcagaatttgaaccaatatttgttgtttcaggaaagcagaatttcctttgaatgatggataagaatggtgaggatctttataatatagaataaattgctgaaaagaaactttgagggaatattcaaagcaccctcttattttgaaccttccttgatcatctctaatgtgactgctttctcagaacttccatatcatttgtcccctcttttggagttcttgctgctttttgtttttgtatttgttttcacttattcagtaattattcagtgtccactgcatcctaggtaatatttcagctgtcaaaagtcagattttggctgggcatggtggctcactcctgtaatcccaacactttgggaggccgaggtggttggatcacctgaggtctggagttcgagaccagcctgaccaacatgacaaaaccccgttgctactaaatataacaaaaaaaaaattagctggtcatggtggcacgtgcctgtaatcccagctacgtgggaggctgaggcaggagaatcgctcaaacccaggaggcagagggagactatttttataatgatactaagatgccatttctgttttcactgtgttgacacttgtactgatggtccaaaagcagtaatagggaaaactgctgggcactttaacgtaaattgaggcagggactccaagtgtcactgatagtcattatattattcgctacctctccacttgcagttttaaaaaaacaaaaagggctgctttcacttaaacagaccctgatgaagcagtaaaaattaaaaaaaaaaattggccttttgtcttttcatgaggaaatgggaagtacatgaattgcttttgctgcacaaagaggtacagtgcctgttttgagaaacagcaattgtgtagtttgagttgcaaagcgaactagctgcttttattgtgaaatgccatttttgcttgaaaaagtgggtagcagacaatctgcagttattgagacttgggtatttggtggacgttttctggaaaataaatgagaggaaataactgacaatttatgaccaatgataatatttgtgctttcaagcaaaaatcaaaattttgaaaaaatttatctgctacagtgagcttgacagtttctcaatagttaacgacttctttgatgagattggtgacaatataatgaatgagtatttgatattatataattaaatgtgtcagcatttggaagatccacataattttgtgaactaatattttccagctcaccattgcaccacgttacaaagtcatagtgcatgggtaaaagattcattcaaaagatagaccaatggattttaatgtagtgatatgaaaagttcactgataagagttatagattctacattataacttttttttttttttttttttttttgagatggagtcttgctctgtctcccaggctggagtgcagtggcgcgatctcagctcactgcaacctctgcctcccaggttgaagtgattctcctacctcagcctcctgagtagctgggattacaggtgcctgccaccatgcctggctaatttttgtatttttagtagagattgggtttcacgtgttggtcaggctggtctcgaactcctgacctcgtgatccgcccgcattgatctcctaaagtgctgggattacaggcctgagccaccactcccggccacaactttttttttttaagagactcccccttgcctggttttggtgttgtatcaaggaagaatgtccacagtgatctgaaaaggctgctgagacaccccacctttttccaactgcatgtctctctgaaaaaggatttgattcatagacttcaaccaaaaaaaccacacagtacaacagattggatacaggagcaggtatgagaatccatattgtcttctctgaagccagagttaaagcaacttgcaaaaatgtaaaagaatacctcttcttactaaatgtttttgttttcagaaatcttttatttttagtaaaaaatattatttaccttaatatctagtcagtttattattaaaaattttaaatgagttaggccgggcgcggtggctcacgcctgtaatcccagcactttgggaagtcgaggcgggcggatcacgaggtcaggaggtcgagaccatcctggctaacacagcgaaatcctgtctctactaaaaatacaaaaaatcagccgggcgtggtggtgggtgcctgtagtcccagctgctcgggaggctgaggcaggagaatggcgtgaacctgggaggcggaggttgcagtgagccgatatcgcaccgctgcactccagcctgggctacagagcgagactccgtctcaaaaaaaaaaaaaaaaaaatttaaatgagttaaatatttaaaaaatttcacagtattagttttgtttgtttgtttgtttgtttgttttttaagatagtgtctcgctctgttgcccagttgggagtgcagtggtgtgaggatagctcactgctgcctttaactcctgggttcaaatgatcttcttgcctcagtctcttgaataactagaacatagtagctgaaagacatggatgtcatcatctatttctttatattttttgtaacattttaaagctattgcctagtttaataattatttcagtttgtgtatgtaaggacaatcaggcatttaaatttataaaacatgtttgaaaatctttaaaagttacacttactgactagttgcttgtctgttgcactaacaaaatttattattcatgtttcgggaataccctctttaggttttgtttgttttttttttcatagtaaattatcccagtacaagtgtctttgtacaaaattttgatttctaagtttctttaaaaatatcaatgccagctgggcccagtggctcacacctataatcccagcactttgggaggtcgaagaggatggctgaggaggttggatcgtttgaactcaggagtttgggatcagcctgagtgacatggtgaaaccccatctctgctaaaaaatatgaaaattagggctgggtgcagtggctcatgcctgtaatcccagcagtttgggaggccgaggtagacggatcacttgaggccaggagtttgagaccagcctgggcaacatggtgaaactccgcctctactaaataaaaaaaaaaattagcctggcatgggggcaagtacctataatcccagctactcgggagactgaggcaggagaatctcttgaacccaggagccggaggctgcagtgagctgagattgtgccactgcactccagcctgggtgacagtgagactgtctcaaaaaaaaaaaaaaaaaaaagctgggtgtggtggtgcacgcctataatcccagctactctgatggctgaggcagggagaaccgcttgaacctgggaggtggaggctgcagtgacctgaaattgcaccactgcactccatgataccctgtctaaaaaaaaaaaaaaaa

SEQ ID NO: 6188 - DNA, 3557 bp, Homo sapiens; identical to SEQ ID NO: 6187

SEQ ID NO: 6189 - DNA, 142 bp, Homo sapiens
tgcctgtaatcccagctacttgggaggctgaggcaggagaaccacttgaacctgggaggcagaggttgcagtgagccgagattgcaccattgcactccagcctgggcaacaagagcgaaacttcgtctcaaaaaaagaaaaa

SEQ ID NO: 6190 - DNA, 213 bp, Homo sapiens
gttcgagaccagcctgaccaacgtggagaaaccccgtctctactaaaaatacaatattagccaggcgtggtggcacatgcctgtaatcccagctactcggaacgctgaggcgggagaatcacttgaacccaggaggcggaggttgcggtgagccgagatcgtgccattgcactccagtctgggcaacaagagcgaagctccgtctcaaaaaaa

SEQ ID NO: 6191 - DNA, 142 bp, Homo sapiens; identical to SEQ ID NO: 6189

SEQ ID NO: 6192 - DNA, 213 bp, Homo sapiens; identical to SEQ ID NO: 6190

SEQ ID NO: 6193 - DNA, 11081 bp, Homo sapiens
ctggaatgaggagctgcagacgacgagggagctgcctcgcaagaacctgcctgagcggctgctccgagaaagggccatattcaaggtgcctgcagcctctgctgaccggcagtctgaggcccgctgtccacctgctgacgggttttctcatggagaggaggaaagcaagggaggcaggggcagccctaaccctgtcaggttccccgaaggccagtcagcgtctcccgcagggtctgctagccttccgcctcccagcagaccatcccagtacctttctctggcctctctgaggctttgagtccctggaaggagcgggccctacttcccatagggactgagtgtccagggccgtgcagcttcccgccctctgtgactgctgcggggcttttgcctgggcgagcactggccggccatggcccttctagggcgggtgctcatttgcataacacttttagtttgctggggtttaaaagttattagtgctgggttactaagagaaatgaggaaaagcagttgcttaagaaaaaaaaaatctcaggccggcttcagtagctcatgcctgtaatcccagcactttgggaggccgaggcgggcggatcacaaggtcaggagttcaagaccagcctggccaatatggggaaaccccatctccactaaaaatacaaaaattagctgggtgtggtggcgcatgcctgtagtcccagctactcgggagtctgagacaggagaattgcttgaacccaataggcggaggttgcagtgagccgaaattgcatcactgcactccagcctgggcgacagaacaagactacgtctcaaaaaaaaaaaaaagaaatctcagccaggcacagtggctcacgcctgtaatcctagcactttgggaggctgagacaggcagatcacttgagcccaggagttggaaaccagcctacgaaacatggtgaaacctcgtctctgcaaaaaatacaaaagattagccaggcatggtggcatgtgcctgtagtcccagctactcgggaggctggagtgggaggatggcctgagccaggggaagtcgaggcttcagtgagctcggatctcgtgccgctgcattccagccttggcaacagcgtgataccctgtctgaaaacaaccaacctcccatagttatactgcctagagatgataattgtagaaacaaaaactcatttctcgggtaccgacttcaccagagatggtgccaagtgcgttatagagactatttcctataatatattggacaacttgtaaaggtcaatacctttatctgttcaagttcacctggcacataactggtggatcccaaacctgcgcacgcttgttaatcactaagccctgctgtctccctcagcacaagtgtattctcaaaacatgggggttttggtttgtttgcgcttttttagaaatggagtctcactctgtcccccaggctggagtgcagtggtgtgatttcggctcactgtaacctccacctcccgggttcaagcaattctcctgcctcagcctgtcgggtggctgggactacaggcgcgcgccacctcgcctggctgattttttttgtatttttattagagatggggtttcaccatattggtcaggctggtctcgaactcgtgacctcaagtggtctgaccgcctcggcccctcaaagtgctgggattacaggtgtgagccaccgcgcccggccaaaacatggttttcttgcccttttctacatatgaggaaactgaggctccgggtccttgggtttccaaggcaggcccggttgcctccgcggtctaggtgcgtgcgcttggccaggtggatgcaggctcttgtgggcgcggcctctaaccctgccctcctcgacccccgccaggtgcacagcgacttcaccgcggcagccaccaggggcgccatggccgtcattgacggcaacgtgatggccatcaaccccagcgaggagaccaagatgcagatgttcatctggaacaacatcttcttcagcctgggcttcgacgtccgagaccactacaaggacttcgggggggacgtggcggcctacgtggcgcccaccaacgacctgaatggcgtccgcacgtacaacgcggtggacgtggaggggctgtacacgctgggcacggtggtggtggattaccgcggctaccgggtcacggcccagtccatcatccccggcatcctggagcgggaccaggagcagagcgtcatctacggctccatcgacttcggcaagaccgtggtgtcacacccgcggtacctggagctgctggagcgcacgagtcggcccctcaagatcctgcggcaccaggtgctcaacgaccgtgacgaggaggtggagctctgctcctcggtcgagtgcaagggcatcattggcaacgacgggcgccactacatcctcgacctgctgcgcaccttccccccggacctcaacttcctgcccgtgcctggcgaggagctgcctgaggaatgcgcccgcgccggcttcccccgcgcccaccggcacaagctctgctgcctgcgccaggagctggtggacgccttcgtggagcacaggtgaggggcggccctgccggaccagggccggggccagctgcagggagtgcgggcgccctgggtggatccggggttgggtccttgaagggagaagcgctggagagtgaagaagggctccgtctagccacagtcattggagacccgtccccacctgccctgctgtcaggctcccgagcgcagaaacccgggctgcagactcgcgagcagccaggcgggtaatgtggctgtggcggacactgttctcttaaggagcacttggaagtctgggtggctgtgactgtccccgtgctggggcgggcaggtggggcaccgggggtccccgccgctggtgtttagtgcttaggaaatggggaaatggccatgtcagaggtcccacagcatgagtaactctcaaatgccagtggcttcctgtcactgttgagagccctgacctggatggggagctcctcttttcccataccctccagaacgcagctgcctttttttttttttttctgagacggagtttcactcttgtcgcctaggctggagtgcaatggcacgatcccggctcaccgcaacctctgcctcccgggttcaagtgattctcctgtctgagcctcccgaatagctggtattacaggcgtgcaccaccacgcccagctaattttttgtatttttagtagagacggggtttctccatggtggtcaggctggtctcgaactcccaacctcaagtgatctgcctgcctcgtcctcaaagtgctgggattacaggcgtgagccaccacgcccggccgcctttttcttcctgtcttgggagatcttggtttttctgcgttgactcatgcacaccggccaggaggtgccctatgcctgcggggtgtggagccccagctgccgggagccgtgggccagcagagctcctctccccgatgtccagctcctgctctgccctgtttcctctgctccaggtacctcctctttatgaagctggccgccttgcagctgatgcagcagaacgccagccagctggagaccccctcctccctggaaaatggtggtccttcctccttggagtccaagtctgaggatcctccaggacaggaggcgggaagtgaggaggagggtagcagcgccagcggcctggccaaggtgaaggagctggcagagaccatcgccgcagacgacggcacaggtggggctgctgcagatggccgggagagagcccgggctggccctgccagggtggcttatgacccccacctgggagaggctggcagacatctctgcaaggagctagggggcgaggcttggcgcagcccagctccaccggtggcagaggggacccgtgtctcatggagccatgtctccacagcagaccctcggagccgggaggtgatccgcaacgcgtgcaaggcggtcggctccatcagcagcaccgccttcgacattcgcttcaatcctgacatcttctcaccaggcaggtggtgggggccggccagcgcaggagccctccagggccagagcttcgctggggggcctgggcccttggggctggtgggtttgtcccccatctgagcgcttcccccgccagcgccaggcggcatttgtcttgccactgcctggctcagcctctctgctctccctcctccaggggttcgtttccctgagtcctgccaggatgaagttcgggaccagaagcagctgctgaaggacgcggctgccttcctgctctcctgccagatccctggcttggtgagggaggggctgcggggctgggtggggcttgtgtggagggtgctggtccctcatctgtctccgacttggaggcccatgaacacaggctcgcaggagtgactttttcagctttccctgagtgggcatccccgtttgacagatggggagcctgacccccagaggtcaagggcacaggccctgctgagcccaccgtgtgggctggcagctggtaatccagtcttctgagccctggatggtggcatggctgggggacggggccagagctcagtgggggctgcccatcctcctcctcctcccgcaggctctgtgtctggttccaggatgctgggtgctcccccaacaccgtggcctccaagcctcaggacacggggctgggggtcaagtagtgcccccaagcgggcacctctgcttctcccacatggttagagggggcctgtaccaccaccgggctcttggttcttggcctgcgctcctgccagaggctgggcacattctgacatcctgactgggagctggagccttcggggtccttctccagggcctcccaggatagctgtgctcccccagaaggactcagttgggtggaggcagaggagctgggtgggggcctgagctgctgcagcccgcaggtgaaggactgcatggagcacgcggtcctgcccgtggacggggcaacgctggcagaggtgatgcgccagcggggcatcaacatgcgctacctgggcaaggtgctggagctggtgctgcggagcccggcccgccaccagctggaccacgtctttgtgagtgctgcccggggtggggcggaacgggagctgtgggactgggatggaggccgggggcctgaccaagacctcccttctgaatccttccagaaaatcggcattggagaactcatcacccgctcggccaagcacatcttcaagacgtacttacaggtgccacccgtccgctctgcggctggccatggcctcccagggtggtgtggggcgtcgggaaagagcctgaggtggggctgagggccctcatgactcggatccaacctgcctcgcagggagtcgagctctccggcctctcagccgccatcagccacttcctgaactgcttcctgagctcctacccaaaccccgtggcccacctgcccgccgacgagctggtctccaagaagcggaataagaggaggaaaaaccggcccccgggggctgcagataacacagcctgggctgtcatgaccccccaggagctctggaagaacatctgccaggaggccaagaactactttgacttcgacctcgagtggtgcgtgcggggcaggggcggtggggtgggtgggattgggcagatgaggcggccaccacctgctcccagatggcgtctaaggcctgtggtcataggccagggagtcagagagaagagggagcagctgtggagatcactgggtgctggagggtgagggcagccgggaggctcccgggggccgggtggggcagtgttgggggcccgggctggacagcgttggggagctgggtggggcggtgttgggggggcccggcggtgcttgggctgctcaggccccctgctccctcctcagtgagaccgtggaccaggctgtggagacctacggcctgcagaagataacgctcctgcgggagatctcgctgaaaacagggatccaggtgggcatggctcacagcatccccgctgtgtccccgctgtgtccccgctgcgtccctgctgcaggctcccactcctggccagggccacaggggaagtggctttttcacggtagccgtctgtgcgcaagcgttggtgggttgggaggtgccaacccgctgaacctgggcctgaggcttcctgtggtgggggggctgccccccaggtcctgctgaaggagtacagcttcgacagtcgccacaagcccgcgttcaccgaggaggacgtgctcaacatcttccccgtggtcaagcacgtcaaccccaaggcctcggatgccttccatttcttccagagcgggcaggccaaagtgcagcagggtgtgtggccaggtggggctgggtggaggtgggggttccccatggcccgtcctgaccttgccacccctgggggtgccctgcaggcttcctgaaggagggctgtgagctcatcaatgaggccctgaacctgtttaacaacgtctacggagccatgcacgtggagacctgcgcctgcctgcgcctcctcgcccgcctccactacatcatgggcgactacgcagaggtaccctctgggctgtggcagcaaaggcctggcctcgtgttgggggatggggagtgagggggcccctgacggaggagtgggtggagtccagggagaccccaggaagtcgctggttctgcccaggccacccctggctccacccctctgtaactgtgtcccgagcgggagagctcaggagcaccctgtgctgcggtgaggtcagttctgggaggcgatggcaggggacccccccacagggcgtcagcaaggacgcctcctgagactccgtgagtgggcaggaagcatgccaccgagctcccacgtcctctgtgcccagtgcaggctgtggggttctgggtgccctgcctggccggggctggtggaggctgtggtggggttctgggtgccctgcctggccagggctgtttcagggttagcatgtcttaggatccctactccctgcaaagggactgttttttcttctgtttataaatgggtgggttgtttgtttgtttgtttgtttctgagacagggtcttgctttgtcacccaggctggagtgtagtggcgtgatatcgactccctgcagcctcaacctcctgggctcaagcgattctcccacctcagcctcccgagtagctgggattacaggcgtgagccagcacacccagctaatttttgtatttttagtagagatggggtttcatcatgttggccaggatggtctcaaactcctgacctcaagggacccacccctgctcaggctttttttttttttttgtaacatttttagtagttttaggtttgtatttgggtgtttgtggagattttgttgggtgtaagacatgggtgtgtggagctctctgtggagcgtgacctgcccttcaaggtgtggcagcagctgctgctgatccccctcccccctgctgcactgtgctgggcgcagccggaggggacaggagcctgcagagcggcaccgtgggctgctgggccggggccaggcgggctctgggtgcagtgggggttcccacgccgcggcaaccaccactgtctctccccaggccctgagtaaccagcagaaggcggtgctgatgagcgagcgggtgatgggcaccgagcaccccaacaccatccaggaatacgtgagtcgcgagtgccgcccgcgccgggggatgcgaggggctgggtccgcggccaccctgacctgtctccgccccgcccgcagatgcacctggccctgtactgcttcgccagcagccagctgtccaccgccctgagcctgctgtaccgcgcccgctacctcatgctgctggtgttcggggaagaccaccccgagatggcgctgctggacgtgagtgctggggcgggggggcggcagggacccagctccatcccaggggaccgggagctgaccagggccccccaccgcctgcccccagaacaacatcgggctggtgctgcacggggtgatggagtacgacctgtcgctgcgcttcctggagaacgcgctggccgtcagcaccaagtaccacgggcccaaggccctcaaggtggccctcaggtgaggggccgcccgtccaaacgccaaggccggcggaggcctgcggggcagccggcgggggcggggaagagacccagtgctcctgtcttcctccacccgagaaaatttctctcgacctccccctcttccctgagccctggacttgctgttcccctcggtggcttccagggagggatctacgggagaccccgggcccccgagtcaggcccccacacccagcccacttatgcccttccctcgccccgcgccgcgcctcccggcagccaccaccttgtcgcccgagtctacgagagcaaagctgagttccggtcggccctgcagcacgagaaggagggttacaccatctacaagacgcaggtgcgcggcgggggcgtggcgggggcgggggcggggcgggggcgtggcggggcgggggcggggccgcgggggcacgggggggcctgatcccttcccgcctccccgcagctgggcgaggaccatgagaagaccaaggaaagctccgagtacctcaagtgcctgacccagcaggccgtggccctgcagcgcaccatgaacgagatctaccgcaacggctccagcgccaacatcccgcccctcaaggtgagtccggggcggagcggcccctccggcccggcgagcgcgggagccccgctcaccgctggtttccccgccccgcagttcacggcccccagcatggccagcgtcttggagcagctgaacgtcattaacggcatcctcttcattcctctcaggtgaggcctccgccccactcgagtgtctcccggttgggggttttttgtgagtcggagtctcgccctgtcacccgggctggagtgcggcggcgccatcccggctcactgcagcctccgcctcccgggttcagcgattctcctgcctcagcctccccagtagctgggattacaggtgtccgccacctcgcccggctcatttttgtgtttgtagtagagatggggtttcaccacgttgaccaggctggtctcgaactcttaaccttgcgatccgcccgcctcggcctctcagagtgctgggattccaggcgtgagccatcgcgcccggcccgccccgcttatcttccccagcatcctcgcattccgcgagtgaagaccttggtgtttctgcttcacacaaagtatcttggcgttttcccaccagtccctaagaagcggcttcattccctccccacgcttcccatcctgcggcgggggggggctgaggagcaggccccgggctccccggggtggccacaagcagtgtggcctcctgtggggagtggatttggtcagcaaggcgtggcagcagccccccaactccgctttcctccccctgcgctggagggaggccaccgagggcagcgaggggagccccgaggccgggtcaggtgcggggtccttaccttctccgtgttcagggaccttccgccttcaggagggaagcgcttgttcacacacattccccactgaatagagcgcagagcctgagcttatcccacaggaaagccgggaggcgggtggagcccccaggactcctctgagagccacctccatccccacccttatcctcagccaaaaagacctggagaatctgaaagccgaggtggcgcggcggcaccagctccaggaggccagcagaaacagggatagagccgaggagcccatggctaccgagcccgcgccagcgggggccccaggagacctgggctcccagcccccggctgccaaggacccttctccgagcgtgcagggatagagagggagccagacggacagccagccagcggccccgtcaccagggagcccgactgcgggagaagggggcgagcctgcgggcggaagaggaagcaaggccctcttcctccacgtctcaccccaccccacccccgtgtcctcctgggagcctggcctgcctgccccgcagaaggtgtttttgcgctggttcaatgaatagatgatgcagaggccccattggagacacgtgaatggcgtgtgcggccatcagttcccggctggggggcaggtgttgcttcggcccccgccgtccggccggcgtgtgcgagtgcgcccctggctgtgagtgttgaccgttcctctcccctgtacatagcccgagccagtcctgagtgggtgactcctgagtgggtgacgcgcagacgggatttctcaggtcatttgtatggtcgacatgatggctgctgctttggctgccaccacccccgggcccagcctgtctgaaagttcagggtttaggccgaaaaacccggtggggaggggtggggagccggagctctgtggcggggctggagggctggggtgcactttagtttggggcgggacgggagccgccgttgtgactggcgtggtctggctgctgctcccgaacggaggggtcggggttggcttgctgggccctcagagcccagtgggtggctctgactcggctccctactccctgcacccagctgggcgcagccttggggcctgcggtctgaatgtatccctcccctcagttttaacctgagctgccgaacgcacagtgggccgggggcgaggctgggggaagcggggcccaattacggatcccgggagttacaggtgccgacgtgatgtcgcttctctggtgcccagctcccttcctggtctgagactagctctgggggtggcgggggcccccacacgctgctcccgctccaccctgcccgtgctgctgctctgtgcctgctgtcagagccctggtgggggaggatgtggccaccctgagacccggaggagacgggcgtctgcctgggtttgcggagagccgcttatgggtgtggtccgtccagacaccttgtttcaagggggatgggcgtgagcgggcaagcagagcatccccaccgctgagcaagaactttttcttgtttttaaaccatcacgtcctcatttcacattggaataaagtgagtttttgaaacctgcggc

SEQ ID NO: 6194 - DNA, 488 bp, Homo sapiens
gcctcaagttcgccaccctcggacaggattcagagagccaagacccaggtggacttgagcggcagagcctgtctctagaggggaagttgagctctcagtagctgctgaccgctgctcgccatctgtctccaagagcaggccctcggccccaccaggaacatacgccttttgggatgcttggagagatctgtacgtcttggaaattctgaaaagaaaaaaattccatccctgagtctgtcagttttcctgagccaaccggagaaaaggtgcttctgacctggcggttttaggtgacacccggggacagccaccagcgagtgagtgtcctgctacagaacctctcagacttcccagcagccccagcccagcagcagcttcctttgctctcaccggtgtgtcctgaacattctgtcccctctcctgagtgtttgttgttgaacgtgagccacatgttcatgcacctctcaaaacagggcctcctgtgaagc

SEQ ID NO: 6195 - DNA, 1075 bp, Homo sapiens
ccagcctcgggtccctcagacagcgggaagcggaagaagggcttggagatggaccccatcgactgcacaccacccgagtacatcctgccagggagccgggagcggccactgtgtcccctgcagccccaaaaccgtgactggaaggtaggatcctgggggagggaggaagagggtccctggcggggtggaggccccacaccagaggcctggcccctcagactcggccgctcccgaagcccttgcagtgcctgaaagtactcaccatgagcggatggaacccgcccccggggaaccggaagatgcacggggacctcatgtacctgtttgtgatcacagccgaggaccggcaagtcagcatcaccgcgtccacacggggcttttacctgaatcagtgagtccctgccagcccaccacacccccctgccgtgccagccgtcctgggtctgggcagacacctgggcccccgctcagtgcccgccctctccctgcaggtccacagcttatcacttcaaccccaagcccgccagcccccgcttcctaagccattccctagtggagctgctcaaccagatcagcccgaccttcaagaagaacttcgctgtgctgcagaagaaaaggtagtgcctttgtcccctcccgccttgtctcatggcacacgggggcatggggtgagccggcccacctgcactccagtgcttctgtctgaagaaaccgccctgggcccccagtgttggagtccccgctctagggagctgtcggccagtgccgagacagcagccgcaggagaggcgcccgtgcacttccatctggctccagggcagtgtctcagggtgggagatgccggagcaggcgggggcctcagaaaaggggcccgtggaagggctctgagcttggtgggctgccccatctccccctcccctgcctgccacagggtccagcgccacccgttcgagaggatcgccaccccattccaggtgtacagctggacagccccccaggcggagcatgccatggattgcgtgcgtgcagaggacgcctacacctcgaggctgggctatgaggagcacattcctgg

SEQ ID NO: 6196 - DNA, 1086 bp, Homo sapiens
tttgattgctgaaagaggcatagaaatttattttaaattgacagtgccaaacagagcaacaaattaatgaaacatcaacaacagtgagaggcttttcatgttttcttacaatcccttttaagatcagagaacattttttccccaaaaatttcaaaggaagagtcagagccaaagcattttgaaaagaaaaagagtttacttgaaaaggttcaagggagtcagacttcagaaaaactggataagcaagtgaaaaatataacaggtatttaaagaaaaatataaagaagattaccatgattactaagtttgcattaatttgttcatggagaaaaaacaaaatcttatcacatgatgatcatattcagaaagatcttgcaacatgagctaaataaaagtcaagaataaaatggtgtttgctggggatctgggattataagaaatactcaatgtttcattattttgggaccagaaattgacagggtaacgctgttatttttggttaatcttagggtacaaggtgcttcatcatgatggaaacaaacagggcatgatttctgctttgcttccagaagcataaagcaaatgtcactactacaaaatatagataggatatttcttataactctaatcactgttgtaagtaaataaaaatccaaagtcaaatcatagactctcaattaccatggtttttacacatttctaccatcccttcctggtgcactgtattgagccatactgagctatatttttctacttcacaacttttcacttacgggaagacagctattgtcccccacaccaccctaatgtgggcaagaggaccacttgaccctcatatatttaacactcttgaccctcatatatttaacattcataattatgtattgcctaaatactcactgttgtagtcactgaaatgcctgtgaaataatttttaaaactgtatttacaaaagaaagcctatttctagtaatggtgatggaaattaagagaaaatatagacatctataaaagtgtgatggttctcaatgacaaaatatgatttatgaaacaaatggctaaaatcctaaatcttttgcatgtttg

SEQ ID NO: 6197 - DNA, 4677 bp, Homo sapiens
tcatttcaaaggtgtccttgaatggccattttggacaaaactggttgtggtagccattggcttcacaggaggtcttgtcttcatgtacgtacagtgtaaagtctatgttcagttgtggcgcaggctgaaggcctacaaccgtgtgatctttgtacaaaattgcccagacactgccaaaaaactggagaagaacttctcatgtaatgtaaacacagacatcaaagatgctgtggtagtgcctgtaccacaaacaggtgcaaattcactgccatctgcagagggtggcccccctgaagttgtatcagtctgatggaacctgttgggagtttcttcaccgaagaatatctttctagccctcagccactacaaatgacagaagtgatcttgaattatttactcccttcagctcctcctttctcctactgacacatttttcctgactttgttcaaagaggaaaggagaaaaacaaacagaccaaatgcccaggagcccatgaagtaatagcgtaaagtaaagtatgatatggaaatgtgaagtttgcaagagaatgatttccaagacaattaagaactactggggcaatgaatgcttttaggcagtaatcaaagattaaatggacccatgatactcttcttcacagtaacaggggaaaagttcaagaatacagacttgaattgcgatgtgtattacttctagggccttgtaatgttaactgtctcatctggaaataactaacatatttggttttaagcctgaaattgtctgcattatccctaagtcacattggaagtgaacttggaggatgcatattttgatatgctttgacagctaacagatttgtatggtttagtggagtctggttattttgacagatgcatgttttttttaaatagatgcaatatacatttgaagacattgatatttggaattaattacgtttgtttaagtcacgcaaaagattttcagaaaatgttcggatataattagctctgttaaatacccacagaactgttatcaggtcttatatttattttcatctggttcctctaatacagtgctgtccaatagaaacacaacagccacaaatgcaggccacagatgcaaatatttaacttcccagtagccctattttaaaaagtaaaaataaatgtttgtttgttaaaatgaattttgattttttaaaaacactatatgttatttcaacatgtcatcaatataaaaaattgattgattgattgatagtttacatctgtttcttgaaccaagttttcaaaatccagttggtaatttaaaagtacacttcaacttgaattaactatattggatagcacagccgtaaaattagagactaagcttctgctttatttaacagttgttgagtatttcaaaacagtttaattcattcttttatttcaaagtcacaaaagttagttatgatttttaaaagcattaaattaagtgtcctcattttaaagtcagatgaagttcacatctctaaagggtaaaaatccaaaagtatagaaagataaaacaatcaatctgcctatagcagagttgtgaaataaataaattgttactatgaagtacttacaataggggaataaaattacctatttttgttattaaatcaaatgtgtaaggcttatttcatccatatgaggtgtcaacttgacagatgatgagtaattatgactaagaatctagcccttacttttaaaagctgacaggatttcccttgctcagttagaaaacaaaaatattcaacagattctgtgataagtaattaatcgtttaggtttgacagttgattattgtgttctttgcatattcatgtaaaactgatgtgtgaatgacattgcagtgagctagattaacggtgattatagatacagtggcctgtcaaagaaagatgtcctacatttaaaaaaaggaccttatttttgttagctgtcattatttattaacatgaaaaggcaatgatggccataagaaccaaagcatgagtatcacactgcacaaatctgggtatcacatggatgcactttgtaattatcagtgtgcttgttcttcacagatcataggaaaaagggaaaaaaaaaacaaacctttaaatgaggagaaagatggtataaatattagtagtggctgacactgagtccagatagtcttgattcctagaaataaacaaaaggtaaacaatgtcaattttgtgtgtgtgtatggcgtgtgtgtagtcatgtatatatgcggggaaaatgttaaggtattcagtcaggaaacaaaaggtttaaaactcatctttcttaaaacttgttataagcacagggaaagcaaagttgaggtaactaaactgaaccaaaaattctgtataaataaggatataagtaattaacgttttaaaaaacatgtggaccttaaacaaactgtatattaaattcctcttaaatgcccattttaaatatttaagataaatacatttatgaataacaaatctgtgggtgatttaaccatggcaccatatccaagggattaaccttaatgcaattttcctgttaattgtcctaagctttttactaatccattttccctgtgggttagtaatggcaacatgctgcttacagatattcccggggaaaaacatccagacaccagcaaacaaagaaatgttgatttctcttttgtttgctctgaaagtaaaataattatttactttaattaacatggaaaatattgtttaaattctgtacgaacctaaacaagatacgttgcagggctgatttcacagtggaggatgatcggctaaaataaagcctcatttattaagggctacacttttaacactaagaaaacatttctagaataaaaagcaaaggtaagcattattctattaatagtaaaagaggacatgggattttaaaactatacctaaattcttgcaattaacttttatgggcttggacattgttgaaatgagaaaataatataatatagcttcctggcaggttaaaagtcaacacttgattttgctattcttctgactttttgaaaccctgaagttctgaatttcaagcttttaagaagcttttcagcaatggttgtttgtttatggttcaaacatctgaaataactacctgcatttaaaatctaatgttgattattttctttttacattctgtgtggcaatggaacatttgccctttcaaacaataaaacgatttagctttgtggcagtgcttttttgtagactgactgactatacccttcaaaaagaaaaactgctctacggaatgcaaattttgaggcatgtttacctgctcgtggaagaaataaaatggaattgaaaaaaaaaggactaaaattgaagaatgaaattacagttgtgttaaaaaccttggctctttataatcatgaatcttcagtattaaaccagacattgatgctgttaatttttttaaagaactatcactcttatcgtacaggagtaaagattaaattgtaaaagaaagaaattccaattttttaaaaagtaaagcccaaaaggcaattaagcttaagtacaaaaacaaaataaaaatgaacaaaatctaaactaaagtgagcccaacaacctgagatacagcaatgtgtaacctgaaggaagataggtgtagactgaaggagtctttcaaaacaccccagcattaaatctcactctgcgctgcttctacacgtgattatagtcccagacagacgacctcatggttttttatcttgttttacaaaaggtccttgggtactctttaaaacatctattctttggcaggaaaattagctcattagaacaatgacaccattaagggacattataagggtcctggggctgaggtgggaagatttttctatctgccccatatagtttacccttccttgccttgaaaatgaatattatagaacagagtacagctcttaaaagttattagtatcattattattatagttgttatataatactttaattaagaaagatgaaaaccttttttctttcctaagtcagcccaatggtgctattttacatatcaacacagttgaaaggaagtactgttattttgggctgcagtgtttcctccacatctaaagaaagcccattttgaaactggatactgcattaaaacaaagaaggaaaaattattttaactgtgtgcagtttttgaaattaggcatttgtactattttggttttacataattctcttgcattaacaatttactgttttgtgaatcatgtgtactaaagcaaattaagaaaaagaaaataattatctgtgaaagactttgtatattaaacaagtgacgcaaaccttagttgtggtttccacaatttttgcctaacagactgatatttgtatttgcaacatccaaacacacatacattttttaagattttacaagggtctgaacatataattattttaaagcaaacctacgttgactaactcatgacatggtacaaataaataaatacacaaacagagggaaaccaatgaaaataaactatgtggactttcaaacctgctttaaaaaaagagttcaagagaaatcacaatgtaatctaaagcgggactgtctcaagaataagtcttggatatagaaaaataagcatataacagcatttttctgttcagagataatagtggattc

SEQ ID NO: 6198 - DNA, 9507 bp, Homo sapiens
ggcggtcccaggcaggcccagaagctgggcagcctctgccgggttccgggaaaaggagctcctgctgccactgctcttccggagcctgcagcatggggcccctgccgcgcaccgtggagctcttctatgacgtgctgtccccctactcctggctgggcttcgaggtgacgctgggaggggtcgcctcggcagtgtctggggagtgagggcggagggaagagtgagcgcagggctccgggacagaggtctcgtgtaactcctggcgccgcccaaggggttaaggcaagcagggagagctccggggctgaaggtcactttgtgcttttaaacggaatagagtcgctggctccaacccgagcctttatatcccgactgcagtttcccacggtggtggaaagaggggcggctccaaacattcagggagaaatgcagaacacggccacctcttagcccaacgatggcagttttggggaaaactggccacaggagcgaagatcctggaatagatttctagtagtgaggagagttttgccaatttcaaaccaaacaatgtagggtgtccgcataacccctgctctgcacttagcgcctcccttccctttccctcggctctttcacttttccatcttgcacactggcaatcgttcttgacctctgcccgcagatcctgtgccggtatcagaatatctggaacatcaacctgcagttgcggcccagcctcataacagggatcatgaaagacagtggtaggaagggagggtcggggcaggggtgatctcagtggcccaagagagccgaccccagcgggtccttatattggcactggcagccagaaagctgccctctgccccgtctctactaaaaatacaaaattagccgggcgtggtagtgcatgcctgtataccacagctactcgggaggctgaggcgggagaatcgcttgaacccaggaggcggaggttgcggtgagctgagatcgcaccattgcactccagcctgggcaacaagagcgaaacaacaagagaaaaaaaaggaagctgccctctgcccaaaacccacgtcgaggtccccaaacctgggacccttaggtcttttctcacttagcgtgcccaaccttctcctggcaggaaacaagcctccaggtctgcttccccgcaaaggactatacatggcaaatgacttaaagctcctgagacaccatctccagattcccatccacttccccaaggatttcttgtctgtgatgcttgaaaaaggtgaagagagtgggatgtagacagggtatccagtgaaaaacacagaagtcggagattgagggattgataggatggaggggctgcgggagactaaagcaagtgaagcctgccttgggaaacctcaggatcagccttgagcgagctgaaggttgccgggcatgaaagggaagaagagcaggcaaataggtcatgggaaccttgggtgagaggctgagggcggaggagctctgggggatgtcagaagcaaggaagagctagtcctccaccaggaaagcagcaagaggagccctgcctctgggtgcctctgccccacaggaagtttgtctgccatgcgtttcctcaccgccgtgaacttggagcatccagagatgctggagaaagcgtcccgggagctgtggatgcgcgtctggtcaagggtgagtgtggggctctgggaatcctctgggaggaccttggatgactttctgaccttccccaggcacgttttcagggtcatgatcctgcccccgcccgggacttctactgtcctcccagtcacacccctctccccgcaccgccttcctgctgtcttctcttcttcccagaatgaagacatcaccgagccgcagagcatcctggcggtgagtgtcctggctccaccccaactgcactcatagagaatctgagaacagttggcgtttgggggtaaagaagacaataggtctcttattgcatggaaaaggttataattactggggaagaaaggatgtctgtgattcagggcacaaactactgaaaagttggaactaaggatcctcaaaaggatatctcaaggttgaaaggggaagtgcaaaagggacaatatatgggaagaatttatttgctgaaagatgtcagtgagagaaagatgctcagtgttggaacccctggatggggagggatatagtattcacaagtctccacaaactccaacacaaacctcaccaacacatccagagtggaaggcaggagacttgttccaagaggctttaaaaagacgaaaagagataactaatgccagggttatataggagcctgagtgagaacaaatggaaatagctcaaaacattgaccagtgagccatggatgggggtataaaagtaagtttgtcttcaggattaaattaggaaattcaaaacagtattattcctctggtttacaaaaaaaaatagttgagacctattcaaatttaatatataaagtggcaaatcacacaaaagttaaacgtataaggaatggcaaatatatcttctacagtctatactcctgcaaagtacatgtgtaatttttagcttgcttttttacttcatatttaatcattttccatgctttttttttttttttttttttttttgagacacggtctggctctgtcgcccaggctggagtgcagtggtgtgacctcgacccactgtaccctttgcctcctggactcaagcaatcttcccacctcagtctcctgagtagctgggactacaggcacacactaccatgtctggctaacttttttattttttgtagagaaggggtttcactgtgttgcccaggctggtctcaaactcctgtgctcaagagatctgtctgcctccacctcccaaagtgctgtgtttacaggaatgagccactgtgcccagcctccatggaattcttaactctgaaagtatagttctttgtttctatagaggttccactgagtggacttatttttgttttgcttaaccatttttctgtggttaaacattttgtgtaggacataattctctaatttaaccaagtcaaagatagtgtctcattaggacaggctacatgaattcctgggtcccacttctgatctaggaagtcaagttgcagtggttgtcaatcttggctgtgaattaaaatcacctggagcaccttggcgctaaccctttcccctggaattgtgatgtaattgttcttgttcttttttttccttccttcctttttttttttttttttttttttttgagacagtgtcttgctttgtcacccaggctggggtgcagtggcatgatcatggctcactgcagactcaacctcttgggctcaagtgatctcgcatctcagccttacgagtagctgggacttcaagcatgtgccaccatgcctaattttttaaaaattttttgtagagatgggggtttcactttgctgcccaggctggtctcgaactcctgggctgaagcaatctcctgcctcagtctcccaaagtgctagaattacaggcatgagccacagtgcttggatctagttctaagggatgacctcacgtggagattttttaaagctcctcaggagtttcagatgggcagccaaagttaagaaccatctatcccaaactataccaacaaaccacaaactgaagcctttatctttgtcttgaagccaggtaggtggctgcagccatgtgccttgttacaaagttctcaggaagttccactggaattacagcctagctcttgattcaaaaaaagcatgagatacttaggaactgtgagaggtaggaaggaaagagccctggacttgaattctagagacctggattctagtgttggctctgctaccaacatgctctgtaactctgagcaagtaatgtatcacctctggattcaggctcttcatttgtgaaataaagaggtctatctagctgctctctaagatgtccgctggtgttaatttctgtgattgactctgtgccatctaccttttctccttttccacccatctcaagatttgggataaaggaaatagttcctcttggcaaggacagatctccacttgtgggtgggtaagggcattgccagcaaaacttgggggcagaaaataaaaagaccagagttttcctctgagatccccatccaatatcatgcagacacagttgtattccctactatattcccttaggctgcagagaaggctggtatgtctgcagaacaagcccagggacttctggaaaagatcgcaacgccaaaggtgaagaaccagctcaaggagaccactgaggcagcctgcagatacggagtgagcagctctttatgtgtgttcccagcacccatcctgaagatggagacttgagaatctctaagtttgagtccttatgctcctgtacaaaagccccctttccaagtgttctcctcagtgctcttaaacaaccctcatcttcttccttcttttccttgggctcagggaaaggaagggaaggagatgcacagtgagagaaaagagagcatcttagaaacaggaaggcacctggggccacagagcctcttagacctctttgcttctgtgaactcagaaaagtactgactcaaaggtttcaacccctgcctaatacctgctcctttgccttcctccttgcattgtaactgctttctccaggcctttgggctgcccatcaccgtggcccatgtggatggccaaacccacatgttatttggctctgaccggatggagctgctggcgcacctgctgggtaagtaagttaaagaatcaaccctgagccaggtgcagtggctcacgcctgtaatcccagcactttggtaggctgaggcgagcagagcacgagttcaggagattaagaccatcctggccaacatggtgaaaccccgtctctactaaaaatataaaaattagctgggactacagctgcctcagtgggaggctgaggcaggagaatcacttgaacctgggaggcggaggttgcagtgagccgagatcgcgccactgcactccagcctgggtgacaaagcaagactccgtctcaaaaaataaaaagattcaaccctgagctgcctttgaccccagctccacacccactatatcagttgaccagaaggaggggctcagagcaaaaaaatattcttggcacttccagtaacaaagcgttatgcagtcagtgctgttcaaggttgagtgggcaggggctgtcttcaaccccataaaagaaaaggaagccttctataccttgaagccaagcaaaagtctttctagaaaacccctgggaccttgtgggaccaactcctgctgccagaacacctgagaacagtgtgcagagtctgttgttttcttcatccaggagagaagtggatgggccctatacctccagccgtgaatgccagactttaagattgcccggaggaagcaaactcttcgtataaaaaaagcaggccatctgcttaacccttggctccaccataaggcactgggactcggatttctctatctgatagaggtattttctgtggccctgggagctgtctgtctttcccctacccccaaggatgccaggaagacgtccaccattagccatgtggcaacctttacttctatgcctcacaagtgcctttcagagagccccaattctgctttcccacaaaataaacctaatgccatcaggcaaaacatttctgtgtctgtatctgccctggtatattctcattcctggggtcacatcctgcctactctaggggtaggtgaaggagagctgtttcagtatttccagccagaccagccatgcagcccaccttgagcagcttgtgcggtggaagaagtgagaatagtcccccgttctctcacacagaaactcccctggtctctctatcagcaacagaaaaccaagccagatggactttgcaactaatcaagtttgggatttactgtcttctgaccaaccacagtgactgagatggggctgggaccagaagcccagtgggagtgaacagccgagggaaccagagtctggctgagcttgtggccagatatttaaactgggtccagccacacctgcaaaaccagggcaaggcagtaccgggaaactggctggagttgctgcggtttggggaagttgcacaccctttcatagatacctcccttaaccctcagtgcagattctgagaaaactccaaggcttctctgcctaacctagtataacccctgttccctactacatacatataacttttccattcccccagtaattgacccaaagtccctgcctctagctgtgcccattgtgcaatgatcagaatcccttgtttcaatagtattttgacttctttaagaatactctgtatttggaagctgaaacctcacttggatccattgttgggaaccaagtacggagccttacatagcccggaggagtttcaggagcaatgccactttcccttccatccctccctctgggtctggctcttcccatagtccattttccccttttatctcccattaatttctgtcttcctctctcaccttttccatgtctctagcatcctccaggatttaaaatcatctttacccaacttatctgtgaagtaatggcaaaagaacatctccaaattaagtactccttttcttcaaaggagtttcatgggatgtacagctagtataaaataaaaatatgggaagatgtccaatcttaaaaaccataagggcaaattaagacaaaactaagctgcccagagcagggtgagtggaaccagttttatgaataaagatgcttgtctcagcactatatgtggatatcaaaaattgtgaacaacttgaacacctatcaggaggagaatactttaatcaattatggcacattcaggagataatgttttacagtcatcaaaaattgtatatgagggccagcacggtggctcacacctgtaatcccagcactttgggaggccaaggcaggcggatcacctgaggtcaggagttcgagaccagactggctaacatggtaaaaccctgtttctactaaaaatacaaaaaagtaaccgggtgtggtggcacgtgcctgtaatcccagctactcgggaggctgaggcaggagaatcgcttgaacccgggaggcagaggttgtggtgagctgagattgcactattgcactccagcttgggcaacaagagcgaaactctgtctcaaaaaaaaattgtatttctgaagaattgttaagaacattggaaattcttgagatataatattgattggaaaaagatgaaactatatggtatgatctcaatatgtcctgatgaataaaaacataatacagaggacattattctgagataaaatacatcaaaatctttccattttatttgtatacttttacaatttttgattttttaaaatgtattctgatacacaaaataataaaaatgaaaaataaaaaatttggccgggcgcagtggctcatgcctgtaatcccagcactttgggagactgaggcaggtggatcacttgaggtcagcagtttgagaccagcctgaccatcatggtgaaaccccatctctactaaaaatacaaaaattaagctgtgtgtgatggtgcacacctgcaatcccaggtactcaggaggcttatgcgggagaatcgcttgaacctgggaggcggaggttgcagtgagccgagatcgggtcactgcactccagcctgggcgacagagtgagattccatctcaaaaaaaaaaaattgtagattcacattgcagtacaactgtgcatcttgcccattgatttctaaatgtattaactacttaaattaatcctgaatcttttcccaggcttaagtgggataatgttttattgtagatgcatatttcctggctctacccagtctttctttgaagactttatcatcctattttctgaatccagtggctgactttaatcttctctggaggaactagataatttctagactaatgcttacactcatgatccagattgtaatttctgaactccttcttccaaatagaatcaaaacaagaaaggggaaagcctctcaaagcaactgtgcgttaataatgaaacactctttttttctaatccaaggagggtttcatactttttcttagtttcttgccctcttcccttctgatcaataattgtaataggaaatttgcaattgtgccaatactcagattcaatactgaactactttcttgcattgtaattcaaattccaaggttaacaactagctgtatgtttccaaaacaatcttattgtatatgtattttcttaggtgaagtttccagaaatgattttttttttttgcagagccaaacacacatggtaatttaaaaaaataatgcacgtatgtggtaaaaacagtaaaagcaaggtatcaagtaaaaagtgaagagtcctccctttctcattcccattcctactctctaattttttatatatccattttgtaagctataatacagagattccatatactcttcacatactttccccagtggtaacctcttgcataactataggacaataacacactataggacaaaaatcaagaaattgacattgatacaatccatcaaccttattcagagttcaccagtttaacacatgcttattgtgtgtctgtatttagttctatataattttatcacatgtatgctgatgaccaccaccacagccaagatacaaaacattttcagtgtaaagatttctcatgctacccttttatagccacagctacctccctccctccctgtacttccctaacccttggcagtcactaatctgatctttatgtcttgtcatttcaaaaatgctacataaatggaatcagatttgattgttttcattcagcacaatccctttgagatctatccaaggttttgacatgtatcgagagtttattcctttttattgctgaatagtattaatattctatagtatggatgtaacatagtgtgtttaaacattcgcctgttgaaggacacttgggttgtttccagtttcaggttcttacaaataaagctactctgtgtgttcatgtacaggtttttattttcatttctctgggtaaatgcttaggaacacaaccactgggtcccatggtaagtccatgcttagttttagaagaaactgtcaaggctgggtgcatgatggctcccatctgtaatcccagcactttgggagaacaaggcagaaggatgacttgagcccaggaattcaagaccagccagggcaacatggcgaaaccccatctccaaaaaaagaaaaaagaaaaagccagacatggtgatgtgtgcctgcagtcccagctaattgggaggctacagtgggaggatcccttgagcctgtgaggcggaggttgaagtcagctatgatcacgccactgcactccagcttgggcaacagagccagaccctgtctcaaaaaaacaaaaacaaacaaaaaaaaggaaagaagaaggaaggaagggaaaggaaa

SEQ ID NO: 6199 - DNA, 434 bp, Homo sapiens
gaaactgccatactgttttccagagtagctggtttcacttttccaccagcaacgcatgagtgatccagtttgtccacagcctcaccagcatttagtgttactactgtttcttactttaatcattctgataggtgggtagtgatagctcactgtgatttttaatttgcatctccccaatgactaatgaacatcttttcatgtgctacttgccatctgtacatggtcgtcagtaaaatgtctgttcatgtcttttgcctactttctaactagactcctttgaaaatttctcatattgtttttaacaatagattttaaaagaatttacagagtaagaatacatttttgagacaatggggaaaatgatacggagtgaaaggtgatattaaagaattaatgttaatttcattatgtgataatagctgagtggctgtgca

SEQ ID NO: 6200 - DNA, 743 bp, Homo sapiens
  SITE (2): n equals a,t,g, or c
  SITE (129): n equals a,t,g, or c
  SITE (131): n equals a,t,g, or c
  SITE (138): n equals a,t,g, or c
  SITE (192): n equals a,t,g, or c
  SITE (220): n equals a,t,g, or c
  SITE (495): n equals a,t,g, or c
  SITE (672): n equals a,t,g, or c
cncatctcacccctctaggccatcaagtattggctgggtgcggtggtttatgtctgtaatcccagcactttgggaggcggaggcgggaggactgtttgagctcaggagtttgagaccagcctgggcaancnataacanagaccctgtctctacaaaaatatataaattagccgggtgtactggctcacaccntgtagctacttgggaggctgaggtgggnaggatcgcttgagcctgggaggtcaaggctgcggtgacctgtgattgcaccaccaggagaccctgtcttaaaaatgtatatataaaaataaaaagaacatcagacatcaccatcacctcgcttagaatccatggggccttctcctcaaattcaatcttcccaggcatttcatgaacttgcgtctagtttctgttccctctcaaattgcccaggctgtcctgtgagtgacagcagctatttcgtgggcctcctctggaatcatgagaagtcacccnaaacaatctcagttttctagctcactccgtcttgacatttctacactgtcatccttggttttcttggaaattaatttgcttttcttcattgtctttctttggagctgctttccttttgttggttactattttatttttagcttctcacaccataccgacatatgttggttattcttnttagacatgttttttgttgttgttgtcacctggaacttttgtatcttgaataaatttggggatcaaataca

SEQ ID NO: 6201 - DNA, 451 bp, Homo sapiens
  SITE (118): n equals a,t,g, or c
gtatttttagtagaggcggggttttaccgtgttgaccaggatggtcttgatctcttaacctcgtgatccacctgcctcggcctcccaaaatgctaggattacaggcgtgagccaccgncacctggccctaaaagtagccttcttttcccttttaaagagttagtgtccatagctactggatgccattttggttcaggtggaccgtgaataggtttcactcatcatgcccaaaggttgccactcctgacaagtcacagacaacgcttgcaccatcatcttcttccttcagagtctgtggtcccctggatgtcactaaggtcctgcttcctgtaccaataggttttaaacactacccaaggcaggctggctttaaatatcctacttaatctggctgacaggctctccctgcacctctggtactctgctgcctcattaacagctccggctactc

SEQ ID NO: 6202 - DNA, 594 bp, Homo sapiens
  SITE (23): n equals a,t,g, or c
  SITE (119): n equals a,t,g, or c
  SITE (259): n equals a,t,g, or c
  SITE (451): n equals a,t,g, or c
  SITE (533): n equals a,t,g, or c
  SITE (535): n equals a,t,g, or c
  SITE (576): n equals a,t,g, or c
cctgggcaacatagtgagactgnccccccccatctctacaaaaaataaaaatcaaaaataatactgtgggcaaactttacttagattttattcagagtagtgcctgtttatttttcatnctgtgctacctgtgccggcattccatatgcatttgatttagtctttaaagtaccccggtaaaataggtcttttgtctgcatttttcagatgggaagactgaggttttgtttatttatttttatttatttattttttgagnacggagtctcgctctgttgcctaggctggagtgcgatggcacaatcttggctcactacaacctccgcttcctgggttcaagcgattctcctgcctcagcctcctgagtagctaggattacaggcgcccacaaccgcacccggctaattttttgtatctttagtagagacagggtttcactatgttgtccaangctggtttcgaattcctgacctcaggtgatccacccgcctctgcctcccaaaatgttgggattacaggcgtgagccaccacngncccagcctatttatttatttttttagaatcaagatcttgcntatgttgcccaggctgaa

SEQ ID NO: 6203 - DNA, 2866 bp, Homo sapiens
cctaaattctatttctgtcatttcagccagctcagcctggataaacactcttgttagagaatttgtatggtcatttggagcacatatgacactctggccgttttaatttttggagttcttgcgttagttctttctcatctccatgtgtgggtgttcctttaactgccatatagattgagtacagtcaatagatttctggctgttttcactaggctgaggccttgtgcagggtctttttttgaagctgacttcttgtctctagtttcagaggtgagtatgttagtgaggtattcttggtgttgaagctttggggtgtgatccagtaggtggcacttaggcttattggtcaactggtagactcttgctcagttgtgtggctcctctgtgttttctcatagttacagctgtgttcactctcaatgctctgaaagtgtgggttcctctcccccttcagtgccagctgtatggctatagattgtggtttgacactcctggctgcccactgcagctctggggcaatgtcagtgtttacgttccttcctcaacttggcggcaacagaggaaaggaccttagtagtggttgtggtcaagggtcttttgcttgtatcctgggagctccacaccagagagatgtaggtcagcaattcctcagtgcaatcaccccaggatgaagggtctgtgctgtgggctcaagccaggggttctctctggtgatgagtgggggttgggggtgtgggaaccatgggagacagactggcctcctcttcttgggttgattgcagcttgttggaggtataaataaggtacttagggtcttttcttcttcattagtctgagggtagcaagggcagttctactgcagagacagtggcagagaggctttcaggaacagtatttattaaccaattgtttcaacaaatatttattgacaattcaacatgtaccagacactgtgttaggcaaggggtcttcaatgggccacaaatagatgtggtccttgaccatgtcattggagcttaatgggagagactgatagtaagcaagtaaacaacaacaaaaaaataaggtaattcaggttgtgacaacctctctgaaggaaatatataggatgctataaaagtgactagagcaaggaacggcctaattgagctaagataatcaggtagggtctctgtaaggagttgacattaagctaacaactaaagaataagaagccagccatgtaaatagcttggataagagctttccaggctgaagggaatggaaatacacaggcctagaggtaagaaggagatgggtgtcttccggaaactgataaaaagtcagagtggctcagatatgctgatatgtcccctggtattttttaaaatttttggccgggtacagtggctcatgcctgtaatcccagcactttgggaggccgaggtgggcggatcacgaggtcaggagttcaagaccagcctgactaacataatgaaaccccatctctactaaaaatacaaaaattagctgggtgtggtggcacgtgcctgtaatctcagctactcagaaggctgaggcaggagaatctcttgaacttgggaggcggaggttacagtgagttgcgatcgcgccactgcactccagcctgggtgacagagcaagactccatctcaaaaaaaaaaaaattaatttttgagggtatattgtaggtgtatatatttatggggtacatgtaatattttgatacaggtattcaatatgtaataatcacattacggagaatggagtattcatcacctcaagcatttattctttgtgtcacaaagagtcccattatactcttttagttattttagaaagtacaattaaattattattgactatagtcaccctgttgtgctatcaaatactcggctttattcattctttccaactattttttttgtacccattaaccatcctcacctccctacccgccccacccctattacactacccagcctctggtagccatccttctactctctattttcatgttttcaattgttttgatttctagatccaaaaataagtgagaacatgtgatgtttgtctttctgtgcctggcttatttcatttaacataatgacctccagttccatccatgttattgcaaatgacaagatctcattcttttttatggctgaatagtaatccattgcagataagtgccacattttctttatccattcatctgtgaatggacacttaggttgcttccaaattttggctgttgtgaatagtgctgcaacaaacatgggagtgcaaatatattttctatatactgatttcctttcttttgagtatatacccagtagattgttgggtcatatggtaactctatttttacttttatgagaaacctccaaactcttctccatagtggttgtactaatttacattctcatcaacaacatatgagggtttccttttctctacctcctctccagcatttgttactgccctggtgttattttgcttcttaagtattagaactatacttagtgttatatgttctgtgattataagtaaaactgcctttgctatatagtatgcatagaatattttaaagttattactagaagctgacacattgttgttttctattacaaacaataaaattagtttccatttattgagggcctgtttcatgttaactgctttacaaatattccttatctcatttaattctcccaacaatcctacaagaaagctaatattatcccattttatagatgaggaaattgaggcttacagagggcaagtaacttgcccaaagtcactcagtaccagcaaacggacttttccccctctccctgcccccaaataccagccccccactgca

SEQ ID NO: 6204 - DNA, 2858 bp, Homo sapiens
cctaaattctatttctgtcatttcagccagctcagcctggataagcactcttgttagagaatttgtatggtcatttggagcacatatgacactctggccattttaatttttggagttcttgcgttagttctttctcatctccatgtgtgggtgttcctttaactgccatatagattgagtacagtcaatagacttctggctgttttcactaggctgaggccttgtgcagggtctttttttgaagctgacttcttgtctctagtttcagaggtgagtatgttagtgaggtattcttggtgttgaagctttggggtgtgatccagtaggtggcacttaggcttattggtcaactggtagactcttgctcagttgtgtggctcctctatgttttctcatagttacagctgtgttcactctcgatgctctgaaagtgtgggttcctcgcccccttgagtgccagctgtatggctgtagattgtggtttgacactcctggctgcccactgcagctctggggcaatgtcagtgtttacgttccttcctcaacttggcggcaacagaggaaaggaccttagtagtggttgtggtcaggggtcttttgcttgtatcctgggagctccacaccagagagatgtaggtcagcaattcctcagtgcaatcaccccaggatgaagggtctgtgctgtgggctcaagccaggggttctctctggtgatgagtgggggttgggggtgtgggaaccatgggagacggactggcctcctcttcttgggttgattgcagcttgttggaggtataaataaggtacttagggtcttctcttcttcattagtctgagggtagcaagggcagttctactgcagagacagtggcagagaggctttcaggaacagtatttattaaccaattgtttcaacaaatatttactgacaattcaacatgtaccagacactgtgttaggcaaggggtcttcaatgggccacaagtagatgtggtccttgaccatgtcattggagcttaatgggagagactgatagtaagcaagtaaacaagaacaaaaaaataaggtaattcaggttgtgacaacctctctgaaggaaatatataggatgctataatagtgactagagcaaggaacggcctaattgagctaagataatcaggtagggtgtctgtaaggagttgacattaagctaacaactaaagaataagaagccagccatgtaaatagcttggataagagctttccaggctgaagggaatggaaatacacaggcctagaggtaagaaggagatgggtgtcttccggaaactgataaaaagtcagagtggctcagctatgctgatatgtcccctggtattttttaagatttttggccgggtacagtggctcatgcctgtaatcccagcactttgggaggccgaggtgggcggatcacgaggtcaggagttcaagaccagcctgactaacataatgaaaccccatgtctactaaaaatacaaaaattagctgggtgtggtggcacgtgcctgtaatctcagctactcagaaggctgaggcaggagaatctcttgaacttgggaggcggaggttacagtgagttgcgatcgcaccactgcactccagcctgggtgacagcaagactccatctcaaaaaaaaaaaattaatttttgagggtatattataggtgtatatatttatggggtacatgtaatattttgatacaggtattcaatatgtaataatcacattacggagaatggagtattcatcacctcaagcatttattctttgtgtcacaaagagtcccattatactcttagttattttagaaagtacaattaaattattattgactatagtcaccctgttgtgctatcaaatactcggctgtattcattctttccaactattttttttgtacccattaaccatcctcacctccctacccaccccacccctattacactacccagcctctggtagccatccttctactctctattttcatgttttcaattgttttgatttctagatccaaaaataagtgagaacatgtgatgtttgtctttctgtgcctggcttatttcatttaacataatgacctccggttccatccatgttattgcaaatgacaagatctcattcttttttatggctgaatagtaatccattgcagataagtgccacattttctttatccattcatctgtgaatggacacttaggttgcttccaaattttggctgttgtgaatagtgctgcaacaaacatgggagtgcaaatatattttctatatactgatttcctttcttttgagtatatacccagtagattgttaggtcatatggtaactctatttttacttttatgagaaacctccaaactcttctccatagtggttgtactaatttacattctcatcaacaacatatgagggtttccttttctctacctcctctccagcatttgttactgccctggtgttattttgcttcttaagtattagaactatacttagtgttatatgttctgtgattagaagtaaaactgcctttgctatatagtatgcatagaatattttaaagttattactagaagctgacacattgttgttttctattacaaacaataaaattagtttccatttattgagggcctgtttcatgttaactgctttacagatattccttatctcatttaattctcccaacaatcctacaagaaagctaatatcccattttatagatgaggaaattgaggcttacagagggcaagtaacttgcccaaagtcactcagtaccagcaaatggactttttcccctctccctgcccccaaataccagccccccactgca

SEQ ID NO: 6205 - DNA, 621 bp, Homo sapiens
ctgagaggtccactgtaagcctgatgggatttcctttgcaggtaacctgcgttttctttctggctgcctttaacattctttctttcatttttaccttggaaaatctgacaattatgtgtcttggggatgatcttcctgtgtagaatcttgcaggagttgtctgtatttcctgtatttgactgttgtcctctctagcaaggttgtggaagttttcatggacaatatattgaaatacgttttccaaactgtttgctttctcccccttcctttcagggatgacagtgatttgtagatttggcttctttacataatcccctacttcttggaggttttgttcattcctttttattcttttttctttatttttgtctgactgtcttatttcagaaagccagttttcgagttctgagattctttcctcagcttggtttattctactattaatacttgtgattgcattgtgaaattcttgtactgtgttattcagctatgtcggacccattaggttctttattatactggctattttgtctttcagctcctgtatcactttattgtgatttgtagtttctttggattgggttttgctgtcctcctgaatctcaatgatcttcattccta

SEQ ID NO: 6206 - DNA, 156 bp, Homo sapiens
aaatgagtttcttatgtcttccttttctacatagacatgggaacagtctgatctctctttcttttccctacaatcattccacccctggcccctctcaaaactcatgtcctcacatttcaaaaacacaatcatgcgctttcaacaatcctcaaaaaa

SEQ ID NO: 6207 - DNA, 156 bp, Homo sapiens
aaatgagtttcttatgtcttccttttctacatagacacaggaacagtctgatctctctttcttttccctacaatcattccacccctggcccctctcaaatctcatgtcctcacatttcaaaaacacaatcatgcgctttcaacaatcctcaaaaaa

SEQ ID NO: 6208 - DNA, 621 bp, Homo sapiens
ctgagaggtccactgttagcctgatgggatttcctttgcaggtaacctgccttttctttctggctgcctttaacattctttctttcattttcaccttggaaaatctgacaattatgtgtcttggggatgatcttcctgtgtagaatcttgcaggagttgtctgtatttcctgtatttgactgttgtcctctctagcaaggttgtggaagttttcatggacaatatattgaaatatgttttccaaactgtttgctttctcccccttcctttcagggatgccagtgatttgtagatttggcttctttacataatcccctacttcttggaggttttgttcattcctttttattcttttttctttatttttgtctgactgtcttatttcagaaagccagctttcgagttctgagattctttcctcagcttggtttattctactgttaatacttgtgattgcattgtgaaattcttgtactgtgttattcagctatgtcggacccattaggttctttattatactggctattttgtctttcagctcctgtatcactttattgtgatttgtggtttctttggattgggttttgctgtcctcctgaatctcaatgatcttcattccta

SEQ ID NO: 6209 - DNA, 14769 bp, Homo sapiens
cctccccatagggttcccagcaccatgagggcctggatcttctttctcctttgcctggccgggagggccttggcagcccctgtaagtacctaaatatcatgtcttcttgttttcattcctaccgctagcaccaggggttctgagcctgccagccctggatgctgaaagggaacagggacttccccatttcaagttagtggtcttttttttttcttaagttaggaagctcgggataaaaactgggatgaggaccattgggtggaggtatcagagaagagagagttccatgtaatgttagataaacttcttagtagtcagagcctcccagcaatgaactaggattgctttagaaggaaatgacctctttgtcatatgaggaattcaagcaggcaggagacaggatgtgggggatttctggtaggggtggtattagaagagattcaagctatagagagaggaatgtgttggcttctgaaacagtgagggttgtttggttgtaagcaacagttcaatctgactaaattggggaaggaggggaagatacagaggtagattataatattaaaggccttggggaggactggaaaagggcagctctaggctttgggagttaagaactaatggacagtctctgagatattgctgtctgaatgaatcaactccagcaattttcacatcttgagagaatgtgccaagaaggtttttataaattcaaaaaatgagagccaatctggctgagcttgggtcctgagccagcttcttggccaggtgagagtggggccccttgattgacagacagttcctcgaagcattgcatgcagggacaggagtagttatccacagctcatctggaagccttcacaaggagaggaggaagaaacagggcaggcaaaaagtgcaatttctttcaacctgtgatcccctcatcctctgtttactaagaagtgggagtgatggcagaccctggcaatcttgatcaggctggtagatggaggcaaaagtttctcaaagttggcattaagttttgaagcagctccagccagctaagggcctcaaagttgtgtgttttcttgcttcctcctactccaagttgaaatggcaagaaaaattgcctaataatactactaataatatcacactgtgaggaagatgatgacatctgttaaaattcacagtgtcatcccctctggatgtcaattttcctatctgtaaagtgaaagaattggtctggatcagtgattttcagactttataagaattcaaagcagcagaaatacttttccaagctaaatcttaggtagacacctaggatataaaatatataaaatgggagctgcttgagtgttccacggtgctcacatgactggcttcttctttgttctgtccctcaccatggcagtccatgaggcacaactttggggatctccagtaagctgctctccaagctcccctagcctgtatccgaggccacaggcactttggaggtgaagctggccttattcctgacccctctgaacgctactttctctttccaacagcagcaagaagccctgcctgatgagacagaggtggtggaagaaactgtggcagaggtgactgaggtatgtgggcagtgaccgcagccccttagcccctctctacctgtatctgtgccctgagaaattagggcggatgctgtgggtctcaatgctagagtggggcattcgtctccctgtacacacatagcatagatgcaaaccctgagtatatcccacatcctgacacactcctgaatgcttcccaaaccttcaacggaaccctacgtttggggaccaggaccttaaaatttttgttttttaagctatgcaacagttgttcttccatgattacccacagtttttgcaaacgtaaaacagaggaggccgggtgcggtggctcatgcctgtaatccctgtaatcctttgggaggccgaggcaggcaattcacgaggtcaggagttcaagaccagtgtggccaacatggtgaaaccctgtctctactaaaaatacaaaaaattagctgggcgtggtggcgggtgcctgtaatcccagctactcgggaggctgaggtaggagaatcgcttgaacccgggaggtggaggttgcagttagccaagatctcgccactgtactctaccctgggcgacagcatgagactccatctcaaaaacaaacaaacaaacaagcacacacacacacacacacacacacacacacacacacacacagaggaaaggggagatgcttgggtgtggctggcaggggtggaggcttgacaccctcttgtgaacatagatctcagtcaatttagaaagtttactttgccaaggttaagaatgtgcctgtgacacagcctcaggaagttctgagacatgtgtccaaggtggtcgggagtacagtttgctttcatacattttagggagacacgagacttcaatcaacatgtctaaattgtgcattggttgagttcgctaaggcaagacaacttgagaagtgagggcttccaggttagaagtagataagagacaaatggttgcattcctttgagtccttgatcagccttcccctgaatacacaatttaatctggctcagtgaatctgcatttttacataaacaataggggagaggaagcaatcagataagcgtttgtctcaggtgagcctcagagggatgactgcatagaataggaggcaggtttgtcctatgcagttctcagcttgacttttccccttagcttagtgattttggggtccaaggtatattttcctttcacactctctttccctaacacccctggtgacctctaaggcagctcaacagaatcccaggcatactgcaaaacacagcaggcctatagattaaatctggattcccaaccctgcgtttgtgctttctgtgacctggaacccttcagctacccttatgggtctgggatgggagtggggccatttcacccattcttctccctcaattccaggtatctgtgggagctaatcctgtccaggtggaagtaggagaatttgatgatggtgcagaggaaaccgaagaggaggtggtggcggaaagtatgtcccttccctgtaacttggcacatccaagctgcccttggctgcctgggcctggggcacgaggacagcctacatgaggctccttccagcagaaatgcagggtggggtcctcagtgggctatgaaggaaacacggctttgacttaacaagtgggaaactgtggcactcagtcccctgggatctgggcaagatcggtttccaggccatccatgtgtgtggtaggaaggagagttctccagctggaaatgggcttctcccctcatagctctttgccctgagtccaaagctgagtttcccagtcccacggaggtcgctgatcacatctggtcaccgaaatctcccattgcttctgtatcagcccgtgccccacagagaagtagaactgagagaagagatcaggaacttgcacactcataagctcattctatttcacacagtccaaggaaacgaggtcctgaggaaatgcaacctgacataatccgtaccatgctatccatgcgttagtgccctgggagagaaatgacctaggggctctggctccagccctaggtgcaaagcatttgtactcaaggggttaagagcaaggactttggaagcggtccaaccaagctttgaacctaggcttctccacgccagcttgcttagcatctcggagcctcagtttctcatctctcatatggggctgatgaagatggcagacccttgtcccagggctgccgggaagttttcagacaagctgagtaggcatccgctaaaggattattaaaacacccaaaataaagcattgcgaggaaaaggccacattaagctctcatcctgaggggatagctaatggtatttgatctagctgggcacagggtttctgttgaacagagggacatctactgagtcatgttccttcccgcctccacgcccacctcatccggtgtttaccaggctctattgtccagcatggactttgaggctcttctcccttttcctttactgccacttaagtctgttttgttgggcctcagctccctggctcagtgtcaacagctgactttctaagccattctagaaagcttattctggaatccagaaatgccccactgtgattgttcaatggagacccaggaacacaatggttgcttcaatcttcaggaaagccatatggtatctagtgtttctgggtcccagactgagcctccagccccccagaagtgcctgacctctatctcaagctaaacctctaatccccaggctgaaccagctgctgccctaaatgttgactgtgaggctcagtgcaagagcaggcaggactcagggctgtccaaagcccagagtgggggccacagtcaaggactgtcagccctgagatctgtccaggtaggatgggggtggatgtgctagtccaggtgatgctaactcccttgtctttctgccctacagatccctgccagaaccaccactgcaaacacggcaaggtgtgcgagctggatgagaacaacacccccatgtgcgtgtgccaggaccccaccagctgcccagcccccattggcgagtttgagaaggtgagggctgagagacaggggcagggggaagggattgggcacttcggaatacaggatgtctgctcaggaaactgttggcttggtggttctatggggcagtgccagtctcagaagtccccttgctagacctagtcccagcaggaaagaggggatgagtcagagtgctctgcctggcactggatcttttcagcaaccagcaagactttaaacagcaccatcaggttccaagccctgtgccagactcttagagctaagagtataacagcatcagcaaagaatcaggtccaaaaatacgggttctggggccaaactgaaggttgacttcaaacctcatctccatcacttattaggtgtgagatttaagctaagttgccgaaccttttcaggtctcagttttctcacatccaaagagaggataaaaatagtccttaactcatagatctgttgtggagatgtgtcagaaatgtttggtacataacaagtatccaataaatgctacttaattttaaattatctctcaaatatgtcccttctctccaataggatccatccatccgtccaagtaaatattttttgagtgcctgctcctgcctaccatcatgctagtggcagtctagctcatggcagcaaatctagggccagcactattcctacagcctcccatctggcttctccatcttcagtttctccagagactacatagcctctgggctccacattttaatatcattgttaacattttcctcctcctcacccctccccactcccagtgcccagtcaccagtgcccatcagttctccctctgcagtgacatataagctatactaaataagtacggacaggatgttcaacacaggctcccctcctcctaacacagctacttacggccactgcatgtccagccctcaacatctctgcttggccacccctatgttcagagatcgactaggactccattggctcagcatacagttgtactcacacctaaggtttagtacagcgacatattcaggatatacagctggatcgtaagggaaaaagacactagcagagtctggaggaatctgggtggagactgactgactcccaagaggggtcatcagagtgcattcttaccccagctacaaagaggcagccacatgtgagtgatgtttctttccagggaagttcattagagactcagcacccaaagttttaattggaggctggtcacataggtaccctttgcctagcatgcaccagaatttcacacttccagaaggaaagcagatgttcagcataaaccagattgtttgtacaaacagtccaggcatagcgagccactcttatcagttagggaaagatttacaacagtgcagagaactgtttcccagctaagttcccagacaccagccacaggctgaccttacaagcaggccttttctaaggataacaattccaggcctgctatgttaactcttctttgaacactcttgtttctctcccattcctgtctttaactttctcttcaaatatcttccaggatttttttccctatatctcagaactgactcagtcatgcctctgctcagagaccatcgatggctctcagcctgggctgagcattgacctgggaacccaaaaagtggatttgtggcccagccctatcactaactcactatatgacctcaggctaatgacattccttgcttaaccctcagtgtccccatctctgaaatggacaaggatattggtatcagcgaagggctttgggaatgaaggagggggtactctgtgctttgccaacaggtgtgcagcaatgacaacaagaccttcgactcttcctgccacttctttgccacaaagtgcaccctggagggcaccaagaagggccacaagctccacctggactacatcgggccttgcaaatgtgagtgtccttgggcccttccagactcctgtcttggggagagagctctgagctggcactgatgctgtctctgccacccccatgctgggtgatcttgggcaaatctctctccctttctgagtctcggcatccccatttataaaatgaggtaattgtctatgagttggctcctctcaactctgagttcagggcactttctggggaaggactgagcgattatggaaggtcaacatcagggaagatttctggagtctctcactagcatctgagacaactgcatttcatttctctaatgaggaagaatttcttctctcaggctaagttgaatctttcttgcttcaacactgtaaagcaaaaatgatgtttgacctgggcctacaaaatattttgaaaatatctgattttgaatgctttaaaataagggcatgcctgtcggtttgctttgggccctgttacttggtactgtcatatcttcacccttttactccattacattcctatctgccctccgaagagagaggataagcaccctcttctggaaacctgggagtcagttgtctggggagggatgccagggtgtggtctgatctttggttagtgaccccagctgcaaactcagtggggccaagtgccttgttcagtatcctccctatcatgggagacccccaagaccacacctgctccccctccaaggcaacatccacactgtgggtcttgtgtattctggcacccgatggcaatgaggagagccactcacctacctcaggtgtacagggtgcagaaaagtatgtagggggtgggaaacaaagttctcctcgtgggaccccaggtatgaaattgagaaggtacagagtagaaaaggagggttgggggaagaagcatgggtaggaagtccctgggcagcaagactagagagcctgtcttaaggagtctttatgaagtggctttgctttccctgaggcatgttgcccactcacttcaactcctaaggtttttatcaccagatattctctcccagaccccagctgatgatgaaggtagcctcacagaggggactttccctggttcaatgatgagggaagaacagacccctaagcccccaggtgaccacactgccctggatgctggatgaggctctgacattgtggccttgagcaagtcccttctctccatgctgacctctaataagtccagtacaaagtgtgaacctgggtcaggcgcggtggctcacgcctgtaatcccagcactttgggaggccgagtagggaggatcacttgagctcaggagttcgagaccagtctgggcaacgtggcaaaaccttgtctctggaaaatatacaaaaattagctgggtatggtggcatgtgcctgtagtcccagctactcaggaggctgaggagggaggattggttgagtccaggaggctgaggctgcagtgagccgtgattgtgccactgcactccagcctgggcaacagagtgagaccctgtctaaaaaaaaaaaaaagaagaaaaaaagaaaaaagaaaagaaaaggaaaagaaaagtgtggacttggatgaaatcttcaggtccaacatttgggattctaagttccaaagaccaggttggaatcatttctaagaaggttctggtggttacacattcctgagtcctctactccccactccctgccaagctgggcctgtggatagatgtgatccctcagcctcccagcttcaaacacctgccagtggttgacgtgaacaacatgggctcagtctcagctaggatcacacccaaagcccagcacccagtaaggtgcaggagccatccatttccctgagcagagcagattaggctgaggaaagcagcagccatgcctttgcacaatgcatttctagggcattcttcccacacataatctcctctgctcattgtcctgtgaagaaactgtggcctggagaggttgagccactgtgccaaggccaccaatgcaggtggtatgtgggtgggtgggggcctggggtggggagcacggcccaggcagggtctgtgctgaccgcccttgtgtttggaacctagacatccccccttgcctggactctgagctgaccgaattccccctgcgcatgcgggactggctcaagaacgtcctggtcaccctgtatgagagggatgaggacaacaaccttctgactgagaagcagaagctgcgggtaagtggtctctctggccttgctggccccgtgctggtgaagatccagtcccattcctagaactgggcccccagctgcagggcggcatcctgctccggagcgtgcatttacccctgagcaccaggacacgtacttctcttcctgcctttggaggctgtggtgcacattaacatcttagaggctctgagaagtcctgcagcagagacctgctccctttgcttaacctaacgttaaacaaaagagacacaaacagccctattcctttttcctttggagtctgtggatcttaagctttaatgagcatattaactaccccaagaagctgataaaatgcagattccttggccccatctcaggccactgaaacagtgtctctagaaagcaaggcccaggaagctgcattctaaatactccccaggtgatttatgtttattttatttttttgaggcaaagtctcactctgttgccaggctggagtgcagtggtgcgatctcggttcactgcaacctccacctcctgggttcaagtgattcccctgcctcagcctcctgagtagctgggactgcaggcatgctaccacacctggctaatttttgtatttttagtagagatggagtttcactgtgttggccaggctggtctcaaaactcctggcctcaggtgatctgcctgcctcagcctcccaaagcgctgggattacaggtgtgagtgtgtgcccggccttcgccaggtgattttgatgtgggtagctatatggagaattctttgaggtcatcccaggcttctatttttgtgaatgagatgctagtacccatctatgacacctccctcccctcgctgtgagctttggtctggctagtctctgcctgctctggccttctgggaggggtgggagggcccgactggtccagacaatctccatggacctcttgtcacacacagtctctactccctcaggtgaagaagatccatgagaatgagaagcgcctggaggcaggagaccaccccgtggagctgctggcccgggacttcgagaagaactataacatgtacatcttccctgtacactggcagttcggccagctggaccagcaccccattgacgggtaagaccccagaccctagagtgaacagagctcaaggctggcaggtgcactagctatggccagaaagcctctcagcagcctatactgctccaagccctggcatccacagtttgcctggggattggagcagaaggatgaggcatctggagaaaagatgtggacctgggacaaagaaaccgataagacactctcatgctgaggtgaaagtcagtaggagctcaaaatagctccataatcctgcaagtactaggcgtggatatctggataatgaaggagtgtgaattaagaaggagtaccaggctccaaggggtggcaggggacaaggttgggtcagccacacgccccctgtccttcagcagaacatccaggggcagagcagccacctggcactgtctaagccccctcctaaggctcagccccaatagggcccaactgaccctggaagttatccaaaaaagcctgtctattttgcaagcccccagtttgagggctcttgtcccttgtccaaacgagttatgaggccctgtgcaactgcactgccgaacaggcaggcagctggccagttagcaaatgcttatggagtgtgcattttgtgccctgcactattctaggcaggggattgaacagcagtcagagctggcatggtccttgccctcatggacttatactctgttcataacctgtcactaccttctgaacttctcttgtggtgatgaagtgagagcccctgctcagcctcagatggagcaagctacacctgcaccttcccagagtggttttttcttcgtccttgggttgtggaagcagagcatcacacagaggggaaaggaagggctgccctactcacatactcagggaacttcctctctaggatgttcacccctcgctctttgtccagcctgtgtgcctggagtctgccaaccctgccagtgatcctgagggctggggtctcctgggctctgggaatctcccggccacttctctcccaggcttttgccatggctgggatccaactgagtcactcattatggcagggaggggaaaagtcaaaggggaacatctggagctcaggcaaagcaatttgatcccactgcaacagagggcctggagggaggctttcagatggggtgcaagaacagcacatctgggaaaggggtccagcttgggcaaggggacccgcttcctcctcctcccatcccagggctgtaggtgaccttgcctgcatccctgcccctccctgggcctcagttttccaccagtacaatgaaggggaggagaatgttcctatcagttcaaacattgtgtgatttctttggtgagctgggtggggctgcgaggtctagaggttaagaagacaactggagtcacattgttccctggagatcctttgtggatctttagggacaagtagttgggggctctgggaaacaaagaaaaaaattatacacatgctctggagtctaaggccagcagggagaatagggagggaggacagtgggagagacatccaaagggcctccctctcagacattacaggatacacaagcaaagctctatgaagatggttagagctcccgttgaccctcactgccaatcccagtccctttccacattcctccccagaaggcagcactgtcaccagattggtgtgtcatttttagaccctttactaggcatttatagatgtataaatgtgtgtccatagacaatatacagtgctgtgtcatgctagattttgatctacccatagcagaagtgctgaattttgattttaagtttctgtgtccccagttctcagccaattaggaaacaatcaaatacaccaaacagacctttgtttttgagaccctgaaaccttagagctggaagggccgttagtaattatggccatctcctcctctttgctggaaggagaaactgaggttccgaatggtgcactgctgttctctgagtctcagagcagtcagtggcagagctaggggtagacctgggattctggctttttgtcctgctttaaatatcctttcctccatgctctggggcaggctaactccccggttgcctcccaaggctgggtgtggagcttttccatgcctcaggccctcccctgcctccttccctgcaggtacctctcccacaccgagctggctccactgcgtgctcccctcatccccatggagcattgcaccacccgctttttcgagacctgtgacctggacaatgacaagtacatcgccctggatgagtgggccggctgcttcggcatcaagcagagtgagtgtctgaacaaagaagcaaggggcatgggcagaaacactgctcccagggtgctgggttgtcatccccccactctccgctctcttggtctgtctgttgtctgtcctctctgcctgtctctgctctctctgcctatttgactcctgtctcttgggcgtcttcctgatccttctctgtccatccaactgtccctctctctttcccttcctcaagcgttagcactcacccgtgctaaacactattttgggaactggcaggcacacagagaggaaacaggaagtgtaacttggcagcgtgtgtaagagacagggacaggccagagacagagagagcgagattcctccgtcactgacttcctgggtgaccttgcatggccacctagacccctgcccctggggatgggtgggagtccactgactccttgggaagtgcgttatcatcgacacagccttatttttaaccgtgctcttttcttgctttgcagaggatatcgacaaggatcttgtgatctaaatccactccttccacagtaccggattctctctttaaccctccccttcgtgtttcccccaatgtttaaaatgtttggatggtttgttgttctgcctggagacaaggtgctaacatagatttaagtgaatacattaacggtgctaaaaatgaaaattctaacccaagacatgacattcttagctgtaacttaactattaaggccttttccacacgcattaatagtcccatttttctcttgccatttgtagctttgcccattgtcttattggcacatgggtggacacggatctgctgggctctgccttaaacacacattgcagcttcaacttttctctttagtgttctgtttgaaactaatacttaccgagtcagactttgtgttcatttcatttcagggtcttggctgcctgtgggcttccccaggtggcctggaggtgggcaaagggaagtaacagacacacgatgttgtcaaggatggttttgggactagaggctcagtggtgggagagatccctgcagaacccaccaaccagaacgtggtttgcctgaggctgtaactgagagaaagattctggggctgtgttatgaaaatatagacattctcacataagcccagttcatcaccatttcctcctttacctttcagtgcagtttcttttcacattaggctgttggttcaaacttttgggagcacggactgtcagttctctgggaagtggtcagcgcatcctgcagggcttctcctcctctgtcttttggagaaccagggctcttctcaggggctctagggactgccaggctgtttcagccaggaaggccaaaatcaagagtgagatgtagaaagttgtaaaatagaaaaagtggagttggtgaatcggttgttctttcctcacatttggatgattgtcataaggtttttagcatgttcctccttttcttcaccctccccttttttcttctattaatcaagagaaacttcaaagttaatgggatggtcggatctcacaggctgagaactcgttcacctccaagcatttcatgaaaaagctgcttcttattaatcatacaaactctcaccatgatgtgaagagtttcacaaatccttcaaaataaaaagtaatgacttagaaactgccttcctgggtgatttgcatgtgtcttagtcttagtcaccttattatcctgacacaaaaacacatgagcatacatgtctacacatgactacacaaatgcaaacctttgcaaacacattatgcttttgcacacacacacctgtacacacacaccggcatgtttatacacagggagtgtatggttcctgtaagcactaagttagctgttttcatttaatgacctgtggtttaacccttttgatcactaccaccattatcagcaccagactgagcagctatatccttttattaatcatggtcattcattcattcattcattcacaaaatatttatgatgtatttactctgcaccaggtcccatgccaagcactggggacacagttatggcaaagtagacaaagcatttgttcatttggagcttagagtccaggaggaatacattagataatgacacaatcaaatataaattgcaagatgtcacaggtgtgatgaagggagagtaggagagaccatgagtatgtgtaacaggaggacacagcattattctagtgctgtactgttccgtacggcagccactacccacatgtaactttttaagatttaaatttaaattagttaacattcaaaacgcagctccccaatcacactagcaacatttcaagtgcttgagagccatgcatgattagtggttaccctattgaataggtcagaagtagaatcttttcatcatcacagaaagttctattggacagtgctcttctagatcatcataagactacagagcacttttcaaagctcatgcatgttcatcatgttagtgtcgtattttgagctggggttttgagactccccttagagatagagaaacagacccaagaaatgtgctcaattgcaatgggccacatacctagatctccagatgtcatttcccctctcttattttaagttatgttaagattactaaaacaataaaagctcctaaaaaatcaaactg

SEQ ID NO: 6210 - DNA, 465 bp, Homo sapiens
gtaggtgggagatgtaacatttgccctgtggactgaatgatgcagtctgtcccttggtcagcccagggcagatcatacatggaatacatgttactatcacggtagctctgccaccaacttactgacgttcagggagcttgggtgacttggtcatgtgatgaggcaccgataaagggggagaactggaacctggagcttcctccctcatatctggatgtttcactatagggagctccaaagtttaaaaaaaaaaatcagcatcaaagagccatgatgtatgaatcagctcagggccccgggcgggaggacagggtagggctgcatgccctgctggcttcagcaaaattcatcagctgagttaacagggtccctcagaatccagaacccttaagggtagagcttctatatcctccttctatctgtccttctccccacttcaaatcaatttttttaaaaaaaaaaaaa

SEQ ID NO: 6211 - DNA, 174 bp, Homo sapiens
ggaaaaaactctgtgtacctttgtcataaatagaaggaaactgtaaaaacaaacacataaaaaaaacaaaacaacttgattcagttccagctggatataacttcctgtggaagctctgagctggaggcttattctctttttgttaaaaaaggagatagatgagtataaaggagg

SEQ ID NO: 6212 - DNA, 1014 bp, Homo sapiens
gttaattaactgctctgtgctgtagtttctccatctgtaaaactgtcaaggtagtagtacatgtcattaggattaagtaaattaagctatgtaaaacacagataacattggatgacaccaatggttaggcagcagatacatttattagtaaagtgcaatggaaattttcctcttgctggataagagtaaactaatgattagacttgaggatggcttaactaagaaagaaagtgatcaagaaggtaagagtagtaatgattggttttgagaatttaattttctgtgcttatcatggaataaatttagctgaattaaaatgcattataattacaagagttaggataccttaaaatatctagtgaggctgtataacctagcaagatcaaacaaactcattgctattggattttaagaaattggattgtcaagaagataagtaatcaatatggcttggctgtgtccccacccaaatctcatcttgaattatagctctcattattcccacatattgtaggagtgacctggtgggagacaactgaatcatgggggcagttttccccatactgttctcgtggtagtgagtaactctcacgaaatctgatggttttataaggggaactcccttttgcttggctttcattctgtcttgcctgctgccatgtaagatgtgcctttcgccttatgccattattctgaggcctccccagccacgtggaattgtgagtcccttaaacctctttttgtttataaatcacccagtcttgggtacacctttatcagcagtgtgaaaatggactaatacagtaatcttgcaagcctgcacaaacttgcgctttgtataaaaagccacaataataaaacttgttgagaatatcctaccaaaattactatgaaagttatctctcccttttactatgagcagaggtggcccattagaataatatggttgtctctggattatgtataataagaaaatgtgtgtatacaaataaaatgcatttattatgaagtaaa

SEQ ID NO: 6213 - DNA, 585 bp, Homo sapiens
tcctcagggatctagaactagaaataccatttgacccagccatctcattactgggcatatacccaaaggattataaatcatgctgctataaagacatatgcacacgtatgtttattgtggcactattcacaatagcaaagacttggaaccaacccaaatgtccaacaatgatagactggattaagaaaatgtggcacatatacaccatggaatactatgcagccataaaaaatgatgagttcatgtcctttgtagggacatggatgaagctggaaaccatcattctcagcaaactatcgcaaggacaataaaccaaacaccgcatgttctgactcataggtgggaatcgaacaatgagaacacatggacacaggaaggggaacgtcacacaccggggcctgttgtgggatggggggaagggatagcattaggagatatacctaatgctaaatgacgagttaatgggtgcagcacaccaacatggcacatgtatacaaatgtaacaaatctgcacgttgtgcacatgtgccctaaaacttaaagtataataataataaaattaaaaaaaaaaagaaatctacccaa

SEQ ID NO: 6214 - DNA, 279 bp, Homo sapiens
ctcacgcctgtaatcccagcactttgggaggccgaggcaggcagagcacgaggtcaggagatcgagaccatcctggctaacatggtgaaaccccatctctactaaaaatacaaaaaattagctgggtgtgttggtgggcgcctgtagtcccagctactcaggaggctgaggcaggagaatggcgtgaacccaggaggcagagcttgcagtgagccgagatcgtgccactgcactccagcctgggtgacagtgcaagaccccgtctcaaaataaaaaaaa

SEQ ID NO: 6215 - DNA, 1502 bp, Homo sapiens
ccagaaatgctcacatcaggatccgattgagagctctgactcctatggtgacctctcagatgccagcgacctgaagacgccagagaagcagagtgccaatggctctttctcctgcgacatggcagtccccaaaaacaaaatggagtctgatggggagaagaagtacccatgccctgaatgtgggagcttcttccgctctaagtcctacttgaacaaacacatccagaaggtgcatgtccgggctctcgggggccccctgggggacctgggccctgcccttggctcacctttctctcctcagcagaacatgtctctcctcgagtcctttgggtttcagattgttcagtcggcatttgcgtcatctttagtagatcctgaggttgaccagcagcccatggggcctgaagggaaatgaggcagctgctgtgtccccacggaaacaaccatctggggactgctgggaaatgctgtgaatgcggagggaagtgatgtttgggttctgtagctgagagatttttattcatttttaactgccccccaaccccactccaactccttctccaccacccattctcccaatggtctttagaaatagattttcatctgatattctgcagaaatatcaatgagacttggtatgggacaggggcagaaaacactacataggcctccaaggcaaaaccagtcccagtttctttaatgggaagaagctggaattcctggtgctcaattcttagtgaccccaatcctatacccaaatctatgatattctgggacctcagtgattttggtcccctcccacttctctagttcgtcatcctcccttcccatatccttcaaaagaaccacactagggtctccacctacttatacaatgcggatgcccaactgtttttaaggaagccagaagcatcccatggaccatggggtgagtgtcctccaagagccccctgagctcagccctctgcctggagggctccagacctttctgagccctgcttggaggcgagcattttcactgctaggacaagctcagctgttgaggacacccccaccccaaatttcagttcttacgtgattttaaccattcaacatgctgttgggttttaattctctaattattattattattgttattattttttaggaccagttgtagtgaattgctactgaaagctatcccaggtgatacagagctctttgtaaaccgcagtcacacattagggttagtattaaactttgtttagatgtaccataattaacttggctagttgattgtttgaagtctatggaagaaatagttttatgcaaaattttaaaaaatgccagtctggtcagggaagtagggggtttcaatgctgttgggaaccaggaaggtgggacagccggcaggtagggacattgtgtacctcagttgtgtcacatgtgagcaagcccaggttgaccttgtgatgtgaattgatctgatcagactgtattaaaaatgttagtacattactcta

SEQ ID NO: 6216 - DNA, 1502 bp, Homo sapiens; identical to SEQ ID NO: 6215

SEQ ID NO: 6217 - DNA, 457 bp, Homo sapiens
atgctgaaggtggggaagttagaaaaatagaacatctcctgacaggtagaagacgggatccttggaggcgttcctttgggatttcattttacctccatctcgtttgttgtccagtttccttttacgaggattaagcaggcatcctgctggctagaatcctgtggcttccctggagcctcaaattcttgtctaaccacatttctagtcatggttcctgcaggagacatccactcaaaccacctgttactgaggcaccaagcaaccctagaggcagttggcctctggccctagcaggagcaggatctcaggccatcccaccaggcagccagcctcagcccctcaccgcagccttgcagagtgggctctgcagagaagccgatttgtggacagtgccaccctccatcctgagtcacatggctcatgtggttgcagccatttttgagccaggagggggccc

SEQ ID NO: 6218 - DNA, 457 bp, Homo sapiens; identical to SEQ ID NO: 6217

SEQ ID NO: 6219 - DNA, 2444 bp, Homo sapiens
ccgtctcatcctcatctgagcggggctcctcgccctcccactccgccacctccgtccacacctcggtctgatgggcgaggtcagcctgctgctccactgtctcccggtggctcaggaaagggacctggcgatcactgttatggctgtagcttgtgatcttgtcttttaggattaggcccagggaccatttgtgtggctaggtgacagctcccactgttggcaaccgttaccctcctgtcagcggtttcacaggggagccgtctgtcacgcccaccctgtgaagcaacttctggcattcaggcagcttgggagaaactaagtgaacggaatgcagtactgaggttcaagaaagctgtacgccatttctttccaacttaaatccttcagtaacaacaaacaccactcacttcaagatgcattgccagccccgtggcttccctcagctcttggccacaacttgaaaactgtcttgaatgaagtacttggggagaagacaggccactgccctctgttccacagttttcttcatgcacggggtcctcctgttaacaattactgttgtgtacatataaggtatttttagagaagagaaacaggcctttattttcctatgtccttttttacgtttagaatagtcacccgaggggggatcagctcaactgtactgtgggagaaattcttttccaacaaacctcatgctcgtttttctgtggtgcaatttcaagggcaacgtgttctgtcctcacctcactctggtactcgcctcttggggcggctcagcccattcatggggatggcaccaagcggccatgctcagtcttccagccccgctgagggtaaaccgaggcctctggcagctgtgcacaggtgctggcctctggctccttcaaggagcactgcctgtcactcgctcctgggctgtctagccatgtctcccacccccactttaccgcagccagctgctgggatcaaagcaagtctgttcttatgttatttgcctgtatgaaatcatttctcattttatcacaattccttcaactcagcttactcgcgtggctgcctgttcatatttgaaagcagccaccgtgctgtggctttggtttggaaaagcatagcacgcacttcccttggttttcccttcccagagccgaccgcagctggtcagccctctcttcccgctcctgaacctttacttactgactttgagctctgtgactccgtcggttctcgcaggaattaactaacttaccaattggttcaatccacttgagcgccatagctctgagctcctctgtgtgacatgccacagatgactattgcacacctgggtcctgccccagcaggccatgcccctcccatgtgccgtgcctgttgctgcagctgcccccccaccccgccactggctgcaggaattcagcctttagaggcagaggcagctgcagcggcccctgaggtcaaaccccagtgtgactgcatagcagtgttagctggttggtttcaaactactggattccaggcaaaggcctacagattgaccttattatttttgaaaatatgttaagggttttttcatagagagagaaagaatggatttttttttaactgggaacctcctgattcttacggaaaattatccttctataagaagataccagagagatttattcaaggtaatttgataacctaaaatcaattctccattttttatcatatgtgggatttgttgctaagtcgtgttcaacaatagcttttatgttcctaacatatctgaaagcttatttatgaatggatatactggattattgatatactgattttttttttaatggggacatttgccattttcttcccagaaatatgtaatcccctggctgactaggactgttaaacatagtgtggactggatgatgccttcgacaaaccagagaagccaagttggggggagctggtgcctggagtgggccctgtgcacctcacctggcggaggctggggggggctctgtcagcaggaccctagaggagactctcattcgattttaaagaagcacaacgggtcattttcctttgtatgttcctagcgcagaactgtttctaaaacaacttgaagtatagttttgttatctaagcaatttttgttttaagtaagtaagtgtactagaatgcgaagccgttatggttcaggtttttaaaaactggtacagtattgtatttgtctcatctgttgcactgtatttcaatcatctgtaattaaaatgatcatatgtttgctccctggtcttttttaagtaagtaagtaagtatcttagtagatttttcctttgaggaaaatcggtaataaaataacatggattgaatgtttactgtgcgtcaagcacagttaatatatgatgatgtaaagtaactaactttatgtgatttaattcattcagtaaattgtaaatgta

SEQ ID NO: 6220 - DNA, 407 bp, Homo sapiens
agaaaaagaaaagaaattggtgagaaaagatgcaaacagctggtgaagagatgatagtggtgcgtttgagcagtgctgggtctgccctgggtgtgtgtcagtggtgtatttccctgcgtgtcttgcttcttgctgaggtcacatgcctgtagatggataatgggaacttgattgcaaggcgtcccttgtctgatcagaattaaatgatcctacagacaggaaaacgcatgccagatgggtcctaagggtaagagaggagctggtgccacctcccagaggcctgtgggatctgcctttgccatcacactccactcctgtcccctctgttcttcctgtggcctgcccaagggggtcatttcttctcagcccactgggtgctggttactgagcaccttgttattagaggg

SEQ ID NO: 6221 - DNA, 4034 bp, Homo sapiens
tctgctcggtgccattttatttaatgcaaacactagacagtttacaagtcacacctggacacaagcacgtgaacagatgtacagggaattctggaattttgagatcagtccccatttcttcctcagggccctggcactgaaccccagcccctgtcccagagcctcccctctgggtcccaccccagaagccacgcacacctccttccgcccagctttatctttccttgagctgtgacttcacccagcatgtgctcagagttgttacaaattttctctgccaaattaagctgacagagattggccactttcaaccagtcctttcagtccactgtgtctcccctctcgcttgggacaggcccatgctggccagtgcaaccttcagatagacacatggtgaccagagcccgccaggcttctgcaggtggcagtgtcgagcaagtgtaagatgtctgtgggaaggagaagctcctgaaatgaacgttctgcaaacagaaggctgaggggtcttccaggcatgtccagtcactaggagctgccaccggtgggcttgagtgccaggctctaggctttgtgcagaaagcacccggggcggggggcggtaagggagagcaaaatgggtctctctcaactgcagtcagtgctcctgggaacacggtctcacagacagcacatattctacgtcacagctctagggtttcaaggacttagccatccgacaggcctcaccataaaggtaaagtggacaacccctgaggtcacgctgtccaggtggcgacaggccacgcatgccaaaatcctccatagccacctccggcccagcaccagccagagggtggggccatcggttctcgacatacttggtatcagggagggacaagcctgacaaagttcacaatctggccaatgagtgtgggaggccctggaaacaggccaatcctgcaagccaccccacccttactaacttcctgaagcatgggaagcttctcgagaccaggccaaggtttctttccttcatggcaccacgcagaggcatttctgcagtgctgcaggtcccccttcagccacacagtccaggtctgtcagggattaaagggccgagcaggaaaaggggtggtaaggagctcaagggcacgcactgggaatggcctcacaaggcagccttgagacgcacagggctacaactgaccaccctccaccacaggcatgtttgcaaaacgaacacgaggcatgcgttagacagatgcatgtgggggctgcagattccagtggtttccttaagaaactggagttggctaatcccactcagcagacaatcccgctcagtggacagcctatgaaacgcatggggccatcatgcagaccaaagaggcccgtgagttttgtaagatcctgcctgtctggtgactcatatctgctttcagaagtgctttctgacacagcaaactgactatcagtagacaggggccctagaccctagcatgtggttctgtcccgtgagcctctgacaacagagctcaccgggacagaaccatatgtgggccaaaggaacattccaggaaaccagctctgctccagcccaaaccaggcagctccacgccaggtgaggggcgagtcatggggttcctgtgtttgccacggtgagcatggctccccacgcactctccctcagagcagacaagtaggctgaccacagagctacaaagtcacctgcgtttcactaaaccaagcgaatgtctctttcccctctcctcccccgccgcccccaattacatttttaagcaaacaagcaggattctggctttgatgctcgttcttgacatcggtcactcttgctaccaaaacagggacacagggtggagggtgagcacctctccccaacacaggataaaactcatctccggtgcagaaatgattgctaaagacctttctcatgtcaaccggaaggccacacccagccccctatggaatcagatgggaaacaggcctacgaattgcttcatacttatccggaagattcctaagctctcaaggcaggactatcacgagatgcatgtttgtacttaaatcactgaaagcctccgcttggaccggctctccggaagcccagcaacataaaacctgggatggggaagactgaagtgaaaccatcatcctgggtgctgcgtgtgtgtggtgttacttggtgctgaccggttcgctccttgcaggggctccaagtgggtgcaggctgagccccccacctgcagctccttgaggccactgtcaggggctgtctattggcagaaacctgccacaatgagccactccagtgtgcaggggtcacagtcccttgagttcaaactcttgtcccctaagcataaatgtcatcaggcctcagcatcatcttggcccccgcatcctgtgctcagtaaagctggaggcaggctggctttgggagttggtggctcagcagctcccgaggctggtgctggctttctatcagagctggctcttgaatttcggcaccaagtctcagcacgcttggggcagggcagagaaaccaaactcacaaacacccagagctcatccgggaaactcagaccaacaaggagccgatggcacagagcagcacagcagctgtgggtccaaatgaaggggtggggggagccgggtgacaagcggtggcaccattgtgcatgcctgcagctggacagggccctcagatccgggctggttcgggcggcggcggcggctctgcagactgcgtgtgcaacgtggagtatttcactaggggaaaaagaggccgtcagaaggaattctgctctgtcttgcacagaagaagcaaatacagcagcaagcccgtgctgggaacagaactgggtttccctttgtatcccctggggggccgcttagcaaccttccctcctgagcctgggagcagttttgggccggtcaaggggagagaaagagaaagctggacaggctctggaaacagctcagcctccatctcctcacctaaaaaatgagcgtgttcctgccagcgctgctggaagggttattttaaacaaagggctcaacctagcacctgcccacacagatgctggcctcgtggtggctaaccgtggcaaagctcatgacagtggatgcgacagcggaatccatttttccacatctgaacccaggcctattttagttcatttggtgcagcactgccacccgtcttcagcagcattgtagggcacctggctcccagtacacaccacacaggctgagcccctcctggtctcccaggcccagtccccacggctgctgcactgtagttccactggcaacactcgcctgagctgtcctagtctccctgcctgcgccaccaggcctcggctgctccccgaccccagcaagcctttccggacctcctcattggcatcccgtgggcacaggtcatatctgcctcgagcagttgggcactctaggcctgtggcctgaacttatgcgacctcaaattgccaacagctcctgaatccagaaagtgcttgatgaccacagaagggggagggaggggcacaggtgttgacaatagggtctgggttttacccaagttccctcttgcctgtggcaatttgcaaagggaaaagttctaggtctaggtgaaaagcttccccatggctctgttcaggatgtaattgtattcgctgatggggagcagaggtgcctggggctctggctcggacggacgaatcaagggcaggggccgagcagccgcaatgcccagaagtcacaggcatggcagcagatggccctggctgtcaccccagcatctttgggctcctgaaactgggaggcaggctcatcagggcaggcttttgctctggccggacattctagaagcagacgcctctgtgcttccctgcttctctagcacagttctgctcagtgctgggaccaactaggaaagcgtcagcaagggacagtgagtacaaagttctcaccttggggttcctcacataccacggcttccaggttctctcccttcacgtagtctgcgttgagaccct

SEQ ID NO: 6222 - DNA, 7116 bp, Homo sapiens
cccaaagtgctgggatgacaggcgtgagccacctcacctggcccttttctgcgttatttgcccgcctgcctgcctgagctcacttgcaggccgaggaagatgcttacggaagtcctccttgaggtagccccagcctgagatcaggcacttcttgctgggtgggaagatgtgtgtggcagccgggaggcacacgggctggatgtgccggccgaaaggcagagggctggtcagctccagcacagccacgtcaaagtcggccgtgtccgcgttgtacagggggtgcttgacgatctggaccacctgggcccgcacggtgctggcctccgagccgctgaggtaggtcgcacccacgtaggccacccacttcgtcgggtcttggaacctgcaggagcaaaccccagctcagaagccaccgagggtcagagccgtcgggggaggcagacgggacactcgccttgggtgcaaaatgtaaggggtatccccccacattaatatttatgaatagtatttataaaaatcaggccagacacagtggctcatgcctgtaatcccacacttttggaggctgaagcgggaggatcacctgagcccaggagttcaagacgagcctgggcaacatagcgaaacacagtctttaaaaacaacaacaaaaaacaggccaggtgcggtggctcatgcctgtaatcccagcactttgggaggctgaggcgggaggatcacgaaggcaggaattcaagaccagcctggccaagatggtgaaaccccatctctactaaaaatacaaaaattagccgggcatagtgatgggcgcctgtaatcccagccactcaggaggctgaggcagagaattgcttgaacccgggaggtggaggttgcagtgagctgatattgtgccactgcactccagcctgggcgacagagcaagactctgtctcagaaaaaatatatatatattagcggggtgtggcgatgtgcacctgtggtttcagctcctcaggaggctgaggtaggaggattgcctgagcctgggaggttgaggctgtcatgagctatagtgagctatcactgcgccactgcactccagcctgggcaacaggtaacctgtctcaaaaaaaaaaaaaaaaaaaaagaaaagaaaagaaaaaaatcacaggtgcaggagaatgcatgatgcatgaagtatcaacatttttgttttgttttgtttttttgagacagagtctcgctctgtctcccagactggagtgcagtggcgtgatctcagctcactgcaacttccacctcccgggttcaagtgatcctcgtgcctcagcctcccaagtaactgggatgacaggtttgcgccccctatgcccgactaatttttttgtgtgtttttagtagagacaagctttcaccatgttggccaggctggtctcaaactcctgacctcaagtgatccccccacctcagcctcccaaagtgctgggattacactcatgagccacaagctcactatagcctgtccaagtatcaacattttaaacaaagacaggatgagacagagttgggattagggtgaggggagccagccatgagccttgggcacaaaatttaaagagttgccaaaaatctcagccatcaagataaatgatatcgagccgggtgcagtggctcacacatgtaatcccagcactttgggaggcagagacgggcagatcacttgaggccaggagttcaagaccagcctggccaacatggcaaaaccacgtctctactaaaaatacaaaaattagccagccatggtggcgggtgcctgtaatcccagctactcgggaggctgaggcaggagaatcgcttgatcccgggaggtggagcttacagagagccaaaactgcaccactgtactccagcagggcgacagagtgagactctgtctcaaaaaaaaaaaaaggataatatcacgacagaatattttaaaaaatcaaagtgaatgcaaaaaatgtccacaatgagcaaaacatcaacaaaatgtcattggtcaccgagaaatccaagtcaaaaccacagggagatgctacttcacacccactggcatggctactctcaaaagaacagcaagtgggccaggcacggtggctcacgcctgtaatcccagcactttgggaggctgaggtgggcggatcacctgaggacaggagttcgagaccagcctggccaacatggcgaaaacccatctctactaattatacaaaaaaaaaaaaattagccaggcatggtggcgtgcacctgtagtcccagctacttgggaggctgaggcaagagaattgctttatcccaggaggtggaggttgcagtgagctgagatcgcaccactgcactccagccagggcgacagactgagactctgtctcaaaagaaaaaataaaataaaataaagaggccgggcgcagtggctcacgcctgtaatcccagcgctttgggaggccgaggtgggcggatcacgaggtcaggagatcgagaccatcctgactaacatggtgaaaccccgactctactaaaaatacaaaaaaaaattaaattagctgggcgtggtggcgggcgcctgtattcccagctactcgggaggctgaggcaggagaatggcgtgaacccgggaggcggagcttgcagtgagccgagatcacgccactgcactccagcctgggtgacagagcgagactccatctcaaaaaaaaaaaaaagaaagaaagaaagaaaagaggccgggcacgatggctcacacctgtaatcccagcactttgggaggccaaggcaggcagatcacaaggtcaggagattgagaccatcctggctaacacggtgaaaccccgtctctactaaaaatacaacaggcgtggtggcgggcgcctgtagtcccagctactcgggaggctgaggcaggagaatggcgtgaacccaggaggcggagcttgcagtgagccaagatcgcgtcactgcactccagcctggacaacagagcgagattctgtctcaaaaaaaaaaaaaaaaagaatgccctcagattcaacaacagcaaaagcaagaaagaaaggaaaagaaaaaattacttccaggggctctaaggaaaccagaagtgacgtccccagtgcacgagggaaggcaggagaaatacagagggttcgggtttggtgctttgggatgggggcttactcattgaagcagtgagcagcagacaccagccacctggcgttgatgatggcggccccacagaagtgctccttgttctctcgaaggctggcttgccacggaaactcccccggggatgcttccatgccgcccacgatcctgccggccatcctccaggcaggctgcaagccacactctgcaagacagcaggtcaccagccatgaccccacgaaggcaggacctcaccctgaactcccagaacatgcatctctgagtctctcgtctacagtccctaagttcaaagagatgcttgggggcccctccttggcttccctgactcttctggggtctccccatcccttcctcttcaactcctcggctgccccatcctggcacgtaggtcaagcattcaaggtcacgtgcaccagtgagtggcagagaaaggtctctatcttagctgtgggtaaggggcgatgaccccacgtacatgtttgtataggatattgtgtctgtctgcttatttagtctacttttatgtccttcacaaaattttgtaattctataattatatataataattatcatcacaggcatggcacgtttgtaagtttagtctttgattttttttttttttttttgagatggagtctcgctctgttgtccaggctggagtgcagtggcgtgatctcaactcactgcaagctctgcctcccgggttcaagggattctcctacctcagcctcctgagtagctgggattacaggcacccgccaccacacctggctaattttttgtacttttagtagagccggggtttcaccaaattgaccaggctggtctcgaactcctgacatcaagtgatctgcctgcctcggcgtcccaaagtgctgggattacaggcctgagccacggcatcaggcctagtcttgatattttttgtcactactgatcatgaaagatattttttcctttgtatcttctatcttattattactgtataaagcaaaatgacagcttttttttttttgagacagagttttgctctgtagctcaggctggagtacagtggcgtgatcttggctcactgtaacctccacctcccaggttcaagggattctcctgcctcagcctcccaaagtgctgggattacaggcgtgacccactgcacccagcctttattctaaatagctttttagtcaatttcttgattcattttattttactctttcagcttctctccttctgtttggatattgatttattttagacagacaatgatttcaaatgaattaagattttcctcttccttttcaatacttaaactgctgtccttaccttattgcatgggctagtatttttatagaaacattggctactcttccagcattttatttatttttgagacaaggtctcactctattatccaggctggacagtgcagtagtgcaatcatagctcactgcagcctcaatctactgggctcaagcaatccttccacctcagcctcctgagtagctggggccacaggcgcccaccaccacgctggctaatttttttttcttttttttttttttttttgagacagagtctcgctctgttgccaggctggagtgcagtggcgtgatcttggctcactgcaagctccacctcccgggttcacgccattctcctgcctcagcctcccaaatagctgggactacaggcgcccgccaccacgcccggctaattttttgtatttttagtagagagggggtttcaccgtgttagccacgatggtctcgatctcctgacctcgtgatctacctgcctcagcctcccaaagtgctgggattacaggtgtgagccaccgtgcctggccaatttttttttttttttagtagagatggggtctcactatattgtccaggctggtctgaaactcctggcctcaagtgatcctcctgccttggcctcccaaagtgctgggatgacaggtgtgagccaccgcaccctgctaatctcttacggcattttaattgtctctttccgttgctcacatccctgtggccacgccccactgcttataggacagagctccagttcctggtattcaacacttcccaggctgtggccacaacctctgttttcagcctgatatcttctccctcctctccccaggcttcttcccatcacacacctgcacttttcctttactctgctgtttgctcatgtttctccccataccatgggtgcccctttcttttctctgcccagcccccataaatgccaggcctgtgtgcccagtgaaataagcacagtgaccacagaccagagccagcagctgaccctggaaaagggaaggggcccagagaccaggccagacaggcagactgaccgcagtgcgcctcgtcggacccatcggagcagtcctcctggtcgtcacactccgggttcaccttggtcacacactggctgttcccgcaggaaaaggagttccctggacagcggcctgaggacagaaaagaaccgactttctgacctcatgctacatctcctggttggagtaaggcaccatgctatacttagtaccaccagggtacggaaatgtggaaactctctctctccttttctttccttttccttgtttttatttttgtttttgagacagggtctagctctgttacccaaacgggagtgcagtggtgcaatcacagctcaccgcagcctctaactccaggttcaagcaatcctcctgcctcagcctcctgagtagttgggaccacaggtgcacaccaccaacccaggctatttattttatttatttttattttattttatttatttatttttttgagacagagtttcactcttgttgcccagcctggagtgcaatggcacaatcgcggctcaccgcaacctccgcctccctggttgaagtgattctcatgcctcagcctcctgagtagctgggattacaggcacgccccaccacgcctggctaattttgtatttttagtgagatggggtttctccatgttggtcaggctggtctcgaactcctgacctcaggtgatccacccacctcggcctcccaaagtgctgggattacaggcatgagccagtgcgcccggccttatgtattattttttgagacacagtttcactctgtcacccaggctggagtgcagtggcgtgatctcagctcaccgcagcctctgcctcctgggttcaagcgatcctccttcctcagcctcccaagtagctgagagtacaggcaatacgccactatgcccggctaatttttattattttttataataattttaaaaattatttttggcctttttttattattatttttgtagagatagggtctcgctctgttgtccagcctggtctcaaactcctggcctcaagtgatcctcctgcctcagcctcctgaagtgctgggacgacagatgtgagccaccgcgcccagcctcgttccagggattccttcacttccttgaaatgagtcttaggaaacctctgtcagtaactgcaatcagagaaaaggccagagagaaaaacatacctgatttgaagtctctttctgccaagggtcccttatgtctccctgcaacaaaacagagaagatagaagctcactgaataagcggtaaaaccctttgaacacatcctattggccgggcgcggtggctcacacctgtaatcccagcactttgggaggctgaggcgggtggatcatttgcggtcaggagttacagaccagcctggccaacatggtgaaaccctgtctctactaaaaatacaaaaattagacgggtgtggtgccgggcgcctgtaatcccagctactcgggaggctgaggcaggacaatcgcttgaacccgggaggcagaggttgcagtgagccgagatcacaccattgtactccagcctgggcgacagagcgagactccatctcaaaa

SEQ ID NO: 6223 - DNA, 293 bp, Homo sapiens
tttttttttttgagacggagtctccctctgtcgcccaggctggagagcagtggcgcgatctcggctcacttcaagctccgcctcccgggttcacgctattctcctgcctcagcgtcccaagcagctgggactacaggcgcccgccaccacgcccggctgattttttgtatttttagtagagacggggtttcaccgtgttagccaggatggtctcgatctcctgaccttgtgatctgcccacctcggcctcctaaagtgctgggattacaggcgtaagccaccgcgcccggcca

SEQ ID NO: 6224 - DNA, 6554 bp, Homo sapiens
gccggagctggagccggcgccagcggctggagcagcaagggagtcagggccagggccagagagccggagagaggagcccccgaccgagagcccaggtgagcccacccttcctccccagcccagccccagcccagcccagcttggcccagtctccataacaacatctcctggagcccgcagagagatcccagccctgcccaatcccttcaccaccacaagcccctgcctatctcggggacccccaagaactgggagacttgtggctggaaggcagagacccccctcccccagcccagaccctccctcacatatccagaaaggcacacactgtggggaggtagatacccagccagagaaaggtcccacttctgagggaggtacaggaactgtcacaccctcctggaaacggacacacgacatggggggacagacacggagggtggggcactcagacacaccaatgcacactcactcggggaagcatgacatgggatcagacagcctcaccctgagatctgtacagacacagatagatggactgaccggccatgaactctggccggcatacccctgcctgcttcagcccgaggcttggtaccactgctgggggaaggtggcatgcgtgcatcccacgggcagcatggagggagccacgactccccaaaaatcctgtcgctaagagacggtgccagtgctgccaagaagtgtgaaaacaggggaggtggggagggatgtgaggcttgtcacagttagagctcctgccaggagcctgaaggagctttcagcagagccctggtcctgcctcccagcccaccaccactccttttccatcagctagccagaaggggaatgggggtagggagtggatagggatagcccagcaggggactttccaacctgtctcctgcccactgcagactccacttctgagacccatcctcttcagaactccagaggcctctccaccccctgccccacccccttgccctagtttagctccctcgtgccaagactgagtgcagcgctggcacaacaccagtcgggaaatagcagaaggtgctgaggcggcagaaagtgtagatcaatcgatggcctaggagccaagactgccaggaacatccccaccccaatccttcagccctctccagccccatccacgcatacctaggccagcagcacagggcttctgagcaggagtgggaggctcaggtcctctgccctcccctgctcagaactctggtgaagctgaggaagcaggaggtccgtgaggccccagggtctagggaaggaggttaaggggtggggcccagggaccctagaggatagacccctctgctggcaggtgttccctttccagagtccaggccacctgctctgtccccacagtgacatgtcggaccctgagatgggatgggtgcctgagcccccaaccatgacgctgggggcctctcgggtggagctgcgggtgtcctgccatggcctcctggaccgggacacactcaccaaaccccacccctgcgtgctgctcaagctctactctgatgagcagtgggtggaggtgagagcagctcaggtttctccttaactaacctgggttaagcttgggaaagagggaggctgggtgggagcagtgaaagccttgcagggaaatgtgtggactctgcggcgccttctcgaggccgcttgggtaccctggagatggtgtcccagagggtcctgagattgacccagaggcagtggggttgctcccaaaggcctcatgatagcccggaggactgagagtccagtgggcaggcagcaccccaagctcagggatcagcttaggaagagaagagctggttgctggggacgtgggggcccaagaagagctggcatgactagggcagtccaggacagggaaaagtatcctcggttcccagacagccctcgcctcccttcaaccactaccacaggtagagcgcacagaggtgcttcgctcctgttccagccctgtcttctcccgggtgctggcccttgagtatttttttgaggagaagcagcccctgcagttccacgtgttcgatgccgaggacggagccaccagcccccgaaatgataccttcctcggctctacggagtgcaccttgggccaggtctgcattcccggcctccccggctaccctaccctacctccatcagctttgcctctggaagccaaaaagagagaaaacatgagctctagagctagttcaacccagccttggctcccatctctgccattcactagctgtgcagcctcaggaaagatacttaacctctctgagtcttagttttcctatctaaaaaatggaggagtggtcagagtgcttccctcttcagactattgtaaaaattgagcccaaccctagcccaactcaaagtgccaacccttgcagacactcagagcatttattattccatcccttgtacgtggccaaggcagatggggatgtcacagctgggtctccctccacctccatccccagattgtgtcacaaaccaaggtcactaagccattattgctgaagaatgggaagactgcgggcaagtccaccatcacggtaggcaagatcacctgtactcacccttggtccaggtattcaatgcccctgcatggacacctatggtgacatcatgcccaggaccacccccacctaagggaaaggggatggggtggcccttgtggtaaggttaggggagtcctgccacttgtatcccccttgcagatcgtggccgaggaggtatcaggcacaaacgactatgtgcaactcaccttcagagcctacaagctggacaacaaggttggaaccccagagtccaggcccccaactcccctgtcactcctaggcctcccactcaagacagatcccaggagcccaggcctgctctcttcccagtgggagcccatcccccaccctccttgcagctctcaccaacctcaagggccctttctcctgtatcttcaggatctgttcagcaagtctgaccctttcatggaaatctataagaccaacgaggaccaaagtgatcagctggtctggagaactgaggttggtgcctggggctatggggatgaagggagggagagtaaagtaagaagacacagacaggagctgaccagccacctggtgcctctccaaggtggtgaagaacaacctgaaccccagctgggagccgttccgcctgtccctgcattccctatgcagctgtgatgttcaccgacctctcaaggtgaagtcccagccaagccagcacagcctacttagagcaaccaatctgctatctaagacctttcccctgcatgtggcaagcctccctcctctcccccaagtgataatcacatcccactgtgggataaataataggtcacagctcaatgttaaacttcccacatgtgtgcattttatcagtggccaaagtccctagcagactgagccaaagaacaaagttcagcaggtggcctctccgggcaggctgaggatgtctgtttgggcatggagactctaaggcccaagtccccctactccaagtccccgagtccccctactcaccgtgaataccgcagagcatctccaacctgaccccacccctccccctgccttctcagttcctggtgtatgactatgactccagtgggaagcatgacttcatcggcgagttcaccagcactttccaggagatgcaggaagggacggcaaaccctgggcaggaggtgccacaaataccccacccccagaatcccacccagatccctgggagaatcctgagggtgatgctgaagagaccaccataggtgataggaagtggagagggtggaaagcacctgggctcagctgaaggacggaaccatgggggtcttgctctgggaggctctgctggaagggagaaagaggggtcacctgatggacttgtgaccctgagcttgtggggtggggtctagatgcagtgggactgtatcaaccccaagtatcgggacaagaagaagaattacaagagctcagggacggtagtgctggcccagtgcacggtaaatttcacttcctgcttcaagccttgccccagcccctgcccctaccacactctcaggttcaacccttcccttgtttcaaagaccagtttctctgcttctgggaactggaaaccacccccaactgcaacccaaaaaactctggctcccccatgttccccacagaagccctacccaagctccctcctcaaaggaccaccccatcccctcgccttacccctctccctacctccaggtggagaaggtgcacaccttcctggattacatcatgggtggctgccagatcagcttcacggtaaagactcagagggagggcacacaggcaagagggaggggctgagtccatagtgaaaggaaggagcccagaatctccactgccccaacttgggctgctcatgagccttcgcattgtcagcttatgcacccccacatcattatgtggctacctgtagcctccccaccactcatcttagtcctccctacagatcccagctctggcctaggcaatctggtggctctcatggttgcagcatgaccttcttcccacccccacccaggtggccattgacttcaccgcctccaatggggacccgaggagcagccagtccctgcactgcctcagtccccgacagcccaaccactacctgcaggccctgcgtgcagtgggaggcatctgccaggactatgacaggtaggagagagtggggcgggagggaacaggcagggaggccttgcccaacggattccacagctttttcttctccccagtgataagcggttcccagcttttggctttggggctcgaatcccccccaacttcgaggtaggctagatgcgagggaaagaaggagatggggggcgtgtcagtcaggcagaaaaggcaggccctcactgctcccgccttgccctcacaggtgtcccatgactttgctatcaactttgacccggaaaatcctgaatgtgaaggtaaaaggggagattttcacctgccccgcctccccgcagacacactccacacaggagcacagactccactccccagggcccagcttcctgtcccttccacccatcccaggcctgtctttatcaggtgaggcttccagggccgaggcccagcatctgcacccaactctccctgccaagggaccatccaactctcccactgcttaatgaaggaactcgaggggagggcagtcctcagacctggaagcatttccttgctttaaggagtgtcaggagggggccctgctcatttctgccagcttcacaacttctcttcactcacagagatctcaggggtcatcgcctcctaccgtcgttgcctgccccagatccagctctacggccccaccaatgtggcccccatcatcaaccgtgtggctgagccggcccagcgggagcagagcaccggccaagccacggtaggaagacatggcgggcaaacaggagctgtcccatgtgtctttaagtggtgccagggccagggtctgcaccttggtggaaacggtgtcaacgcccttgcacacaaagccaacccttccaccctctctgcttgccctcagaagtactcggtgctgctggtgctcactgacggtgtggtgagcgacatggctgagactcgcactgctatcgtgcgtgcctcccgcctgcccatgtccatcatcatcgtaggcgtgggcaatgctgacttctctgacatgcggctgctggatggcgacgacggccccttgcgctgcccccgaggggtgcctgcagcccgagacattgtccagttcgtgcccttccgagacttcaaggatgtgagtcccccgggccccttccggctgaaggactcctcagcttctcatccccccaaatctgaccttcgtcttccaccatttgatgtcctgctaaggacgcgggagcccagctggccaccctgaagccccacttctccctcagatgaccctgcctcccctactcttcctctcacccctaaccacatcactgtccccaccctaggctgccccctctgcactcgccaagtgtgtcctggctgaggtgccacggcaggtggtggagtactacgccagccagggcatcagccctggggctcccaggccctgcacactggctacgactcccagccctagcccgtgactgcctccctccggaccgacactccctcagcctctcagtgagtcctggggcttccaaaggagtggacacagggggtgcaaagtggggcttggtagagcccaactaggctgggtgtagtgtagaagagagtgcttatgactctcccaccccctcccaggtgcctgtcctgaccctcgtgactccagtgaccaatgcctccacctcttggaccaggtgtgccccctgggttctggacgtgagtggtgggtcctgctcctatctctccaaaccccatacccttcaatgctgtggcccctcagtgacttccttgggtgatcctgactttctagccattaataaagagaactgctcctagcacctcagcctctaa

SEQ ID NO: 6225 - DNA, 472 bp, Homo sapiens
gttgcccaggctggtctcaaacttcctccttggcctcccaaagtgttgggattacaggcaggaaccactgcgccccacctaaagcactactcttaatcaccacagtgtgcaactttgtttttttaagtatactcaggtaacccaggagtatcattttgagacccaggtatggtactgtatatgtggcctagttgtgtgctcaggtgtctatggatggttctgtctgtctttgtgtgccatgcaggtgagaaaagtgaacaagaaaagtagtgggtctgaattacagctccagggcaggcaaggatagacacaggtgaaatttagagtgagagaaaaagagctgggctcccggaaggaccctccctgccccatcctctcccttcaacaatgagtgtggaaggggatgaagaaagagaagctaaaggttctgtgagcccctcagagagagaatccagagccagagaggatggcc

SEQ ID NO: 6226 - DNA, 6292 bp, Homo sapiens
gagctgcccactcatggttacaaactaaggcatcaaacacaagggaggccccgcccccccaggaccacacctccaggacctggtcgacccagtgtgagtccctaaggcttcacaagaggatccccttcactcagtgacaccagagccaggagttttacctttaggacccaaatgccagagacagtagccttgagggattgggcaggagtccaggcatgccaatgaacagatgagggattgcccagtttttatgagagctagaccttgtcacagataagaaagctctgtctgccgggcagtgtcattcttattttggtgaaggatagagccaccaagaacaccaagagccaccaagcttaggaaacactaggtgagctgggcatggtggctcaggcctgtaatcccagcactttgggaggctgaggcgggcagatcacgaggtcaagagatcgagatcatcctggccaagatggtgaaaccccatctccactaaaaatacaaaaattagccgggcgtggtggcgcctgcctgtaatcccagctactcgggaggctgaggcaggagaactgcgtgaacccaggaggcggaggttgcagtgagccaaaatcatgccactgcactccagcctgggtgacagagcaagactccgtctcaaaaaaaaaaaaaaaaaagaaaaagaaacactgggtgaactgaagtctacatttccataaatgtccaagcccaaaggggaatgctctgagtggatgggaggtggggcttcctgacctagatgagatgtcccacgggactttcctcccagcagatgccagcacctgggactcgtcaggagaatgggatggccacccgcctggatgaagggctggaggacttcttcagccgaagggtcctggaggaaagttctaggtgtgatgcctaaacacactcccattttcagcaggccccaaggccctagaagggctgctgtgtcctcccagctcccatgggagtctccataacagcagtgcccaaagccagtctctgtgagaaatttccccacattctcatccttccccacccagccctcagggcccatgacctctgcgtcttcccaggacagctgggaagaatggggccagagtgaaccaccacagtggggttggagagcaggtgtggatgagagggaggtggggggcagccctgggacaggatacccattagtggtgagaggcccggggggtagtgttccctgtcactgtcctgcagactgcccagggtctgtccaggaggagccaggtcacttggagaagctgagaggagttgcaggggaggtgcctgggaagaaacatcagtctgcgggaaaggctgctggaggattacaacgggacaggaaaggcaagggcatcatctccctgagaactaagtggaaagggctgcagtgcagcaggggagaccagatgagaggaaagcaggtttatcagacccaggattgagcttgcatctggcatttgttgctaacttaccccgattctccccagctacccccggactctgaggaccgtgcggccaggactctcggaggcaccgctgcctccactccagaagaagaggcgccggggcctgtttcactttcgccggccccggagcttcaagggggacagggggccggggtcccctaccactggactcctcctccctccacccccaccccctcccccgactcaggagagcccccctagcccagaccccccaagcctcggcaataactcctctccctgctggagcccagaggaggagagcagcctcctccctggatttggtgggggccggggaccttccttccgccggaagatggtaagtgaggcagggggtgctgtgtcttccccttttcctgccccacacttaacccagtctcctaccccaccccaagcttaatgggagaatgctaggacccagggttcttgggaacattggtcatttcaattctcctctccttgagagtggactaagacccagtggccaagagcatgctgggagtgctatatgcgaatgcaggcgttggaaggactcttcagagggtctctgcagggcttccccgtggctagggactcagtgaggcaggggtcctcctgacaactccctcacagcctggggagcccccttcgactgggaactgctaataaataagagaccttgttctagggcactgaggggtcagagccaggggaggggggcccagcccctgggacagcacagcagccaagggttcacggtgttgcccttcccgggttggaaagagccaagggttggagcttcgatgggaaacgagaggtgagtggagcctgggacaacaaactgtgggtcctgagggtatctgtccaccaccctctccttcccactccctcatccctggtggttcagtagagaaagcagatgctttggcattagaagatgttagctgctcttcagcccccaccacacacttgccgtggagccctggactggtcacttcacctcctgaaacctctccttctttactgtaaaatgaggggttataaaaatacttacctctagagctctgtttcccaaacaatggtgacttgattataacctttgcgactgatttttacctgaattattacttacatagtatttttatttaaattaactcacctttttttaacttaggctagacctagacattatctttaaaatcgcaggctttttgaatgagtcgtgtttttttctactacatgtaaaatacatatgtaactataaagatggaagtatactcatttgtgtaagccatttcttgtgcccctggggaggtatgggtgccactctttgggaaacagttttaagtgtctagggactaatgacatgagaatgacatggagatgctagagcagaagccctttgtcagctgcagtcctgccacagaggagactttcttacaacctgacccactgttctttcagggcccaggcccagaccaggagggcagcacccaggcctggcagaaacggcgctcttcagacgacgcaggtaagaacagtcacattcaaagcccttttggacccctctctcaggggtcaaatttaccttttccctttctcctctctttctcatcccctctctctactccagggcctggatcctggaagcccccaccaccgccccaaagcaccaaaccaagcttcagcgccatgcgcagagcagaggccacatggcacataggtatggaaagcctcttttcaggcagcagtactgaaagcccagggtgtgtccaaagaaacagaagcccatggcccctgtgctggggaatttatggccaaggtggggcagtgagaagtcaacacagtgaaaatgtttaaggatatttacaaagctatatccaaaagagacaaacaacccaatccaaagaaagcttctacagaacaaaagcggcttctccagtgttggcaaacaggagcgatgctttgtggatggctctggcgaattctccagggcaggtgcagcctctggtcaccattggcacagtggcagcctctgtagacaaggctcctctctgcaccttgctgggaagagggtgggcaagtcaaactgccagcaagtaccagctgtgccaggcccacctcagattccagcctcctccagaagtcgtttatcaactcaccctcagctcacgcagaaaggtgccccaaacatgggcaagagctcgcctcggaggtcagaaacctgcagtattagtccttctcagccacccgcgaccttaaacaagtcatttactttctggccccatgaccggaggagtaaaagggaggggattatcccaggcatgacacttcctttctgctggcttcagagcaccttccgcttagggagccactaaagaaaagctggtcagctcagcattcgctcagtccagcagttgccaaaggcctggaccatgaccctccagcaatattgacatagacaaaatctctctgtagatggagacaccccctcagcctctttcactcccaccaccaggctagggcgtaagggctggaaagagctaagagctgagcgggctggtctggcttgagccacatgctccccactgtcctatcccacccattctgcatctgcccctctctcccctgtagtgcagaatcaggctagcctgagacttggagtgcctgtgtccttgcctcctcctccaaggccaacccagcactgggggcatctttgctgattttttccatcccatacacaggctaattaaagcgccccaaagtagggctccatctttcatttaggaaaccgcaatagtcagttgccccactgcacacacacctcacagatccacatgcagacaacactttccagtgtcagagccacaggctcatgttgcttaaaggccactggggcggaggatgagtgtgccagggcacccctccatctaaatcagactttcagacagagttctgggaatgccaggctgcagccttggcagagcccccagggcactgcagcctggatgggcagcatgcctgtggacccagcaggccctgggccctgccccagcaggaaaggggttgggcactgctctgcaagagggacagctaggccagagtcccctccagaggtgatggcctcaggatgatcctgggaaacaagggctaaggagcgtggatgtagaaaggcatatgaaagaccgggtgcggtggctcatgcctgtaatcccaacactttgggagaccgaggtaggtggatcactaggtcaagagatcgagacaatcctggccaacacggtgaaaccctgtctctactaaaaatacaaaaattagctgggcgtggtggcacgcacctgtagtcccagttgttcgggaggctgagacaggagaatcgctcaaacccgagaggtggaggttgcagtgagccaagattgcaccactgtactccagcctgggtgacagagcaaaactccatctccaaaaaaaaaaaaagaaagaaagaaagaaaagaaaaaaaaaaggcacatgaaaggcagagacataggagcaagtgggcttggagggagaaagtcctggcctccagggcttcagtggagagaggagacagggacaggagctatgcaagaatgccttttcctgcagcttctcctctctctcatccccagctgaagagagtgcccccaaccacagctgccagagtcccagcccagcctcccaagatggggaagaggagaaggaggggaccctcttcccagagaggacacttccagctaggaatgccaaggtgagagctggcaagatgggtgggggaggcactttgatgaggcaaagggactaactgacccagcatcttccttcctctgccagctacaggaccccgctctagctccatggcctcccaagccagtggctgtgcccaggggccgccagcctccccaggagccaggggtcagggaggaggctgaggctggagatgcagctccaggagtcaacaaaccccggctgaggctgagctcacagcaagaccaagaggagcccgaagtccaaggtctgccaccctggctgagtggggggctcagggcacctctaggactttgctgtccacatcaggtcctcttccagagcatggaatgagtgacaaccaggagtcacagcctggatgagcatcccagcatgagccccactcctgtgttaggcctgccttgattgttatttcagggccccctgatccaggccggcggactgcccccctgaagcccaagaggacacggcgggcacagtcctgtgacaagctggaacctgatagaagacggcctcctgaccccacaggtgctggtggtgagagggcaggtccccccttcccacctatctgtccaacatgacaccccccgaagccccaacaccaggtggctggctgtccctgcccaggaaacagggctccctggatttgtccccagcaggaaccagtgagccaggaacagactgacaactgccacaacaccctcctcagccctcgacatgtgcctcgcaaggactcagacccctatccacccccagtccccagggccccctgccagcccctgtcctacaggggcaagacggcaggaccaggcatgggggagctggaggcagggactagaacagagggagccacctggagagacggaggctgtcagtgcctgcctcgatacctctctctgcagagagcttctgggtgggggcttatctcctcccccaggagggtggatctctgtccctctatccccagggactctctcccctcttgtatagaataaaaaaacaaaatcatcgcc

SEQ ID NO: 6227 - DNA, 8184 bp, Homo sapiens
ctcctctcactgtctctggctcacgcttcccgggcctggagctgggacctgcccataggcatctgaagacacgtcagcctcagccggggggagcccttgcttgacgctctctggcctccgggctgcctctcgcgcccgctctgggcccgctcttcttctcatgatgtctttcctttcacctcctgcgttgtctgacatcgtcgctctcttcataaattgtagcgttttatgttttcgttcataggagtgttttatttgatttttctttattttaaattattacatttaagttctttttattttatgctctaggttttgaagtttttctaatttcttaatttttttgttgttttttgttttgttttgtttttgtttttatgtactgtattttcagtgttttaaccaaacagttgtggctactcatggtgaggaatgaccgctaagagtttgggttctttcagtgcatttggaggtcactgctacacgttgatgtttaggaggttgagaggtttgcctttaggtaagttgtggccagggggagtgtcccatgggtaagtggtggccctgtagggtgacggagagctaggggaggcgcaatcagactgcagaattccccgcagccaccatgagggtcaggagcaggccggggacccagcgtggaggaaggtggcccagaagcgtttgtctgatgtgcacagctacaccctgcctggccacatggggttccctgttttctctctgccgggtggtggcagagtcggtgagacaccaggtgcctgtgacacattgggtagacaggttctttgagaacgtcagcacagacttcttgcatgagcggtactcgcttcctccagcgtggggagtgacatgaagagcaagggttttcctttcaaactgggcatagctgcagagccacaggccgtctcagacatttctacaaagccactccgggaggcgggctgcgcccgtgtgagggctctccctcggcactgctcatcttttggggctggacatgcatggcctgggccgctgggacgcggtgggtgtggagcagcatccctggcttccacccacgaaagccaggagcacccccttcatttgtgaccacaaaaatgtctctggactttgcaagcatcccctcggggcagtcagcccaactgagaatagctactatagaggaaggtgtgtcattttgagattccttctagagaaacttaggagcctggtagatgaagcagaaatgtgtcctctgagtgagtggccgtgtccggtactgagaggccccgtgccctgagtctggcggtgaccagagaggctgggcagaggcagaggtcagcactggccatgacttctggaagtcccgtctgccctggtcacttaaaggccagtataagtcagctgtggagagggctggataccccctcgacagctcctccctgggtgagatccttagcattagagtcccccacggtgcgccctctgagagaccacgggaacccacccagcggctgcctgggacaggcacaggagccacctgggtgcctctgaggccttgcactttcccacacctcaaggagggccgggggccacgggcaagctctgccatagcgggtgatcaggtcagctaagacgagaacgtttggggctctttttctccagctggttcagtatctttgttaggaaagaccattggaaagaatgtttgtttcgcattccgcattagtcacatagaatgcgctcctccctagcgagcttcctgaggtagacggctggttgcggtttctcgtaatccgggctgcccccaccctccagaatgtcttggtggcgtccctttctgtgagcagggattgtggtttctttgcgcttgctcatgttcaggggtgagctctggtccagtcaagccacagggtcagcaccttctggtcactccctggccctgacctgagcccggggaggaacgtggggcaggcgcgggtgggcccagcctcgagctcttcagcacagtgatggtgacggggcagcggtggcggcacagccagcccttcttgggtccccagtcagagccctctgccctacctgggctggacttgtttctgaacagccacaagctacagggggctgccgctgtgtccctggcgaggcactggcccattacaagcaatcgtctggggagggcaccagtggaaagccccgttccaagccatttcaggagggtggccctgcttccgaggagccggagtcagtggccggataagcagagccactcgggagtggtgaggcccggaagggttagcccggtgggcggcagaggagctctggcccgcagggtgtcgggcgaggcaaagtgcaaagcattggtgcgcggggcctcaggcagccacggcggagccgcaggccagggacctgcagtgactcgctctccctcctccctgtgtttggccttagtgtccacaggatgaaatgtccgagtcaggccagtcctcggcggccgccacacccagcaccacaggcaccaagtccaacacgcccacatcctccgtgccctcggccgccgtcacacccctcaacgagagcctgcagcccctgggggactatggcgtgggctccaagaacagcaagcgtgcccgggagaagcgcgacagccgcaacatggaagtacaggtcacccaggagatgcgcaacgtcagtataggtgggtgcccacctccgggactctgggctccctcgggcaggaggcagggcttggtttgggtagatgtgaaactaatgcaccaggcgggcagtgcaggcagcagagacgtgttcctcacagcccggaggctggggtccaagatcaaggcgctggcagggtaggttcctcctgcggccactccttggcttgtagacaccaccttctccctgtgtcctcaacaggcatcccctgggtgtgtctgtgtcctcatctccagctcctacaaggacatagccccattggattagagccaccacgtgacctcattttaccataatcacctcttgaaaggcccagcctccaaatacagtcatgctagggggtatctattaacatatggatttggggagacacaactaaggcagtagcctgcgtcaccccacggcacacagccccactaaccagtaacctgcatcgccccacggcacacagccccactaaccagtaacctgcatcgccccacggcacacagccccactaaccagtaacctgcatcgccccacggcacacagtcccactaaccagtagcctacgtcaccccatggcacacagccccactaaccagtaacctgcgttgccccacggcacacaggccagtgagggaaagagaagaggggaatgagggccgagaggaggtccagccactggcttgcttggacgtgggatctctggggactgggcttactgctgacactcccatgcagagaggctgctgcaacccaccccgctccaggccccgcctcagacgtctactgtgctggggttcgacctctgcccagtcagcctgggaagagctgttttctgatcatccccacctagcaggtggtccagctccagcccaccagactcaggttccgagggcagccgtgagcagggcagaggctgccagaccctctcctgaccccaggtgcccctgtgctctcccctaggcatgggcagcagtgacgagtggtctgatgttcaagacattattgactccacgccagagctggacatgtgtccagagacccgcctggaccgcacaggaagcaggtactggctcagcccaggccctggggtcctgggggctcagtatttatccaagtcggtgtctttggtgaagtcttcctctgccaccactgggagaaccatcaaggctgtggcctaccgcctccatccacgaccggcctgcagggcagtgtgggcattgaatggccacggtgggaggtgttggaagagtctgcagacgcagccactccgggctgcccactgactctgctctctctcccgacctgtggatcccaacagcccaacccagggcatcgtgaacaaagctttcggcatcaacaccgactccctgtaccatgagctgtcgacggcagggtctgaggtcatcggggatgtggacgaaggggccgacctcctaggtaagcgcaagccttcccccgcaccgctgtgcctgcacaatgctggggctttctgctgttggttttgtttgtaatgaaaggaaagtcctctgtcagctgtgagctaggaacctttttttttccagctttgttgagttgcgtttcacatggaattgtccctccatctccacaggggattggtttctggactgccccaaggatgccaaaatctgaggcttctcaagtccctgctctgaagtggtgtagtgtttgcaccctcccgtgtactctaaatcacctctaggttatgttgtagatgctgtgtaagtagttgctgttatgctgtgtcgtttagggaataatgacaggaaaaaagtgtacacgtcagtacagacacggccaccacaggcctgtacattttctgtgaggctggttgaatccacacatgcagaactcgtgggtattgagggtcgactgtatcataaaattcacccgcttcgagtgcacggtgcggtgggttacagcgtactcacaggtggggcagccacccccatgatctcagtttagaatgttccgccatccctaaaagaaatccatgcctgttagcctcgccccatcttctgcacacaccctcagggctgccaactctccaggaggttgggagggtgcccgcttctctgctctgtgcccattagcctcgccgcacaccctaggaccattgactttggaggaggttgggagggtgcccacttgcccactcctccgcagacagccctggcttcacctcagcgccacaggtctacaccggacccctgtgcctaggtctgtggcggctgcaaacatcaggacctgcttcctgtcagcacgtggagtctcctgtgctcatggcatctgctggcagctgagcactggccatgtggctctgagccccaggctttcaggcatgacaggcgggcagtaggacagcgcagtctgtccccttgcacgcgtcagggtccgagcctttcgccatggccttgcttcccccagcccgcagggtgagaagctcctggatcccaggctgcctcctggtgtactcctgagctgattgtcttatctggggcagggggacctccagggagcagagtaatgtggggtgctgagcaccagcagggcctcaccctgacagggaggcctgtctcatcctggcttgagtcagaaagtgccccagtagaggccatgtatgagtaacataatattcaccatgttaaccgagttgaagtgttcagttcagtagtgttggacacactgtacttggtggtgaaagatggaatgctccccgagatcaggacggcggtgagggcgcactttggtgctgtgaattttctgtggaacttttctcatgtgttgcaaaaatatatataaaaaatccaaaggagattaatcttcagaaaaatcctgctaaataggggtaatctcttttaatattttgctatccttccactctacataattcagataatgtttatttatttatttatttatttatttcttagacaaagtcccgctctgtcgccaggctggaatgcagtggcgccatcttggctcactgcaacctccgcctcccaggttcaagcaattctcctgtctccgcctcccaagtagctggaattagaggcacgcgccaccacgcccggctaatttttgtatttttagtgcagacggggtttcacaatatttgccaggctggtcttgaactcctgacctccggtgatccacccgcctcaggctcccaaagtactgggattacaagtgtgagccaccatgcccggccgataatgtatattttttagctattttttttattttttgaaaaaattatatatgcttataataatatttaaataatatcagcaaatgccaagaagagagtaaaaaccagagggaacctccccaccatgctataatgattttttttttttttgagacggagtcccactttgtgggccaggctggagtgcagtggtgcgatctcggctcactgcaacctctgccttcccgggttgaagcaattctcctgcctcagcctcgtgagtagctgtgattacaggcatgcaccaccatgcccaggtaatttttgtatttttagtagagatggggtttcacagtgttggtcaggctggttttgatctcctgaccttgtgatccacccgcctcggcctcccagagtgctgggattacaggcgtgagccaccactcctggccgattgttttaatgtcttggtgacacctaccagacaccatggcccatggcccacagaggtatgacacatgtgtacgcagaacacacagtgtcaggtcgcagctgcccttctcattgtgggcggtgtcatttccgtgggtggcagcactgacgggcacggccaccgtcggtccttactgcagcatcaagccgccctcctgccagtgtccccatttatagatgaagaaactgaggccgggcacagtggctcatgcccgtaatcccagcactttgggaggccgaggcgggtggattgcttgaagtcaggagtttgagaccagcctggccaacatggtgaaacccatctctactaaaaatacaaaaagaaattagctgggcctggtggcgggcacctgtaatcccagctactcgggagactgaggcagaagaattgtttgaacccaggaagcggagattgcagtgagctgagatcgcaccattgcactccagcctgggtgacagggagagggactctgtctcaaaaaaaaaactgaggtcagggagggtgagatgacggtgagagctcggacttgaacgcaggtcccacccagaacagcagccctaactctgagcaaggtctgtgctgttcagtagctctattgagatgtgatttccacactgtgtaattcattcacttacggtgtacagtccagtgggtcttagcatgctcggtgttgacagtcacatcgtcttcacccccaaaaggaaaccccgtgcccatgagcagtcgctttgtctgcccctcgtccccagccccaggcaaccacaaatccatgctctgtctctgtagatttgcctgttccagacgtttcacagcaatgggccttttctgcctggcttctttaacgttgcatcacatcttcaaggtccatcccagctgcagcgtgtcagtgcctcctggcttttcactgctgagtagtgcccgttgcatggacagaccacgttgtgctcacctgtttgccctaatgggcccctgcttggtgctttccacctttgggaggctgtgaatcgtgctccagccacactctgacccccgcccggctccaagagatgaccaggattggcagcttcctcaccaaccagggactctgtggcctgcgcatccgcccatcctgttggctgtggtaccctgtgctcaacccgtggcctttgtgctgcctcgccctgctgcacagccaccccctgcagcacccacctagagggcactggccaggagtctgctttcccacgagaccgtgaggcagtccttttctcataccacgatggaggccgagtcactgtgcgctccacgatgaggctgcaagtcactatgcgttccacgccctccgtgcactctgggctctgccaccctactctgcagggtgctggtcatctgggcatcgccgagctcaggctggcacgacaggctgctcttgggagtaacagaccttttggtgcctttccagagccttaaacgtaatgcgtataagaaaggcagggaggccaggcacagtcactcacacctgtaatcccagagctttgggaggccagggcaggaggatcacctgcgcctaggagttcaagaccagcctggtcaacatagcgagaccccatctctacaaaacattttataaaaaaattaggcaggcatggtggtgtgcacctgtaagtcccagctacttgggaagctgaagtgggaagatcacttcagcctgggagtttgaggctgcagtgagctgtgagcacaccactgcactccagcctgggtgacagagtgaggccctgtctcttaaaaaaaaaaaaaaaaa

SEQ ID NO: 6228 - DNA, 466 bp, Homo sapiens
tgatcctctctcaaaccacacccccacataaagcctcatgctcacccgggctccagccagacacatcctgcccctgagagccacgcctctactctcggaggaacgtcagtgtctagagtgtggggtttgccctccgttggcagaaaggtgaggagaaagctcctcttctctgggcccctccctgcctgtccctggtaacgcctcctgggtcctgagtttgagaaagcagagcctcgccccagcaggtactcacagccagagtgcgggggccccagcaggttctcacagccagccggtgagtgcacctcagagcacaggggcccagagccaggccactccttcagggccccaggtcgcttgctgccagttttggcctgtgagctcactggcctcagtgccaggtaaggacagccaccttcctgggaagaagaggtgaccccgggtctggtggatttcccacaggggc

SEQ ID NO: 6229 - DNA, 1623 bp, Homo sapiens
agaaaaagtcaggcagtcctgatgagtggggacctcctgctgctgcaatctgttgatggaaggtttttgaaacagaggagcctgctctctggcaaccaggatggacaaatgagctgggacctgcgcccctctgccctaatcaactcgccccatgtccagctcagctgcagaatgggcatgaactcctgaagacagcaggaaaaggagtacgcccttgtgtggctgccaagcaggggagagcctggagcctgcacagatctgggaaagagcatcatttcagaaacacgtcagctttgcacgtgacgggagggtgcttctgccaaaagtcggcaggtggagagcgacatccctccgtccagcgtctacgtgggcggccctgcacctctctcagcatttttactctgagttcctttggtgatggagaaataaaaagagcccaggtcgggcatctgttgtattccatcgaatctcagacaacaccaattttaagacttttttgtttgttcgttcgtttgtttcctatagaggtaggctgttgctgtgttgccagggctggtctcaaactcctagactcaagtgatcctcccactttggcctcccaaatcacactggaattacaggtgtgagccactgcacccagcccacataccattatttatttatttatttatttatttttgagacggagtcttgctctgttgcccaggctggagtgcagtgacacgatatcagctcactgcaagctccgcctcctgggttcacgccattctcctgcctcagcctcccgagtagctgggactacaggtgcctgccaccatgcccggctaattttttgtattttttagtagagacggggtttcaccatgttagccaggatggtctcgatctcctgacctcatgatccgcccacctcggcctcccaaagtgctgggattacaggcgtgagccaccgtgcccagccccacgtaccattattttaggaatcttcaagaaagaaaaaactgctgcaaattaaactataatgtgacagtgattgtttaagacctactgaaatttcagaaatgttaacatgaggaaaaaaatgtacgtcttagaattggtatactaggaccggccgggcacagtggctcacgcctataatcccagcactctgggaggccgaggcgggtgggtcatgaggtcaggagttcaagaccagcctggccaagatagtgaaccccatctctactaaaaatacaaaagaattaactgagtgcagtggcaggtacctgtaatcccagctacttgggagactgaggcaggagaattgcttgaacctgggaggcagaggttgcagtgagccgagatcgcaccaccgcactgcagcctgggcagtaagagcgaaactctgtctcaaaaaaaaaaaaaaattggcctaatagggagtaagggaattaatactcactgagtatgtcgctggtgctgggagctgtaccagctattaccgcactacctggtgggaatttcacagcaaatattcactaaggaacttatttttctgtttcacaaatgactaatactcagagaagttatactatgtgccttgcattgctgagcggaatctggaatccacgcagctgatct

SEQ ID NO: 6230 - DNA, 1232 bp, Homo sapiens
  SITE (1180): n equals a,t,g, or c
gataatgtgagcaatctccagccacatacagaagtatagaagaatctcacaagtacaatttgagttaaaaacaaaaacccagacctaaagatatacatactctgtgactccaaatttaataattgctcatagaagtcaaatagaggttaccctgtaagaatgggttggtgactagagtgagcacacccagattctggggtcctagtcatgctctgtgtcttgacctaagtatacaggtacatgtaagtttgtgaaaatgtaacaagctgtatgatacgatttttctaatattgctcatctgtgtttgaaacatatacttcagaaaatgttaaggaaaaaatagaaaaggaaaagaaaaatagaaaacctaaataatctagtacttattaaagacttgaacccgtcataaaaagcctttccacaaattaaatactaagccaagcagacttactaaattctaccaaaagctaagaagctatgtcaattttatacaaacttttcaactaatttatgagcattaatttgatacccaaacctggaagggactatataggaaaggaaaatgataaagtcagtcttaattatgactatagattgcaagaacccttaccaaaataggagcaaattgaatcaaacaatttttttaataaggcaaaatgtaacaaccaagttgggtatattcctggtatgcaacactgctgcagcatttaaaaactaatcagttatggagctagagggaagatggcagagtaggaagctctgggaatctgtctccccacccagacgacaactgcactggcagaatctgtctgatgttactatttcggatctctgttcaccatttttatcaggttgggaactctgaagtctattgaaggcttatgacttccaggggaaggtttgaaaggttaatttcagctcttaacatggtagcaactacctgttcgtctaccctcagtcccatagcatgtagccatgtacacattttcaagcagctttgcatagggtttgtgggagccagtgtggacaataaggattctgtcctccaaatagcaggaatctttgctctgatagctaattactgcttctgatcatggaggtgcagccatacagtgagccattgttgcaaaccccactgccactgttacaagcccctccacttgaggctgaagtgacttanagatttaaagggccattgccttcagtggtgattagtgaggagaaagaaaaaa

SEQ ID NO: 6231 - DNA, 1232 bp, Homo sapiens
gataatgtgagcaatctccagccacatacagaagtatagaagaatctcacaagtacaatttgagttaaaaacaaaaacccagacctaaagatatacatactctgtgactccaaatttaataattgctcatagaagtcaaatagaggttaccctgtaagaatgggttggtgactagagtgagcacacccagattctggggtcctagtcatgctctgtgtcttgacctaagtatacaggtacatgtaagtttgtgaaaatgtaacaagctgtatgatacgatttttctaatattgctcatctgtgtttgaaacatatacttcagaaaatgttaaggaaaaaatagaaaaggaaaagaaaaatagaaaacctaaataatctagtacttattaaagacttgaacccgtcataaaaagcctttccacaaattaaatactaagccaagcagacttactaaattctaccaaaagctaagaagctatgtcaattttatacaaacttttcaactaatttatgagcattaatttgatacccaaacctggaagggactatataggaaaggaaaatgataaagtcagtcttaattatgactatagattgcaagaacccttaccaaaataggagcaaattgaatcaaacaatttttttaataaggcaaaatgtaacaaccaagttgggtatattcctggtatgcaacactgctgcagcatttaaaaactaatcagttatggagctagagggaagatggcagagtaggaagctctgggaatctgtctccccacccagacgacaactgcactggcagaatctgtctgatgttactatttcggatctctgttcaccatttttatcaggttgggaactctgaagtctattgaaggcttatgacttccaggggaaggtttgaaaggttaatttcagctcttaacatggtagcaactacctgttcgtctaccctcagtcccatagcatgtagccatgtacacattttcaagcagctttgcatagggtttgtgggagccagtgtggacaataaggattctgtcctccaaatagcaggaatctttgctctgatagctaattactgcttctgatcatggaggtgcagccatacagtgagccattgttgcaaaccccactgccactgttacaagcccctccacttgaggctgaagtgacttaaagatttaaagggccattgccttcagtggtgattagtgaggagaaagaaaaaa

SEQ ID NO: 6232 - DNA, 1233 bp, Homo sapiens
gataatgtgagcaatctccagccacatacagaagtatagaagaatctcacaagtacaatttgagttaaaaacaaaaacccagacctaaagatatacatactctgtgactccaaatttaataattgctcatagaagtcaaatagaggttaccctgtaagaatgggttggtgactagagtgagcacacccagattctggggtcctagtcatgctctgtgtcttgacctaagtatacaggtacatgtaagtttgtgaaaatgtaacaagctgtatgatacgatttttctaatattgctcatctgtgtttgaaacatatacttcagaaaatgttaaggaaaaaatagaaaaggaaaagaaaaatagaaaacctaaataatctagtacttattaaagacttgaacccgtcataaaaagcctttccacaaattaaatactaagccaagcagacttactaaattctaccaaaagctaagaagctatgtcaattttatacaaacttttcaactaatttatgagcattaatttgatacccaaacctggaaggggactatataggaaaggaaaatgataaagtcagtcttaattatgactatagattgcaagaacccttaccaaaataggagcaaattgaatcaaacaatttttttaataaggcaaaatgtaacaaccaagttgggtatattcctggtatgcaacactgctgcagcatttaaaaactaatcagttatggagctagagggaagatggcagagtaggaagctctgggaatctgtctccccacccagacgacaactgcactggcagaatctgtctgatgttactatttcggatctctgttcaccatttttatcaggttgggaactctgaagtctattgaaggcttatgacttccaggggaaggtttgaaaggttaatttcagctcttaacatggtagcaactacctgttcgtctaccctcagtcccatagcatgtagccatgtacacattttcaagcagctttgcatagggtttgtgggagccagtgtggacaataaggattctgtcctccaaatagcaggaatctttgctctgatagctaattactgcttctgatcatggaggtgcagccatacagtgagccattgttgcaaaccccactgccactgttacaagcccctccacttgaggctgaagtgacttaaagatttaaagggccattgccttcagtggtgattagtgaggagaaagaaaaaa

SEQ ID NO: 6233 - DNA, 262 bp, Homo sapiens
gaaggaatacacacagctttgaaggaatacacacagctttaaatgttaggaaagaatgttgaaaatcaaatattaggaaagttgaaaatctaagattttgagaaactgaaaaagaaggcggggcacaacggccggcccctataatcccaacacttcaggaggcctaggtgggcggattgtttgagttcaggagttcaagaccagcctgggcaacatggtgagactctgtctctactaaaaatacaaagaaatagccaggcat

SEQ ID NO: 6234 - DNA, 262 bp, Homo sapiens; identical to SEQ ID NO: 6233

SEQ ID NO: 6235 - DNA, 1020 bp, Homo sapiens
ggacgggccgagcgggtcggggcttgccgtttgactggaattgccagaatggcggaccgagccccacgacaacctacctccctgggctcctcgccgcagcgctgcggctcgcctccctctgctcctcctcctccgccggatcgcggcgagcggatcgaggactgcctagcgcccctctgcccaccggtggttggaggccgcggcggctgcgcgttgagtcgtttcctgccggttgacctgagcctacttcgcagtagcaggaccgctgctgtggagctggtcgcaggcggtgtgtgccggtcgcctagtcaggagaactagtcctcgactcacggtgagggaatggaccgacacgggtattgtaccgctgagggaaaggagcgggactccggacctccaggaggtagggagtgaggccagtaggaccggcgcgcctccggggggattcctcccgggcgttgagttgccaacctgggacccgaggaagatcggcgtggtggtgtgctttttgttgttgttaaccctcctcggatttctcgaatttcacaccactgtccatatgcgatgatgtttgtttgcccttgacgcacttactcatggatggtacttcttcagcctcgttagacagcctggtgatggaggatgaagaaaccatgtgcttttcattcagttctggacttagtctcccttttcttccttcagcaagttatttttgttagttccttatcaaaaagtgtacataaaaattaggcaactccaaacatgcctccagggttaatgtgtgaaataataagataatatatgtaaagtggaattagctcctaggcatagggaaagtgcagaatattgccgtgttgtcatttacagttctgttgatgtcgataacgtttgtgggtgtaattggtagtgttctgtccctccaaggagttaataaaacaaagcaaacataggcctgttaggtttctgtggctactgaatatttgtttctcaaaacacttgactgatatttgataattgaat

SEQ ID NO: 6236 - DNA, 774 bp, Homo sapiens
ctcactatgaagatatttatgtatgttcccataatacttttcagatcccaatgtctgtgtttatccttgacagaaataatagaactgctgtcttcttccaagttaaacaaaactttggagctaaaagctagctaggtcaagagaaacaaaatctaatcctcacccaattgagagactgaatatacaaagaatggccaaacctaaccatgacctcctacccataacctcttcagtaatcggccagaagggtcaggacttaatctttaaccggcagcttccctatttcttgcccctgcttccagctctgggccaatcagagaaagccaaatgtgctcctcacaccaatcgcgtaagaagccctgcttctagtatagccctcctccaacttcccgatgccaacatcctccaatcagagccaacctgaagtttctcccttttttcagtatatgtaaagcttttccactcccctgcctgcctatgagtctgttaaatcaagtgatgggtcgcggctgactcttgccagctctgagtaaatagcctattctcatttggtggtcgttatttctacacagccggtgggaaggtggtggagaatagtgaagactattcttaaggttaaaaagaaggttcggcttacattttttttttattttaaatttacagcatggcgtctccagcccaggttttaaaataccttctaatgtaaggaaatagccctgcaccttgtgcccatcctagagagaaaatggtttcttaataaaaaatgtatgaggc

SEQ ID NO: 6237 - DNA, 815 bp, Homo sapiens
gaaatggagaagcttaaggcaaagggtgactctccggcctgaccctcactatgaagatatttatgtatgttcccataatacttttcagatcccaatgtctgtgtttatccttgacagaaataatagaactgctgtcttcttccaagttaaacaaaactttggagctaaaagctagctaggtcaagagaaacaaaatctaatcctcacccaattgagagactgaatatacaaagaatggccaaacctaaccatgacctcctacccataacctcttcagtaatcggccagaagggtcaggacttaatctttaaccggcagcttccctatttcttgcccctgcttccagctctgggccaatcagagaaagccaaatgtgctcctcacaccaatcgcgtaagaagccctgcttctagtatagccctcctccaacttcccgatgccaacatcctccaatcagagccaagctgaagttctcccttttttcagtatatgtaaagcttttccactccccggctgcctatgagtctgttaaatcaagtgatgggtcgcggctgactctgccagctctgagtaaatagcctattctcatttggtggtcgttatttctacacagccggtgggaaggtggtggagaatagtgaagactattcttaaggttaaaaagaaggttcggcttacattttttttttattttaaatttacagcatggcgtctccagcccaggttttaaaataccttctaatgtaaggaaatagccctgcaccttgtgcccatcctagagagaaaatggtttcttaataaaaaatgtatgaggc

SEQ ID NO: 6238 - DNA, 5728 bp, Homo sapiens
ggcgaattaaccttagcatatgatagttcttttagtgtttcccaccacccttttcagagtaagcaattagacgtctagagtttcttttcctctatctctttgggtaaatagcaaccagtggtgcccgccaccacgcctggctaattttttgtatttttagtagagatggggtttcaccatactggccaggctggtctcagactcccaaagtgttgggattacaggcgtgagccaccgtgctgggcctaccatttagtgttctttttttttttttgagacggagtgttgccctgtcacccaggctggagtgcagtggcacacagtctctgctcactgcaagctctacctcccgggttcatgccattgtcctgcctcagcctcccgggtacctgggactataggcgcccgccaccacgcccggctaattttttgtatttttagtagagacggggtttcactgtgttagccagggtggtctcgatctcctgaccccgtgatccgcccacctcagcctcccaaagtgctgggattacaggcgtgagccaccacgcccggccaccatttagtttttaggttatcagacatctgagtccatagccaatttggattctgcttaaggtgcaggtaattgctttgatgggtttaggtattgggagagttgtcagctgcctatttcccatttgacccctcgagtgaatccctgaatctgtctcaggttggtgattgattgctcagcttgagcagacagtacagggccactgtgtgggtgaacctggagcatctcagactggtctgttaggggctgttgtctgaggtaagcacagaagagaaggcacagtgacccttgtcagctccttaatacttggatcctgatgagctccagccagctcttcacctttccagaaagtccagtgtacaggtgcatagaagcagtcaaatgccggatcatttgttttcctgattctttgatttgaacatactgaaatgttgactagagaatatctgggtgaccaacaagaagcagtttatgtatttttttgagagggagtctcgctcttgttgcccaggctggagtgcaatggcgcgatctcagttcactgcaacctctgcttcccaggttcaagcagttctcctgcctcagcctccgaagtagctgggattacaggcatgcaccaccactcgtggctaattttgtatttttagtagagatggggtttctccatgttggtcaagctggtctcgaactcctgacctcaagtgatccacccgccttggcctcccaaagtgctgggattacaggcgtgagctaccacgcctggccaagaggcagtttttgaattccaaaattatggagtgatatctgggagtcagccttcatcagtgatgctgcttgtgctttctccagcttcttgggagactgggcaccaggagacttggaggttcttccctatcttacctactcccaagtatgcatgtttttgaaaaaaatatttaagatttctagagaagatcacaatcttctccagtgtctgtgtaatccattgtggagcagtttattacagctgacctactgtctcctgtctgttttaggagcggtgacttaggttatcaccccttagtgttttcctgtcatctgccttctcatctccacctaaaatttagtttttggtaaaagatcatgctatctaaccttgtcatcattgcaaaacaaacttatttatgtttatcatgatgctgacattagcaagctgactcatggtttaatgttagtgtttcttactactggtcactggctgacagtcggaaaagtgatgccctatttttttttttttttttttgagatggaatcttgctctgttgcccaggctggagtgcagtggtgccatctcggctcactgcaacctcttcctcccaggttcaagcgattcttctgcctcagtctcctgagtagctggaactacaggtgcatgctaccacgccccgctaatttttatgtttttagtagagatggggcttcactgtattgggaaggctggtcttgaacctctgacctcatggatcctcccgcctcggcctcccaaagtgctgggattacaggtgtgagccactgggccctgcctttttttggttttggttttggttttgatacggagtcttgctctgttggctaagctggagtgggggggggctggtctcagttcactacaacttttgcctccgaggttcaagcgattctcctgctcagccacctgagtagctgggattacaggcacccgctatcatgcccagctaatttttgtatttttattagagaccatgttggctagactggtcttgaactcctgacctcatgatccgcccaccttggcctcacaaagtgctgggattacaggtgtgagccactgcgtccggtcctgtctctgtttttatctgaaattatgttagcctttgcctagttatggtgaattaaccttagcatatgatagttctcttaatgtttcccaccacccttttcagagtaagcaatttgacgtctacagcttcttttcctttatctctttgggtaaatagcaaccaatttttcctgctactttagatagtaggcaataacaaaatgtattcatagctctcagtaatatttgttctattgttttgtttttgaggtgaaaggggggaccctaccctcagaacatgagggaataatatttacgtggctcacaaagaccagtgagtacatcatatgcatctctcacaactccccagaagagggcctccagcacgagtctaggctcagccttttctgtccctccgagaactctatgaattgctgccaagtgttttaattttcctcagaatttctttgtaatgttattgagggttggaggtccttttacaaattttggaaataagtaaatcaaatgagaagaccatgcttccaaacaatcattctgtttaacagatccccttgatttaatgcaattatgaatgcgttagtggtagtgtagtttaagatctttcccttgaatgtacaggctttaaagaaacgaacctaggagtgtatttcctatcaagcaaatgggttctaagactttacgctttacacatcattgattatagcgctgtgcttttcccgtgctaggcaatggatcacttggagtcctttattgctgaatgtgatcggagaactgagctcgccaagaagcggctggcagaaacacaggaggaaatcagtgcggaagtttctgcaaaggtatgcttgggtggcttcggtgtctggtgtgttcttaaaaatactggcttgtcaatagcttttttttttgagatggagtctccctctgtcacccaggctggagtgcagtggcatgatctcagctcagtgcaagctccgcctcccgggttcatgccattctcctgcctcagcctcccgagtagctgggactgcagacgcccgccaccatgcccggctaattttttgtatttttagtagagacggggtttcaccgtgttagccggtatggtcttgatctcctgacctcgtgatctgcctgcctcagcctcccaaagtgctgggattacaggcgtgagccaccgcgcccggcgttgtcaatagctattaactgaccctcagcactgattgtgtggacagtactctctgccttactccagttaaggatagagggctgtgatcaagcattcatgtgtcatggaattctcatccctcaggagctgctacctctgtctttttattctctccattttcgtcctctgtacatggtttatcattattttttaattttaatatattcttcgctgagtttggtggcttatgcttgtagtcccagcactttgggacaccaaggtgggggcagactgcttgagcccaggagttttagacctgagcaacatgaagaaaccccatctctacaaaaaatacatatattagccaggcttggtggtgcacatgtgtatcccagttactcaggaggctgaggtgggaggatcacttgagcttggggagattgaggcttcaatgagctgtgatcatgctactttgcttcagcctggataacagagtgagaccctgcctcaaaagaaaaaaaaattattgtcggtttgtttttttttttaagagacagagtcttgttctgtcgcccaggctggagggcagtgtcgtgatctcgactcactgcaagctccgcctcctgggtttacgccattctcctgcctcagcctcctgagtagctgggactacaggtgcccaccaccacgcccagctaattttttgtatttttagtagagacggggtttcactgtgttagccaggatggtctcgatctcttgacctcgtgatctgcccgcctcgttttcccaaagtactgggattacaggcatgagccactgcacccagccatctttttttttttttttttttttttttaataaagatggagtctgttgcccaagctggtctggaactcttgggcttaagcaatcctcccgccttgtcctcccgaagtgctgggattacaggtgtgagccagcatgcccagcctctgcatgttgttttaaactttaatatctccacataaaactggaaagaattggtaaggaaatggtcaaactgtggtacatccatatcatagaatgaaaaggaggtagatttatatgtaattagactgagtgccatttacatcactcttctgtttttctcttcagtggaactaagcctctccttgttttttcttttcagtgttgtaaaagcatttcttaggatttatgcaattgctaatttgaccaacggtgctattttgtttcagaaggtaaatcctagtaattaggtattttggttacagcttaaatctgtacatttaaacctaggcattttattaccatacccagaagaaaaagtcataaagagagacagcctagacaatgaccaatctgtgatgatccttggaagcatgtcggaagtgacaaaggtgccactggtttcattggaacataggactcgtttatggttacagtctcaatgctggcagtaaggatgccgtcattgttaagtgtggatctttagttcttccacttattttcagactggaaatggagcaggagaaacccttgttgcctttgcattcactttcattttcagatgtctgcttacctcattctttctcctcacaggcagaaaaagtacatgagttaaatgaagaaataggaaaactccttgctaaagccgaacagctaggggctgaaggtaatgtggatgaatcccagaagattcttatggaagtggaaaaagttcgtgcgaagaaaaaagaagctgaggttggtgagataagtgccttagggcaagagaaatcttagtaatttggcagcgttgaccgttggaattaattgagcccatgcttgctcccattttttaaaaaatttatacattttgggcccagcacagtggctcacgcctgtcatcccagccctttggaaggccgaggcgggcggatcacgaggtcaggagataagaccatcctggctaacacagcgaatccccgtctctactaaaaatacaaaaaaattagccgggcatggcgccaggcacctgtagtcccagctgctccggaggctgaggaaggagaatggcgtgaacccgggaggcggagcttgcagtgagctgagattgcgccactgcactccagcctgggcgacagagcgagactctgtctcaaaaaaa

SEQ ID NO: 6239 - DNA, 111 bp, Homo sapiens
gcgcccggcccctctgcggctctttggaggtgtttagcgcacgtgcctagtgcagcacaagggcacctgtctgctgtgacagttctgactgacatcatgggcttttctcag

SEQ ID NO: 6240 - DNA, 3415 bp, Homo sapiens
ggtgacacccagcccaggggcacccccttccccagcccccacctggagagacatggcccctgccaagctggtcccttcaaatggatcctttgtggactttagctcatttgtggaggaaccccaggtagggacgccccttgttcctcacccccaccccacttaggtcctgggcccccactgccaggctgggcccagcttgctcagtcaaggggctgccaggcccccagaaaacacttggagccatcgggtagcgatggtctatgccatggggaacacctccattggtgtggccaagctgcccccattcctatccacccctctccccaccccgtcctgtccatgcgcttccagggccccacggtccccaggaggacgcttcctggccaaagccccaagcctttggtgagaagccaattcccacttgacagaaggcgtccatccattcatctcattggccaaggacaaactctcctctgggacgtctgggactggcatttgtcccccactcaaattatcaaagctttctgctcagtcagttgtgtggggatggtgagggaagaggggtcacatgagggaggaaactgtatccatgcatgcatgataatgcgtggcagagactgcaacagggattgtgtgttcagagatcatatgcatatgtgtagggctggagcgtgtgtgtgtcttgagattgtgtgtgttgcagtcatcatatctatgtgttacagattgtgtatgttagccttgtgtatgtgtgcttgattgaggtggtgtatttgggttgaaattgtgtcatatgtgtgtgctatccatctcgtgtttagaggctgtatatgttagcttgtgtaagaatgtgttttcaaaacagtgtgtgtattgggagtgatgggtatgtgttaggtatgtgatgggttgtagaagcgtgtgtttgagagaattcagagacatttgaaggctgctgtgtgcatgtttgggggtctgaaaagacagttgtgtgcatggatgtgtgcgtggggagaaagaacgtgggtaagatgtcccttcccagccctgagaccactggtcacagttggccacctccaacgggagaccttgtccttggcctagagtcctcccacccttggggggctcctgcctgaggtcctcagaatcccactgcaatggacccaggcagcgccccaggaagccatgctgggcccccgccagggcctatcccaaaagcaggggccagggagggggcgacttgcctgcccctgaagcccttgttcccattggccccagtttgcattctgcaggttttccattttagtgggttctgcttttatttcagagacagacatgtgtcttctctgtccgtttccaataggtaaagccatatcagttagactgcaatactttaaacacgagacaaaacaatccatatgtttagggaaccagaaaagtcccctggtctgtcccttctttggggagcagggcctcgacagctccagctcccttgacctaccttcctccccgcaccccgcccccaccttgtgcccctgtgtccagccccccagggggcctgtgtctgtgtctgtgcctgtgtctgtgatggggagccgcctcgcacccctgttgtctgcttgtctctttgtgtctgttatcctgggcaggatggtcattctcaaaaaccctggggtcctgggccagagacaggcagggcccagtccaggggccccaggcctccccagtcccagtgtgcgagccccacttggacacaagtgttcagagaggtccccctctgccacttgacagggaccttcaaacctcgacagtgatgcaaggacacagagagtaccagataggtagcagagaccaaggcgcagggtgcttcagatgagcaagagaacccagtcgaaccagataccccaggtgggccggagggaccccagaccttcagagggctgccctggtgttctccacagtgcagtccctctgtattcccagagtgggatcggggctttcagccccaccctgatgcctgccctccaggatggctggtttagtctgggtccatgtcccagacccctctattctgctccaggacagcaggacttcaggtcttcctgggggtggatataggagaaaatttctgcctggcacacacctggctccaaccactgccaagtgatcactcttaggcccaggggaacacaatgactatcattactgatgcagacctggctgtggagagcagctaatgtgtggcccagagagcctgtctgtgtggagcacgtagtgcacagaatacgtgagagttgctctggcaggggcagaatcctcacaggatcgcctgggaggtgaggtgtgtgtgacccactggatgggagggcaatgagtgtgcacatacaaatggggcagtgtgcatgcaacacacttaggggaggagtggccccagaattcagcacgcacacaacacacaagggagagaacccccagatgagaaaataggaaggagcaatcatttgtagatgggtgaaaaaagaatgaggttcaagggagcgtgcaccaggtgaggtgagcgtgtgtgctctcagggaagggcccaggatcccatgcctgggaggagctgccagagagaagcaaaaaggcggctgtggatcgccctgggctgggcaccagtgacaggtcaggatctccaaacatggacgtcctcccctccaaatccagaagctcccagaaggtgtccttaactgcaaagctgtgcagggtactcctccagatggaatcaggaagtcgagacaccatcccaggtgtgtgtaagagagagagagagaacagggaggatacagaagtattgcagcccagatcccctatcagggggacagctggtgggcaaagcagccaccccacagccttgtggctagagtacagtggggtagaccctccagccccaatagccctagtacccagctggcagggttgcccacccctgctgtccacctgctccatcctctagggttccacaggcccctgaccgcacagggaggctggggccagcctggtctcccaggcctgaggacatgcctcccaccaaatgtcccctgctccagtcccactcctgtcaccccacgctctgcactggggagaaaacgggaggtgctcgtgctggccctgggtgggagcggggagtcctggtgagaccccggtgagatggaccatcctgcccccgtgggggatcccctttcccacatccgtgctgtgtcattgttgctctgcttcctttcaatgtgtcagtgcctggggggaggggaggagcaccccctcagccccctgaacctgaccaaaagccatggctgttgctcccccctttgtatgatgcaaatgctgaaatgtacaaaatcaaccatgacaacaaagaaaaagaccttgtacagca

SEQ ID NO: 6241 - DNA, 395 bp, Homo sapiens
aaatcaaccgcagccagagttgggactgggcttggggttccaggatcactctgcttccctgccttccagaatcaattcttcagccccaggggctgagtgttccccatggaccacccccccaccccccgcacacacacaccatctctgacaccccttcccccgagcccctctgggtgccgcttcctgagaatgctgtcaagtcgcacggtgggcagcaacctgtcctcattcattccccagacactgagggagacctactccccacgggccacgtgcagaagcctggggtcccaaagaaaggacaccactcagcattcctcccagacacaggcacttcccaggccttggtgaggagtcagaactgttccggaaccccctccacccttaccctcacc

SEQ ID NO: 6242 - DNA, 636 bp, Homo sapiens
aggaggaggaggaagaggagagcatcctggacacggtgctcaaatacctgcccgggccgctgcaggacatgttcaagaagtaaccaggcctcctgccccagcctactccacctgttactacttctttttggttctttcttttctttttattaggttaagtctcaattctgaaggggaaaacctcagttggcctctgcccctcttccctggccaggggcttctccccctcagctctccctcacacctcccttcatcccagggtatccacctgcaccccactcccaagtagcttgaaaaagggaggacagtctttccccagcaggggtcggggggccccctcaggaagcctaaggtcgtgctagtgtggtgacccccatacattcctccctgctccccactgccaggaggaccactgtccccagccagccaaagtaatgacacattccagccctgcccagcatgctgacctttggcctctaaccctcagtgggcccccaggtcagggcaggggcactgagtggcctggctctgaggaagggagtcaggggaagcctgtcccgggaaggcccaggctgagaggccctggctctggccaggctgggatctgggtgggaggctggggctcttcttcttcca

SEQ ID NO: 6243 - DNA, 2392 bp, Homo sapiens
gagggatggctcacgaggcttggacctggtggagggtgcccggcagacgtgtgagagggacggttcacaaggcttggacctgccatggagggtgcccagcagacgtggtgtgagagggacagctcacgaggcttggacctgctgtggagggtgcccagcagggggctgagctctgaggggtgggtgctcagtgcacgggtgcccccagtgtcctctgatcctgtccggtgcctcccccaacccccacacccatgcagaactcccaggtcacatgcacgtatgtccagggcatgggggtggcgtgaagaggcctggtcagggcctttaggggctgcaggacggaatggccgcctggggagcctgtgtggctgtgccgggcagccatcctgcattcccacccagcgcgcagtctccacctcggccccagcaaagcgctaagcagccggagagacagccagggcggcttcctgaaggatgtgggatggtggactccggggtcgagggaatacgcaggttcctgtccctccgggagacctagagaagctgcacacccaggagctttccatgacccgggagcatgagtgaatgggggttccagtttgctgaactttgccgtcttgtaagggtgggggctgacggccgaccctgggaggaggtgacatcgccgggggaggttgtgggcaacggtggaggaggagagacgggaggggaccatttgggatggaggggcctcttcagagttttaaaaggcgtttgtggggtggagttgagtgtgctctgggcttggacacttgccgtggtgcccctggctggccgaggagactggctctggccaggggccccgtcctgagaggtcctcagcgtctgactctcggccaggcgccagcaaggaggggccggtccccggggctaccaggcaggcacgtgcacatcgccatcgccacacgccaactccgcctgggttttacaaagtcgttgccttaatgcatgtggacaggaactccctgaggtcgccccatgccccctggctgtgccaggtacggacgccctggaccctgcgaacaggtggggcgggcgaggggcccaagggacgggctccagagacacgcgcagggcaggaggggtctcacggaggggtctcgcactgaggcgcccagagctggtggtcccgctggacgccatccctctgcccgggatccacacggcccacgtgtgcccgccatgcccgcgccccacgccattgcagtctgccatcctctggccgtgacggtggctgcagcttccccatttgcgccgttgcctctggctgtctgcacttttgttcatgctccaaagaacatttcataatgccttcagtaccgacgtacacttctgaccattttgtatgtgtccttgtgccgtagtgaccaggcctttttttggtggatgtgttaccccgcacacttcaatctcaactttgtgcaccgtccattttctagggatagacgcccagggaatgaactctagttttctaacagattagctgagatattaacttactcacacggacaggttgatgccagagccgtaagaatgcgccagtgcgggtttgcgggggacttcgggtgtggggtcctgcggccgcgatggccgtggaaggttctggggatccctgctgccacggggacgagttcggacgccaggtggacctgtgcactcagtaaaacgcagtgattcaacctggacggtgtgtggcctcctcactcccactgtctctgggcggccggtctgagggccggggacttctggtcgatgctggggctgagtcgggtgcggtgctgtggaccgggtgtggggacggatggtccctctcctcagggcacgaacgagctggggtgttgtgaaacagtggggctgggggccacagtgagtgaggagcaggggcggctgggtcctagggctctggccagaggaggggccgctgtggggctgctgtggtccctgggctctctcttggggcgccgagctctccctcccctctgaggcctgcagccacccagaaagatgctggggcctgggcctgccgctggggcacctgtggtccatcagctcgcccgggcaggatcgccggtcaccatgtgtccacttgggtacctcctgttgttggcctggcccccgtctgcttgtctgtctccctgcccccactccctgcccaaatcttcctctgctcatctctggcctctggacaagccctcctgttccccacgctcgctgaggccctcagctggggggctccgtggcgatcttgacatcctacctggctggccaggtgacgagcgccctgtagggtgatttatacccccacacagggtgcaggtgtccatccacgttgcccccttcctgccgtgatccc

SEQ ID NO: 6244 - DNA, 454 bp, Homo sapiens
aagctgcctggggaggggctacaaggagtaattgtggctttaggggtcgtggtgatgctggaatgtcaagcgccgtcgtggggtatccgactgtccgggctcctggtccgcagtggcagagcgccaggcagagcccaatcagggtctcgtgctgcccttccctcccacagcctggcagccatccagaggaggggctctaccagatgccaaggtgccccggtgtctgtatgggtgtccggttgggtcctgtgtttggtctgccctggaggtgctgggccctcctgggatgggtggctcagcctcgaatcccaggccccagcccaggcaggtgctgctgcctgttgtggtttcctggcccagcttctccttctccctctgcataaaatcacagtccgtgagtcttccagctgccaccacggctgggacacgctgggggagggctcctcccatgcct

SEQ ID NO: 6245 - DNA, 31140 bp, Homo sapiens
ggtgctcgtggtggcaaagaagtctcttgcagaggagcagtatcaggactttgaagtaagttgttctgggacctttccattgcctttgcagccccacctgcctcccagtcactccttccaccatccctcatcctatgcgagccattctgatgtcatttctgggcacactgggttcactgttgttgaaggcctttgcacttgccgttctgtctgcctggaactctcttcacccacagagccccatggcccatttcctcgcttcttttgggtctcagctcaaaagccacgtcctccaagaagtcttcctggaccacctgtctaaggctccttctcactttccatccatcataccatttcactttgttcattgcatttgtcactgtcatcgcgtgctaccatttggggccaaaaaatatgtctaggagttgaatctggagaggccagaagaatataaacttgaccctgttcatatatttttttttaacattcatcttatccatctcctttcgggaataaaatatttttgaagacagggactttacaagtctggtttgttcttcttattcttgttcttcttcttcttttttttttttttttgagacagagtttcgctcttgtcgcccaggctggagtgcagtggtgtgatcttggctcactgtaacctccgcctcccaggttcaagggatccttctgcctcggcctctggagtagctgggattacagttgcccgtcaccatgcccggctaatttttgtatttttaatagagatggggtttcaccatattggccaggctggtctcgaactcctgacctcaggtgatccaccagccttggcctcccaaagtgcagggattacaggtgtgagccactgtgcctggcctggtttattcttatatccttagtagttaaagatagtccttggcatatggtatgccttcgggaaaatttggcataaatcattctcttggagccctaatttcttttctctttttttttttgcacatttattctgagacggggtctcgctatgctgcccaggctggtctcaaactcctggcctcaagccatcctcctgcctcaacctccttgtagctgggattacaagtgtgagccaccgcatctggttcggctccctaatttcttttcttttttttttttttatttgtgacagagctttactcttgttgcccagactgtagtgccaatggcacgatctctgctcactgcaacctctgcctcctggattcaagcgattctcctccctcaagcccccaagtagctgggattacaggcatgtgccaccatgcctggctaatttttgtatttttagtagagacacggttttgccatgttggccaggctggtctcaaactcctgacctcaggtgatctgcctgcctcggtcttctagagtgctgggattacaggcatgaaccaccacacccggcctccctaatttctttaagctgtaaaaatgttggggttgaaccagattattgacttgcttattgtcatcccatcccatagattgtgtgttccctgaggggagggtcctcgtcttgtttactgccgtgtctctggtgcctggcctaaatccagcgtgcaggaatgcaagggagggaggcgggacacgcttcgtggggccctgccctgctccatgcggggaaactgcctggatctctctttaatatatttgagttctttgtaagccattatttaacaagcattttagccccgatcaatgctacctgccttttaattttaaaagcatgtgcttcaagcgggcccattagatgactggttttcctccaggtttttgctaacatgataaagagaagaagcggcagtttgggttgatggtcttcagaagctcgacttggtctttagaaaacctggtgacccacagtttggcttacaaagtgcatgttgtgtatgggagaacttactgtttttttgagatcttggttgtgcccgtccctgagacaacccaatgaggttggtgctgttattgccatttcgtggccacggctcagagaggttaagtgacttgctggaagtctcccagcaggtgagtgtggagtgtagggtgggactcaggtctgtgcagtgtctacatggaggacttgtgaggaagctggaagcctatgtcacccctgtggggtccagctcacctgctggggtcccccaccccgtgtggtggggatcgggtgtggcccttccactcttggcactggccagtcagcctggcctctcctcaccctaagcagtgactgcatctgctggtgtgtcccaggcccgctacgtccaggccaagctgagtgtgcacgaccgctccctcaaagtggccacggtgatcgagagcctggagatggagatggaactgctgtgcctgacgggcgtggaggaccagctgcaggcagatgtgcggcccacgctggagaccctgaggaatgctggcatcaaggtagggcgggctgcccgcagggaagggcactccagggcaatgccagttatccctcagcagtgcagggagatcacagggggaaagggtgggaggagcagcagaggacaccaggagtgccttatctgcaatgggccacaggcactgtttctgcccctccaactgtgattttttttttttttttttttttgagacggggtctcgctgtgtcgcccaggctggagtgcagtggcatgatcttggttaactgcaacctctgcttcctggattcaagcaattcttgtgcctcatcctccctagtagctgggattacaggcacgtaccaccacgcctggctaatttttatatttttgtagatagagggtttcaccatgttggccaggctggttttgaactcctgacctcaggtgatctgtctgtctcagtctccgaagtgctaggattacaggtgtgagccactgtgcctggccctccagccctgattttggaagacatcttgtgtagcgtttgcctttactgtaccgatgactcccctgactccactgggctccctggtgctcaaggccgagcagtgtccagcgtgcatggctgctgattaaattctagttgagtgatcagcacgccggtctgtctgccgtgtggccaagtgagtgagtgaccacccagcagagtgaccgtcagcgccatcacactgtcgtattagcattttgcactctaccagtggcgacccaaaaaaaaatactaggagttgaatctggaggggccagcagagggcgcgtgaggacctggtcctcagtggaccaagggaggtgtgaacaaccaaactcattggcctggagctcctggaaacgtgtgcctgccaccggcctccactcaaaagtggctctctgctgcatcctggggcctgtcctttcagcagggccatggcaggaggacaggttagatgccaggcaacattcaggcccactggggactcccacccctgcgtgcctgtttccttgtaaacccaattctgtcgcttgcatttggctcacaggcctggttcgtcataaggaaatcaccaacgggaccttgcttccggaagtctggccgctggaggcccatttctgcttcatcgtggggtctgcagtggggccctggccattcctaagacttctggagtttccattttctgcttccatctttgtcctggggtttttctccttctcaaaactatgttagcccaagacgagatattttattcacagagtgtgcatgtgacttaccattctagtttcctgttagatgacaggaggaggggagtgcctgggatggggcaggttagttggtaattaaagtctaagatacgatcttgcacaggaaattttcttttcttttctttctttctttctttttttttttttttttgagacagagtttcactctgtcgcccaggctggagtgcagtggtgcgatctcggttcactgcaacctccacttcctgggttcaagagattctcctgcctcagcctcccaagtagctgggattataggtatgtgccaccatacctggataattttgtatatttagatatttagtagagatgggttttctccatgttggtcaggctggtctcgaactcctgacctcaagtggtccacctgcctcggcctcccaaagtgttgggattataggcgtaagccaccgcgcctggctgcacaggatattttctaaatcagccccttgtatggatgtagaaactgaggctaagtgaggcgtctccattccccaggttctcacattgggaagcagcagagccgggactggagctggggtcttggacccttcctgtagtaccttgccttcatcacagcatgggacattagccatgtcgtgcacctgatcgttcttttcatgcttttctggaacttgaacttcccaattccttccccagtgtttgttctcttacctcaaaccctgagaactatgactaaacgaagctcaccaaaaagaatattatttttaggacaggcgggatattgagggaaaacagacccagctaggggagagggcccgggaggctcagccctgagaggtgcccggtgccttccttctgcccgtctcactgcctgggtttccatcctacctctccctttacttcttctgtgacccttggcaaatgactgaagctcttagcgcttccatttccagcctccagaagctgtcatgaaggtaacagagagctcagcgtgggtgctgggcacgtagtggacactcaggagacaattgtcatgatcttctttcctatactttccctcctatccagattttctttgaccgatagccccaagactgctcccagctgggagcaaagagaacaaaagggttaatgaggtaaaatcacagagcaggaagcacattccatgaggactctaaagacccggattctgggcctggttaggacaagaggtagctgtgtggtttggggcaagtcatctaccctctctgagcccacagcagagaaatgcagtgtgagctaatgcacgatacggaagaacctgactcatttacggtcagcgttttataagctgagttaaaccccagaagggtctgtcttgctcatccaactacatagaaagtccacagcgtcaaaaatgagtgtttcctgtaggacagggaagtgccccctcacctgtacagcctttcccttcttttaggatatttatcactttaagaaaaatcctcagaaggggaattatgcggtccaaggaccgagcttcatagtacctcctgtagtgtgtggccaaatggccctttctagaagcatctgccagtttttgctgctaccagcagtggttgcttggagtcccagagcccttcagccagggcgcttgctgtgttgtgttggggacagcatgagtcggcaggaggtaaacggaacataccaagttcagctccatgttgttggaaactcagctgttgcagatgacaggccggcctcaaaaactaataaacaggacctctgtcacgccatgatttcaggtttggatgctgacaggggacaagctggagacagctacgtgcacagcgaagaatgcacatctggtgaccagaaaccaagacatccacgtttttcggctggtaaagtgtcctctgcgttagggccatgtggggatgatgttcgatttgtcctataacctcctaaccttgagtgggccccttaagaagggaggggcagcatgtgaattacctagggtggggagcatcaaccacggttgctttggatgggatgattaatgacccaggcgccggctggagagtttcttccagtagtggtttgggagtacctccttctagccctgtgctaatgccatgctcttaaccttttgggggtcgtggtccctttgagaagctgatgaaagtcaggcactccccccgaaagatgcagatccactcatacacatgaaattatgcatgggattcctgggatttcacggaacccctgaaagtcaagtccttggataagaaagaaattccaggccacagatactggtccatctgccctcctgagaggggaagcatttaggaccattgaggagccttttgaaggaggtgaactggatgggcaaatgagaaatcgcccgcccttgtggcagacattgaccaagacaatgtgcacatcaggaactgctgccagtgaggactgtgctaggctttattgcattggggaggtagggggaccgggtcctctttggggcaggatatagtaatcccactgatctgaaaccagagccacgatggcaaaccactggagggtctctagatgtttgggggtctcgccctcaccccgcctttggtccatagcacacagaagcttcaaaaaatccagggatttttgaaatagcatagtattgtatagaggcaggtacagtcagttctcatcattcacagattctttgtgaattctcctcctcccaaaatttatctgtgacctccaaatcagtactcttgatattttcactgtcatacgtagagtggcttaaatctctccttttttttttttttttgagatggggccttgctcttatcacccaggctggggtgcagtggtgcaatcttggctcactgcaacctccgcctcctgggttcaagcaattcttctgcctcagcctcccaagtagctgggattacaggcgcctgccaccacacctggctaatttttgtgtttttagtagagacgggtttcaccattttggccaggctggtctcgaacccctgacctcaggtgattctcccacttcagcctcccaaagtgctgggattacaggcgtgagccaccgcgcctggcctagagtggcttaaaattttagctgcctgagacacacattcccacctgaggctgaacaagctcacgcactcccccctcctttcagccccgtgtgacgaaccagtgtcgtttttgcagtccatcgagtatccggttttttgcatttttatgctttttgttggcagtttgtcgtttaaaatggccgcacacagcgcttctttgctggcttgttttctggaacttgaacttcccaacatccataagtcacatcaacaggaaggctgttgatgtgacttatggagcgaatgcgtgtgttagatgagcttcctgcaggcatgagttacagaactggtggctgtgagctcaatgttaatgaatccaggtgtctttaagtagaaacgcacataaaataaggttatatatttatgaagatattgcaaccaggggcaaaaacctaaccctgtatttcccctacaggtgatggtttagtatttgctaattcagtgttcacagtgactttagaaaacatagctactatgaataatgagaattgactgtctgttctagaattcagggattgcaaactaatgacctatgtgctagccacctgtttttctaaacagcaggtattttgttttattggagtgtagacagaccggctcgtttgcatatggtgtacgactgcttttggattacaacggcagagctgagtggttgtgatggagaccatgtggtcctcaaagcctacaatagttaacatctggtcctttacagaaaagtggcccagtccctgctaggtgcctggctctgcatacctgggctacagcatactagccatgtgcctttagtcaggttagcagatgtcaccatgcttcagtttccttaggtgcaaaatagagcttcttctttttggcacctcatagagccgttgtgagaaataaatgagaaaaatccaccgaatgcatcatccaacacctggccgaaaatgaaagtacaggctttttttttttttttttttgagacagagttttgctcttgttgcccaggctggagtgcaatggcatgatctcggctcaccgcaacctccacctcccaggttcaagcgattctcctgcctcagccttcccaagtagctgggattataggcatgtgccaccaagcccggctaattttgtatttttagtagagatggggtttctccatgtgggtcaggctggtcttgaactcctgacctcaggtgatccgcccacctcagcctcccaaggtgctgagattacaggtgtgagccaccgtacctggccccccccccccttttttttttttaaaagacgagtcttgctctgttgcccatactgccagtgcagtggcatgatctcggctcactgcagcctctgcctcctgggttcaagtgattctcctgcctcagcctcccaagtagctagaattacaggcacccaccaccatgcccagctaattttctatttttagtagagagtgggtttcaccatgttggcaaggctggtctcaaactcctgacttcaagtgatctgcccgcctcagcctcccaaagtgctgggattacaggcatgagccactgcgcttggccagtacaggcatttttagtcctgggggaaattgtaggtggtggttggcacatgggctctcttgattcctgcagagtcaaccaataggattccatttggtgctgcctctggtggcaggggaggggagggacccttggctggggtggccgttgtcttcatgtgggctcctggaagccactgtttgttgttctatcatgtccggagagcaatgcctccttccccatctctgttcccttccaggtgaccaaccgcggggaggctcacctcgagctgaacgccttccgcaggaagcatgattgtgccctggtcatctcgggagactccctggaggtgagcttggggacccctgagagccagtcctcccagcagcctgggtcttacccggcttcggcaggggcactgcaggctcggcagcgacctccaccaacgcaccacctctccctccaccaacgcaccacctctccctccaccctgcaggtttgcctcaagtactatgagtacgagttcatggagctggcctgccagtgcccggccgtagtctgctgccgatgtgcccccacccagaaggcccagatcgtgcgcctgcttcaggagcgcacgggcaagctcacctgtgcagtaggtaggcgaggctcaggctgtgctgctggccctggcctgccggtgcaccaggctccctttccctaaggatatttggacactgctgctctttcttcaaattccccaggcccctttgttcaggtcatgatttttctccacctctcagactttggctctttttgttattatttttaatatttcccttggagagtagataagcacgtgccaggcctctactcctttgccagtggctcaagagtgcagccttccagggggtggagaccacacactgtggggttggatctgggttcaaatctttccactggcctttgccagtgggtgccccaggtggcttctttcacccatctgagcctcggtttgcttatggtagaatgggaataataattgtggcttccttaaatggtgtcatgaagactaaaaggggtcacctttttttttttttttaagacggagtcacactctgttgcccagcgggagtgcaatgacacaatctcagctcattgcaacctccgtctcccgggttcaagtgattctcctgcctcagcctcccgagttgctgggactgcaggcgtgcaccaccacgtgtggctaatttttgtatttttagtagaaacggggtttctccatgttggccaggctggtctcgaactcctgacctcaggtgatctgcctgcctcagcctcctaaagtgctgagattatagtcgtgagccactgctcagcctaaaaaggatcacctttaaaatgtgcttgccacgctgcatggaaagcgtccagtaagagcactacaagttgctgctgatggtaatcctggggtatcccggcctccgaggaggacaggtggtggtaaatgcctatgtggacacagtcccactgctgctgctcagtgccgggacccttggcaagccgcctgggctctctgacactcagccactctgcctgtgaaacaggatcttggtagtcaaggggttggagagatggaatggacggggcaggccaggcactcagcaagcgctccgtgaaagacgagagtgcggtaaagacaagcatacattcttggttaaggtaagaatgaaacatcttttctctctggtctgtgtggctcgcaggggacggaggcaatgacgtcagcatgattcaggaatctgactgcggcgtgggagtggaaggaaaggtgagagtgtttccctctgctcggctccacttgctgtagtttcttggttctttttccctcaaagacacagctttaagccttctggaaattccagataaagaatgataaaacataaggaatcatgtgtcacagttaccttgtgtcactgggaagatagaggtctgtattgctacatcttacagacagatgaatgttggctttttgtttgccacgacctgaatttaaaaaaagaaaaagtgtttctaggcccggtgtggtggctcacgcctgtaatcccagcactttgggaggctgaggtgggtggatcatcacttgaggtcaggagtttgaggccagcctggccaacttagagaaaccctgtctctactgaaaatacaaaaattagctgggcatggtggtgggtgcctgtaatcacagctacttgggaggctgagataggagaatcgcctgaacccgggaggcagaggttgcagtaagccgagattgcgccactgcactccagcctgggcaacagaacaagactctgtctcaaaaaaaaaaaaaaaaaaagtttctctatattcttagggtatggtaagtatacttcagacttctctgggacagtcagcgttgtcagtaaaagcattagttatcctgctctgtgctgatctcttgggcgctatggaagagtgtggcttagttcacttctcaccaaaaggccttggcaggtataatttttaaaagttggtgtgttaggaaatattttttctgtctttttctccttgccaattgtgcgcttgcctcttacagtttactcggccctaatttgtgacctctaaatgacaagaggcaagaagatgggtcaccgagtttgttaggactgtgtgtgaagggctggaagcggtggctcacgcctgtaatcccagcagtttgggaggctgaggcgggaggatcacttgagctcaggagttcgagaccagcctggcaaacatggtgaaaccccgtctctactaaaaatacaaaaattagtgagatgtggtggcacatgcctgtaatcccagctactcaggaggctgaggcaggagaatcacttgaacccaggaggtggaggttgcagtgaatcgagattgagccactgtactcttgcctaggtgaaagagcaaaactccatctcaaaaaaaaagaaaagaagtgtgtttgaagtataggagtgccaaggcccggagggggcagcagagatgctcccctgtccatcctgttgcatagcttcatgactttggctgacccatagggctttttttccccctctttaccaccctttctggttctctggttctcagcaagatgacgatgatttaaagttgtagagtgaaatgatttttgaatgagatatatcagaagtctgtatagattccctgaatacagtttttaagaagcatgtttttgagtttaatggcattctctaccagttcttaaaaaattaaagcattttcccttctattaaaaatggtattctggttcctttgtttcttgggatataaaatagtgctcactataaaaaattaaaagaatctaggccaggttcagtggctcacacctgtattcccagcacattgggaggccgaggtgggcagattacctgaggtcaggagttcaagaccagcctggccaacatggtgagaccccgtctctactaaaaatacaaaaattagccaggcatggcagtgggtgcctgtaattctagctactcgggaggctgaggcaggagaattgcttgaacccgggaggcagaggttgcagtgagcggagattgtgccactgcactctgggtgacagagtgagactgtctcaaaaatatatataacataaaataaaagaatctagaagtaaaacgcatcttttcttttaggtaactgcatcaaatgagtaacactggttattctctcaacattttttctgtgtgtatattactggttatgagtgtgtatatatttgctatctatacaaatatcttacacatgtatatatatgtaattttcatgtatttttttaaattgaaaacacactgtacattttgttgtgcagcttacttaaatctgctacatcatggatttgttcctacatgagagcatacagagccatcacttcttactctgactctacctttttattttgaaaaatgtcaaaagttgaaatacaacaatggaaaagttgaaatagaacagtgagcattcatctacccttcactttggccaattgttactatttgctacattatctttctttctttgaatcagtagaaagtaaattgtatgtaatgttacccctaaatatttcagctggatctctttagaacaaggacattctcccacacaaagaaagtaacatcataaccacgccccaccccccgccccgcccccccaggcacccccaccccatgtaacatcgatacaatgctactatataatattcatgctcaaccccgtgttaacattgatatataatggtactggataatattcatgctcaaattcccccatctgtcctctgagtgtcttcacagcttaagtaataaaagctccaggaaggattgcaaatcacatttattagcatgtcctcatgtttctgatcttctttattgtagaacacgtttctctctttttgtttggtttggttagcgggtgttttgtttttcatgtcagtgacatttttgaagcattcaggacagttgtagtgtctcacggcacacagttcttgaacccatcagattgattcggttccaattctggtttggcatgagcactgtacaaggggaattggtgttcttcctgttgtgtcgtatccagaggctctcatgtccctctgtccctttattgctggctgtcactgccttttaaaatgagagaattcggccaggtgcagctgctcatgcctggaatcccagcactttgggaggctgaggtgggcggatggcttgagctcaggagtttgagaccaaactcggcaacatggagaaaccccatctctaccaaaaataactaaattagtcaggtgtggtggtgcatgtctgtgctcccagctgctcaggaggctgaggtgggaggatggcttgaacctgggaggcagaagttgctgtaagccaagatcacaccactgtactccagcctgcgtgacagagtgggacccagtctcaagaaaaaataaaaattaaaaaatacaaaatgagagaattccattatatggttgcactgcaagttattcccacttctgtgagtgtgcagagctgtgtattcaggaatatcctatctaatattgttagtagctctgggtttttgcctcttgtttaattagctcttaagggaactgaatgttttaaaatatctatttttaaatgattctttgctacttatggggtgggctgaactcccaaagtattagatccacttgacgtccaaattataactatatgtgattcggaatggtttttatttaaataaattccccttttaaaatcaaatttagacttggaccaccaactgcatatagcttgaaaccaaagaatttctttcttgaagttcttcaaagatttcctacaatgtcttgctttttcagtgaaagaaaatgtgtttgccctgacctcttgtgcttctgatggtgcctaattttattggattttaggaaggaaaacaggcttcgttggctgcagacttctccatcactcaatttaagcatcttggccggttgcttatggtgcatggccggaacagctacaagcggtcagccgccctcagccagttcgtgattcacaggagcctctgtatcagcaccatgcaggtgagtggacagctggcccctctgcacatgtgcctgtggctataccatgtaggtgggtgggcagctgctccctctgcacatgtacatgtggctatgtaattatcatggaaaaagcctgggaattagattatgctttggagctgtcacccctacctcgccagtttaaatcccccacctggctgcattccagctgatagaccttgagccagtccctgaacttcttggtgctcaagattcctcccctgttaagcggtgctggtcattcctgccatgtggtgaggatgtgtgcgttagcagtggtgacatccagtgcctggcatggggcaagtggagtgtacatgagttattttaattgtgggtacgttgttataatttgtttgctggagtgaaagacgcagagttaaatgctgaatgactattcaggccctggtttttcaccttttgcagaggtaagggccatcagagaacaaccactaaagaagaatgtactttgcttgtgtgcctcctgtaccttaggcatcaggctaagtgttgacaatgcagtgtctcacataagcctcacaatagcctgagcccattttacggatggggaggctgaggctgaatatggatgagaaatttgtggtgtcccgcagggattcagtcagctcaggcaggtggacctcaaagcctgcagtcacaatctgagtaccttcttgatacactcgtcatggagggcctgggaccgtgtccacttgcaggggtcagcatgacacttggcactgagattgactcagcatcacggttctgtcttccagcagagcctagtaggggaactgagtttaattattatgatcacgaatacccttggaagttaacatcttgttcccatcttgctttttcataaaaggattctagagtatatattttctcaccttctctctcacaaacttcttcaaaatctgtcatcataggccaggcgcagtggctcatgcctgtaatcccagcacattgggaggccgaggtgggcagatcgcctcaggccaggagttcaagaccagtctggtgaacgtggtgaaatcctgtctctactaaaaatacaaaaattagctggacatggtggcatgcacctataatcccagctacttgggaggctaaggcacgagaatcacttgaatctgggaagtggaggttgcagtgagctgagattgcgccactgcactccagcctgggcaacagagtgagactccatctcaaaaacaacaacaacaaaatttgccatcagtctgtagcaattaagtgtggagtagaaaggaggccaaaggagggaaagaaaatatttttggtattaaaaagctattgattgtcaatcttcctttttgggcattgaggtgaaaatgctcccagttgagtggtgagaatgtaggtacagtagatcctggaactcacgtctccttctggccataccattaaggatctgtgagaccttgagcaaataactttactactctaggcctcggtcttcccacctggaaaacggggatgatgagaccctccttgccctcggacagggccactgtgaaaaacagagacgtttttaaggcatcagtgctaaggcatccttaccgtgattagtagaagtgaaataaggtaatatgtaaacatcaggtgatattttaatttgtgagaatgtttaatcatacttgaaaggcggtctgccttgtacaatgtatcaggtagtgctgctttgggtacatgagaattttccgtccactggctacaccccagttttttgggggtgattttatgttttaaatatctattgcaattgtgagtaggggagcctgaaagtgactttcatcaaaatgatctaaacccaaacagctgctgtggttcaccagaccacatctgtacttttatgttaactcaccaattgaacaggataatgctgtggctttaatgattgggagattaatcagcccgtccttggactcatacacaaaagctggccgggatgagctgacttcttcaaaaactggatgttactgttaacattgatgtagaaaaagaattccaggatgaggcattgttctttgtgctaaagaaaatgcctttaacccctgtccactgtgctgaaaatggccgagagcaagtcccagttagaattgcaccgggacatgagtctgtcagagaacacagtgtttttatttttcccaaagtgctcttgtcgagatgaagactttgtggttaggatgacccttttagaggaaggggctcctgatactggtctggaaaataaacaacagattcttgacatttttacaaccatccttcctaagcagcggcacagcctgggtgaaaagtcactggaaaagtggcttttccggcgcagccagggcgaactggggcttcctgtggccatggcgctcaggatcacctgcgctctgagctctgtgccgagaaagcacgtgtttcttacatgctttctctctgtgtccattgaaggtgctctggggagctagccctggtctgatgctatttctaatgactagggtatctctgccttgctttcttctgctttctaaaagctttcaggcagcatttgtctctggccttccttcagctttatatgaatggatatcagcttggagaccgtgtttcctctgttagcccatagaggtccagagatggagctaacagagcttcaagcctgattggatctccccagcctattcatcattaccagcagctaatattttccaaagcaggaagcagacatttccgcgagggtttgtaaatatcttcattgcttttgtctaattgcaaaaataatctgtcaccatgctcttttcaaaaatttccccaaataccgaaacatgtaatataagaagtgaagccttttctgccatcccagcccccgtagacacttcagaggctctttttctgtatgtgtttccatacctacggcactttggttagcagcgtgcatgcctacagaggtgaggattccgagctgtttagaagtgtggccacagagctgtggccacagctgggcttgagtcccatagggctgtttacctgctcagcctccccttctgtaaagtgtgggtgatagtagggcttgatcctgtgggctgctctggagatcagctgtgctcatgtacaaagcattcctgggtcctggaacttaataaatattcacaacaggctgagtagaccctggagctgtgatacatcaccctacccgggaatgattcctagatttgctgcttaggaactgtgtgggcttgggcaagccacgtaccctctctatgcctcactttctgctttgcataatgaggatgatgagaatcgtacctacttcatagggttgttgttgatgttgtgagaatgaaatgagcaaatccatgtaaagtaccttacagcagtgccggcgcgggtgttatgtaagtatcaggtgttatttttattctgtaaatgtaagggattttgtcatgacttttggtgacatcctcctctctccttggcacaggctgtcttttcctccgtgttttactttgcctccgtccctctctatcaaggattcctcatcattgggtaaggaaatcctgccaaggaattaattgtttacaaaaccttcttcaaatgctgcaacagagagaagaaacgtggtggaaaaattcttgggttcccaagccacattggattcccagccccagcgaatgcaggcccagcaccatggtttagaacctccttcaattaacaaggttttgagctgttaagcccttaaccagatggaggaagtggagttggagatgtgtgtggtgtgttgcactttgccatttgtacctggtcttgaaaaaatactccagagttatcagttgattgaggagagcaaggtggaaggtttgcagacttggtgatttcactggggtcttaataaaaaggggtgggggatctgaaaaatgccctcctggcctgaactgagcccagtagaagtcccatccttggagctccagggagggccagagtccactgcctcggggatgtgcaagtaacagagcttggctgctgtgccacagtgacagagatggtgtcacttgggcctttgcagcctgcaaacccacccccattactgacctggaacttcaggatgatccttctgaccttttcagagaatgtgctcagtctctgaatcacccaggtaggtggagtttggttaccgagtgccctagatacagacacatgcagctgaggccacttctggttatgaggagacggcgggtgcgggaaggtcagctgcgctctggagagtctcacagagtccgctttccatcctactgtgttggctgatgagttcagcctgagaggaggcactagaattctgcctgcttctaactggaaaagcgggctgtctttcgtcgggttctggaagagtacaagaacattacagaatatagtcaggggttccctgagctgtgcgccgtgcgaccttccgtggtctggtcccatctttcccgtgggtcctcatttcctcttccgtcgccctcagccccagccccactggccttatggctgttcttcagacatgacagccactcccgcctcagtgcctttgcactggtggttccttctccctggaatgctcttcctcctgggattggcttggctggccctcaccttttgtgggtgttcactcaaatgttctgttcctcagcctctaaaattgtaccatcaccccctacacacacacacacacacacacacacacacacgtcttatttcctctaccccattatatttttctctttagcacttctctaacacacatagagtttacctaatttatttgtttattgactcgctgaccgggatgaaagctcttcagggcagacatttttgtccatttttgctcatgggtttctggtgcttacagccagccccggagcataatagacaagcagtaaatatttgttagaggcatggttgggacttgggtgccggaggctggcacagcacatagctcctatcgcgtcagccaggtcttacctatggcggttttctctcccaggtactccacaatttacaccatgtttcctgtgttttctctggtcctggacaaagatgtcaaatcggaagttgccatgctgtatcctgagctctacaaggatcttctcaaggttctgttagcttttcagtccctccttcctcctttcctcctttgcttttcccttccttccctccctccctgctttttttctttgaatttatttcacacagaccctccaattctgatttgaacacacttgaactggtagcttttttacttttggggggaaggtgtgggagtttacattttttcttaaagcagtaatatattcactggtataaagaacgtgaaaaagtacagtaatagataaactgaaaacaagccaactcacgacttgcaaaaagcccctgacagttccgctttgcagttgcaacttaacgtttgctcccagagatgttcttgtgtacagttccaaaaagtgtgtgtggtggcgtgtgcctaggcaggtgtataattttatttgtcttcagggttttttacccaagggaaggtttattcccatgtaatgttaattttaatgttaattctttttttttttttttttgagactaattctcactttgtcacccacgctggagtgtagtggctcgatctcggctcactacaacatccacctcctgggttcaagcgattctcctgcttcagcctcccgagtagctgggattacaggcgtgcaccaccatgcctggctaatttttgtatttttagtaaagaggaggtttcaccatgttggccaggctggtctcaaactcctgacctcaagtgatccacttgcctcagccttccaaagtgctgggattacaggtgtgagccaccatgcctggccaattctttttttaaagaaataattcctccaatgtgttcagatgtgtgcgagccactttattgatgaagacagatgggttgccttatctcgttagcgggagaataacgtgaaagctgatggcatgctgcgtgagccccccgcgaaaccggctctaacctttctctgtctctcattcagggacggccgttgtcctacaagacattcttaatatgggttttgattagcatctatcaaggtaaggatgagtggagacacctgtttgtcttgtgctctggtactgactcagggtgtccccttcttgcctgtagaacaagaagagaagaaacgaatctgaaatagcaggaaggagggtggcagtgggacccaggggagaccctgctcaccctgtataaggacttgaacatcagacatgcacagtgctgctgtgtgagaaatgaggtagtgaagccagaggaaggcagtggacagtaatcaaagcctgtggggctgctccactcatgaggcaaaaagcagatgctttctgggatgttctgaaaccttttctgagagtcaggtcaagtcgtagttttggaaaaacatgtttacctcagtggcctccagaggggggtcttcccagactgtggaggcgttgtaagatgacctgttggaatataagaagaaaatagcaaaacttctgtttgtatttatttttcctaactcttttaaatttacatatatatatttatttatttatatatttttgagacacagggcaaagccaccatgcccagaatccttttttagtatttctatttttatgtatgttttgtagtgcacataatagattttatatacttataaaatatattttatataatatgtagaaacagagtgagaccctgggtggcggagggtctcactctgttgcccaggctggagttcagtggagcaatcacggctcgccgtagcctcgacctccccaggctcaggtgatccccctacctcagccttctgagtctgggaccacaggtgtacaccaccaccaaatcagtttccaaatcagttcatttcttcccaatggactgtgagccacgagtccctgcaggtccagcaagatgacctcatgctgtgctgtggatcctgtcgggtgctgacacaggctttaattcctgtctagaaacctgtttctagttcagcatcttagactacaggtgtacaccaccacacccggctaatttttgtattttttgtagagatgaggtctcaccatgttgtgcaggctgatctcaaactcctggactcaagcaattctcttgcctcagcctcacaaagtgttgggattacaggcatgagccactgtgcccggaatcctcactcttttttagtatttccatttttatgtatgttttgtagtacatataatatacatgtgaaatgatcctaatatttctatatatctggacaggtacacatatataacttacaaataaacatgtgtatttggggattattattattactattctgagatggagttttgctcttttgtccaggctggagtgcagtggcgccattttggctcactgcaacctccgccttatggtttcaagcgattctccggcctcagcctcccgaataactgggattacaggcgcccacctaattttagtatttttagtagaggcgggggtttcaccatgttggccaggctggtctcgaactcctgaccttgtgatccgcccaccttggcctcccaaagtgttgggattacaggcgtaagccaccgcgactggctggggtttattatttttttaaaaaataaatttactgttcatgtctcctattggggtttattcttttttttttttttgtaacagagtcttgctgtatcacccaggctggagtgcagtggcacgatctcggcttactgcaacttccacctcccaggtttaagaaattctcgtgcctcagcctcccgagtagctgggactacaggcatgcgcttccacgtccagctaatttttgtatttctagtagagacagggtttcgccatggtggctagtctggtcttgaactcctggcctccagtgatccgcccgcctcagcctcccaaagtgctgattacaggtgtgagtcacgacatcattttattttttatttttttgagacaggggctcactctgtcacccaggctggagtgcagtggtacaatctcagctcactgtaacctccatctcccaggctcaagtgatcctcccacctcagcctcctgagtagctgggactacaggtgcatgccaccatgcctggctaatttttgtattttttgtagagacgggctttcaccttgttgcccaagctggtctcagactcctgagctcaagcaatccacccaccttggcctcccaaattgtgggttttcaggcctgagcccccgcgcctggccgcgactccatcattttaaatattatatttaactttctatttctttcatcaactctagatactcccctccctgccttacttccttttttctccctttttctcactttgtagttaaagattatttatcctacaaggtcaaagaggaaaatcagaaaaccataggttcagacctgcataaagcaccagtcattaacctcatgtaacaagtgatgcctttcatgtctaaatgaaaactgcggaaaggagccaggtgtaggcgagcagcgcacggctttcgcagggagggtgaggggaatacccttctctggtgtttgcagggagcaccatcatgtacggggcgctgctgctgtttgagtcggagttcgtgcacatcgtggccatctccttcacctcgctgatcctcaccgagctgctcatggtggcgctgaccatccagacctggcactggctcatgacagtggcggagctgctcagcctggcctgctacatcgcctccctggtgttcttacacgagttcatcggtaagacccctgaatgcttaaaccccgtccgtcacccccagtgaatctggcccagaggtctcactgccgtatgaaggaaggggggttcccagcgctcggcctgggctcttcctccagcagtccttcccgctcagctgtccacgttttcttaacaggtgttctctagggacaggtggtagttgtgcctcagggtgtgaaattgaggacagagggcgtgattgcagtagacagtgtttttgtttttctttttgagtcggagtcttgctctgtcaccttttttgggccacaaaatctttttgttcccatgaaatcttaatctgaagtccaatctatgaaactgataaaaggggacttgtgatagcaaagtggcagtgctgggaggtgccgagccccagaaccttgcccgtgcagccctgccttgctgctgtgtcctgatagagctcctgagggactccagggatctcagaatacaatctgctgctcctcacagcaaaccaagtgctgaaggtactcgccagttccgtagacgtgggagcacctgccgtgtgccaggattatggtggcagatgaggtggacgggctcgccagggagctgcccttctcgttgggaacacacgataaacacacattaagtgagtgtgagcacaggaatatcagatgtgatcaaagttaccaagaaagaaaaatggggtgaggtgctagacgcccaggcacaccccaaataaaaaatgttatggaggccgggcacaatggctcacacctgtaatcccagcattttgggaggcagaggcgggtggatcacgaggtcaggagtttgagaccggtctggtcaacatggtgaaaccccatctctactaaaaatacaaaaatcagcagggcgtggtggcacacacctgtagtcccagctacttgggtggctgaggcagaagaatcgcctgaacccgggaggcgaaggttgcagtgagctgagatcacgccactgcactctagcctgggcgacagagtaagactccatttctaaataaataaataaataaataaataataaaaaatgttatgggaatgtagagatgggggagtgtcagcaccatcctaatgtggggtggtggcagatttctctgacctcagtagtgattccaggtactcttgggcttgtccagcgtcagccactgtctctagatggacaagcctggtttcatcactcttccatgctgacctcacttgctttgccatatcagttaatttcttcccaattgattgagccacaagtccctgcagggccaccaagatgaccccatgctatgctacggaccccatcgggtgctgacacgggctttaattcctgtctagaaacctgtttctagttcaactagaacttgcaacacgggcacggttcagatgatccagcattttctgtgttgtgctgtggatagattctgaactctaatcttggtttcccccgcacggggcaaactcaagccgctatggctttggaacctcagggccaggggtcatcctgaaagtctagctggtttagcagacagtcctctttacacctctttcctcctcagtaggagcatttaattttctgtctgtgttattcaaacaaaaaaccctcaagagtgatactgtttctcctttatcagctgggggagcagggcccggaggctgcttctctgctaagaagctcatgtgtgttcaggattgcaggatagactctctctgggggaaactttcagttaatgacaaccccctcacgccccatcctccgtgggaaacctgcagggcccaggctctctagcaatggcccatcccttgctcctttacctcaggccttctcagtgggggtggtgtggaccccaccgcctggggaacaaacagtggtctttggtggggtgtgaacaaaccctaaccttttacgtataaaggagatgtatatataatattataaacagatacacagtatacctgtgacattaacatgtcatggaggtggtcaattaggagaagaagaaaagtctaaaaatgttccttaaggggcaataacaacaaaaaggcagagaaactcgaccttaccctggaagcatctttgatcgcggctcttttgccagcttccaaagctccttaggaaggttttagtaaaggtaaaagaaacatcccctgaaaagtaaaggtttcacagttgcagccccagtttctagaaaggatttgtgagcatttactgtgcgctccaggaactaaaggagcatccctgtgaacagtggagttttaaagcagtttcacccttgtcactagtctctagaaagcgttttgtgagacctagtatgtgctcaaaggcttgggcctgaggtggtcacagagatgtggcccctgctcaggaagctcagcttgtttgtgatagggacacaccacaggaccgggtcagaggtgtaggaaaaccacagggtgagttgagccttgggcctggcacttagtaggtgctgcctcagtggcagctgcatttcagcatcctgtgctcagaaagtggagaaggggcttattctggcttctgctatattgaaagccacaaactgtcactcctctcttaagaaaacctcataaccgggtttataatcctgcagcaggaaaggcagtacgcccgccccccccaccttccatcagagtccctgagggtcagcttaagcctttctctgacaagggggtctgaacactttgcaccatgacccagactcatcctgtggctttctgcgaccatcactggaagcagagggtgcatttgaatgtcattttctgctcgccagtggccgggacttagaaagactctccaactgttagacaacaccaaatcaaaagcatctctgagttttcttcccctgtaattttctttccttctttttttctcttttttttgagacagtgtcttattctgttgcccagggtggagtgcggtggtgcaatgttggctcactgcagtctcaagctccccgggctcagatgatcctcccacctcagcctcctgaacagctgggactataggcatgtaccaccatgcctggctagtttttgtattttttgtagagacagggttttgctgtgttgcccaagctggtctcaaactcctgggttcaattcttctgcccgccttggcctcccagagtgctgggattaaggcatgagccactgcatctggtggcccccatagttttcttctcctgggtgttaaaagtagcatttcactgtcaggaagctacagaagagagagcgaggaaaatcaagctgcggcgctgtgtgctcttagccatggtaccttcccttacagtccatggagaaagagggccaatgccaggaggctgtgggtttgtgacgggagatgactttccctttgatagttgtgacgcctgtttctggaccccatgcaccttccggaatattcctgcctgctcactgccgtcttcccctttccttgcagatgtgtacttcatcgccaccttgtcattcttgtggaaagtctccgtcatcactctggtcagctgcctccccctctatgtcctcaagtacctgcgaagacggttctctccccccagctactcaaagctcacatcataggccgtgcgttcgctggagggggccctggtcttggcgcttccctgatggacagagctcaagttccatttatattaaccgccacctgtggattttgcagtaattgctaacacatgcagttttaatgggaagtggctctgcgcctaaacggagtcctaacgctgcatcaacgggagggagggtcctgaaagagacccatctgggcctgtctgaacccctcgttcttcatgtttaggtgaatatgaatatgttaaagctggtggctcagctgggagatttatatgggtcactgtgcgagcttccttatgacttgaattttgttgtcacatgataaaagtttctgtgtagctgaaggttgtagaaggcttgtgtgtgtgtgtgtgtgtgtgtgtgtgtgtgtgtgtgtttttaaagagtcctaatgtgtatgtactctttatgtctttcttgctcttacaaagaggtgtcagaaaaatagaaagctcttggtgtcggtttgggaggaaaagacagtgacatttggtaaaaagttatccacacaataatctccattcggaaatgctcagtatcgtctccagccagccctgcttatccaggttacactggattcctgggatcgtaaccagtaaatgagaggagagggagagagagtgtcctaagtccaatctgttatccttgatctgattcagcatccatagtgtgtgagttaacttcacctgccacctcgtaaaagaatttcagaggtgtgatcccgctttattgggacctggtaacaatcacaaagccagtggctgtttgagaaggacctcagacattttcagcagagttgttttagcaggaaacgtgccactgaatggcccctaaatgtgtcgacagtgtgataagagactcaactaattctttaggcaacatggcagatgtgactcagatcctccaagaccaaagcggaaaggtcagggggctgggactcttctcttccatagaagcctgtttcctgttaggaggcataatggaagatgaccccacaaaggcagaggcatctttcggaacaacactggtggcagctttcagaacaaggaacccctggtgggaggacgcccaagctacagcgttgggatctgggatctgttccactgccggcagatttcaaggggaacttgctgaaaggcagccagtggtgaagatttctcccctcccaggatggactacatgccggcatgtttcttataaagctgtggctgcttgtttcagaggaagggagtttgcagtcgcgggacgtggtagagcaaggcattcttgggttttcaagttgcttcttgcagaagccacatatgcatgccataagggttaagttggtggatctttaagagccaagtgtggttgagatcttggatttgcgtttacttcttgatgaatacatatccttcaaaccctctgcctggcgctacttctgtgtgcttcagagatgtacatcacagcctggtttctgatgcctactaactcctgctcttggagagctggagacacgaggatcagatagtcccttgcctttggagcactcttgataagcttttgtattttgtgttgtccttttaaaatgttctagaatgactttacgttgcaggtactggttaattggctgttgacaccacatctattttgtcttatgattctgcagttttgcagtacttttctctatctgattcagccatttctgccagagggaaaaggtcggcagaaaagatgtattgagtgaatagttaaggataggatctttgtccaaaaatttcagaaagattgagcaaatctgacgtattcattgagtgagtttctgtgttttcaaaggtggaggagaaatttgtgctggaagtttttaagcctccgttttcttggaaatcagtctgtaacactggcaagtcttaagatagtcccatttagactttgcagatgctgaacctggctctgtaacgctgggaagtcttaagatagtcctgtttagactttgcaaaccctgtacctggctttgctcggagattcgggatgctggctcctgcaggcagggcgtgtgggagcctcgtcagaaagttttagaggtttccagcagaagcagaatgaagatggtctccctggccttttccttaattctcaattttgattgaggtgcacaagttgacttttaaagccaacgcttaagatactgattgacatcttcaagggagaatgctcccaggaggggctgaagaagccatagttggaagtggaaggtactcgtcagtgttctccacaaacctttttactctgttgtctcagccgcactggggcggaggcggtcaagggtgagaagtaccgacactcaagtgcaaactgccacgtcgttggcccatcccatcagtgggcagctggctgacgccattcactggacggtccctgaacacctaggaatgcacacaccgtgcttctcagacactggagacgcaaaggcaggaggatgcagtccggtgagaggacacgatctttacctgcacaatcagactgtaagcccagcagagaaccccaggggcgcctgggtacttctcggaggtcatcttagttgtggtggggaagacaaagaaataagcaaacaagaaactagagttactatacaagaaactctcctgagtttgtaaaccttaagcataaggattcagttgacctttttcttggttcatcaatctggaaagaacttacataaagcgccattgacactgtcacctgggagctccatgggccgtaagtctttgacagccaatttaatttgaggtcagagggccttgaggtacacagtcagcactgtttgaacacttttcctgaaagcaaaactcacagctccctgcgccctctgacaacactagctatttctgccagagtaagaacttctattactattttattattgttcatatgtcttttgatgatggttgtgtgacagggggaagcaggatctatttggtttcttcccctccccccaccccttcctttttgtctctctttttttttctctaagaaaatcaccagactagtttttccatcttgagtaatttcttatgtgggacagttttgatcctcattttgaaagcatgcgtgtgcacatgtgtgttgcctgtggtgccaggtgagacaggtggcactaactccagctgcttggaaggcatcccaagggcgcatcttaaagttggagcagacctcccttttccagcccctggggccattagaccacgtgctggaactagcattgtaaaattcccatcccagttccactcccctgaagtgaaacccttttttttttgtgacagtaaatcttaaaaatcattgtctctttatgaacatttcctcagtttcttctctgctgaaaatgtaagccatgctactttttaatgtattttgaattttgtgctcattggaaattgatatgctaatgcctcccccaccccccgccagacttttctttttatactttgtcttgtttttactggggtaggctgggcatgcgtgcgtgcctttagggcagcattttaaacctttgccaaaattgcaaatgggacatgtacattcttctgctccatcctacttaaacacctatcagctatttttatctttaaccttttctgtatgtttgaagtgtgtggggggtgtgtgtgtgtgtgaaagagcgagagaatgatgtcatctaaagttttttgaagaattatttggttttcattgcattaaaattctatcactcccagctttgttttcatttaaaaaaatatacaaagagctttgtaaatacaacacattttatttctcccccttcttttaatgtacagcttttttgccacttatatatacttaaaatattcccatgaattatgtccagttcttcttggaaaaaaatttggttttgaatgaacctgcaaagcatcctgcagcgtgagcagctcctccacctggagctccgaagcatcttctcaggccaaagcggcattacccgtgaatctgtcttctccgccacagcatggtttgaggcgcagtctgttaatatagctgggccatgtcagtgactgttgtgtttgtggggtcaggtggggggcatggtatttgcaaaaaaaacaaattatggctaatttattattttgttgcagtggggttaactgtaaactcatgtaagagtctgtgatttcctcattggttgatctctctctctgtaatcctcattgcaaattttcaccaggacagcgttttttgattagaggggagctctggcacagtatgctttaatttagcaggaacttccagatgatttaaattctcgatgctgtgatgacacacatatgatctttcgtgtttctgagcgactctactttcattgtttgccagcgtggctcgttgctgttgcccaataaagcttgtgtacgttctgccttgggggattattttaatttgtacagaaacatgaattctggtatcaaaatgaggactttttattataacgctcctattttttctttatttcatggtacatgaaatgtaaagaaaactctttccagttcagaaaattattttgattttggcaaaaaaaaccccaaatcaatgcatgttatttattattttgtactattgtccatcccagacgtgtcagaatttcaaaaggtgatagatataaatggaaaataagatgaaa

SEQ ID NO: 6246 - DNA, 573 bp, Homo sapiens
atttgctaaagtctagagacattctggttgtcaccatggagggtgtatgactggcatctagtgcgtaggggccagggatgctgctcaacattgtacagtgcacaggaggggccctgcagagcaaagagttatctggccccaaatgttcacagtgacgaggttgagactccctgttctagtccttatcttccctattctttcagtggaccacagtttgatgatatctgcagtcccaagtgtaaatctaaaatcatagcatgtgagtctattccagttgaaatagtaataactttcaaaacaaaggtcttaaatccatttgatctttctttcatcattgaaaatcttccaagtgctttgagttttccttttactttctgtagcctttgcccctaaatgaggccccttctcgcttttcatcttcagccaactgaaaaaacattggtgtctgttaagtgcactttgtacactgtctgtcatgggaagcgggctttgccgctgaaagagggtgttcctttcagtttctcattccttccggcctccctctctaggatgaatcaactggagaaattacgt

SEQ ID NO: 6247 - DNA, 498 bp, Homo sapiens
atttgtctgtctgtatttgtaaaagggcccggaggtataagctcgtgtgtctcaggaagcaagttatgcctccgcctactataccaaatactataccaaatggtgtaattagtggctgtctgcagtgtgagctgctggttccctctttttggttctcaatggaaagggccatcctcagtatatagattagaaagataattgtaacttagttgtgttatctcatgacagcagcaaaaggaaggtatgtggtttcaaaggtagggaccgaccatgctttcccttaaacgtgtgctatccctgcacgaccttaagcctctgcatttgcctgcagtgaacttccgtccatgtgcggacactcctccgccggagccgctagggggaacttgaggactgaaagacattgctgtttcctgttttccacaaccagccggaccccacgtgcccaactgccctgagtttcaagactgtgctttcatagcttcagaatttatttcatgg

SEQ ID NO: 6248 - DNA, 18214 bp, Homo sapiens
ctctccgcccccaccccctgtcggcgtctgggcctcgtccccttctctctgtctcccttgcctcccccatcacgtcccctgacaccgacaccccattgctcccacagtctccccagtctccactttggtccccagcgctgtctgcccgaggtaagatggggagggggcggcccgcggagaaggggaggggcgaagcatcctgaatcccgagataaacaaacccggggagggggcagccgcgactgaggggcctgacgcgggaggagaagaatggggggctgggcctgggggaggtggcaggcgctgggcgcacacaccggggccctctatgggtaacgggggtccctatggttgcccaagatccagttgcgcggaggccacccggggccctggaagctcctaggggcttggaccctggagcctgccgggcaccctctccagctgacctctgcctccaggatttgcctgaaggctgcccccaactctgcacccgccccccgagggccaccgaggaccatgactaagacagatcctgccccgatggccccgccaccccgaggagaggaggaagaagaggaggaggaggatgaacccgtccccgaggcccccagccccacccaggagcgccggcagaagcctgttgtgcacccctcggcacctgcccccctccctaaggactacggtaaccactgtccccaccctggaatctggcctggagcgttgggtggccggggagggtgggctgtgctctgctggtggtgatggtgggagaattctggggaatttgaaggtggtccagaggaatcttggctgcagagcacccctcgttaattcattcattcacccattggagaatggaattgtaatactcctagtctttgactcatgacacatcattccatcatttagtcattcaacaatcattttttgaaagcggctgtggacctggctttatgctaggggctggggccacagcagggggcaagagagacccagtctttgccctgagacaactcacaggcctcagtaacagccacacaaataggtattaaaccataatgtaatttttcacatttaggtttatatgcaagaaagaaaaatataatgtaatataaatatgtaattacaagacattatgaaaattgtatttaccataaacaagctgctgcaagagttttttaagacattgtttccctgaggaggttacagttgagaagactggagggtgagttggggttaactaagagaagggtcaggggaaagggctcccaggagaggtaaccgctgggtaaaggatctgaggtaggagggtatggagctgagagggcggcctcttggagaaactgaaagtgtctaatcattgaccgagcgatatttatcgagtgctgctactctgtgacaagccttatgctgggtgccggagatttaatcctaagtgatccaggcatgatcctcccttgcaggagagaaggagagactaaacaagtgaacagataaataaatcagaaatcagataaattcagattggagcaagtgctatgaaagaaagaaaaggtgggctgggcatggtgtctcacgcctgtaatcccagcactttgggaggctgaggccagcggatcacctgaggtcaggagtttgagaccagccatggccaacatggtgaaaccccatctctactaaaaatacaaaaattggctgggtatagtggcatatgtctgtaatcccagccactcgggaggctgaggcagtagaatcgcttgaacctgggaggcagaggttgcccaagatcgagccactacactccagcctgagtgacagagtaagactgtctcaaaaaaaaaaaaaaaaaagaaaaaaaaaaaaaagaaaagaaaaaaagaaaaaagaaaaagaaattaaaggtggagatacgataatgactagggggcagctacctgcaggggtagtcagggctgctctttctgagtaggtaacatttagtttgggacccagagcatggggaggaatcagccataagagagctggaaaaagagtgttccaggcagacagcagcaagtgcaaaggccctgaggcagaattgaacttggaacagaaagatcctggagctgcattcagggaatgatcgaggttgaggtgagaggttggcataggccagatctggaagggccttcaaggctacagtgaggactttggttatattctaagtgggacaggggagaagagtggcaaggggagggtgtttaagagcagaggagtggcaggtctgatttgtagtttgaaagctccctctgggtactgggtagaaggggatggagtgcagccagagttggatgtaggaggggaatttggaagatatgcaggctgggaatccccggcagctgtgaggttcagaaaccaggttcagagagtcagcgttgccaggatagagcaagacagatggcatccatggacatgtcacccactagaggtagatcagggagactacaagttgacttcagtctaatagaaaaataagaaagttggctaggcacagtggttctggcttataatcctagcactctaggaggccaaggtgggaggattgcttgaggccaggagttcgagatcagcctgggcaatggagcaagaccccatctgtacagaaaatttagaaattagccaggcatggtgggtacctgtagtcccagctactccagaggctgaggtgggaggatcacttgagcctgagaattcgatgctgcagtaagctaggattgcaccactgcactccagcttgggtgacacagtgagaccctgtctcaaaaaaagaaaaaagtaaaaggaagttatctggggcctgaggtcgggggggtgctgtacctcagaaaactggaaaatctcctttggaaatgcagctggaggtggctggggcctctgactcagtgggaggtcggagggtataggctgagccctccaagcagtcttgcttgtagagcgggagaggttttgtcccagaatgtgaagaaatctggaaatgtggtcgaggacagggagaaggctaaggtggactccaagaggaaatcatgtatctgttaaatttgtacattaattcaacagagattgactgagcacctactgtgtgccatgtgctgtgcctggccttggggataaaggagtgaatgaggcagaatagaatcatagcatttagatcctagtgagggaagaagagaggaaatgaaggagggagaaagaggagtaaacatgtcaagtagtgatatgagctatgataaaaataaataaataaataaagggctgggcatggtggctcacacctgtaatttcagtgctttgggaagccaaagtgggaggatcacttgagcccaggagttcgagaccagcctgggcaacatagcaaaacgttgtcactacaaaaaaaaaaaaaattgctgggcatggtgatgtatactgtagtcctagctaccagggaggctgaagcaggaggatcacttgaacccaggagttcaaggctgtagtgagctatgatcatactattgcattccaacagaccctatttttttttttttttttgagacggactccaggctggagtgcaatggtgcaatcttggcccactgcaacctctgccttccgagttcaagcgattctcctgcctcagcctcctgagtagctgggattacaggcactcaccaccacgcccagttaatttttgtatttttagtagagatggagtttcaccatgttggtcaggctggtctcgaactgctgacctcatgatctgccagccttggcctcccaaagtgctgggattccaggcgtgagccaccatgcccagccaagaccctatctctaaaaaaaaaaaaaaaaaaaaaaaaaaaaagagtaggagatggagaagggcgggtgccgatttagacagtgtggtttgggaaggcctctctgaggagatgacatttgagcaaagatttataaagctttgtgaagatgtgtgggaagtctatcctgagtgagaagaacagcaagtgccaagaccctgagacaagaatttgcttggcacgtgggagggacagagggagcccagtgtgggaaatgagggaaggggaataagtgaggggagagggctgagaactgaggggctggatgtgcagagccctgagggccgtggggaagactttggtctgtactctggatgggttgggagctggaggagggttctaagccaagaagggctatgatgtgactgcagttctaaaaggagcatgccggctgattcctggagacaccttctatgtggcacttccctgggctgtgtataatctgatcattcatgtagtcgttcattcaccacgcactgagttcctgccacgtgccagggccctgtgctgggtgctgacgtcacagagagcagtactccttagagtcgagtgggaagagacagaagtgcctctaggcaccaccctggctgggcacaggttgattcctgctcatggatacattttattttattttcatttttatttatttatttactttttttgagatggagtctcactctctgtcacccaggctggagtgcagcggcgccatctcagctcactgcagcctttgcctcctgagttcaagtgattctcctgcctcagcctcccgagcagctgggattaccggcgcccaccaccacgcctggctaatttttgtatttttggtagagtcagggtttcaccacgttggaccaggctggtctcgaactcctgacctgaggtgatccgcccgccccggcctccaaaagtgctgggattacaggcgtgagccaccgcgcacagcctctatttttattttttatatttccagagtcagggtcttgctctgttgcccaggctggcgtgtagtggcacaatcatggctcactgcagccttgaactcctgggctcaagcaatcctcctgtctcaatctccttgagtagcaccaatgcgcaccaccacacctggctaattttaaaactttttgtaaagacaggggtcttgctatgttgcccaggctggtcttgaacttatgggctcaagcaatcctcctgcctcagcctcccaacgcattgggattacagatgtgaaccactgtgcccagtcatggatacatttgatgtggactgcatggtatttgaaacaattgagagagttttattaaaaaccaggacttctggctttatttatttttgctctggagattcagccaaacttcactcatactctcacagggcaacagtgggtgaggtcagtagcagtccccctggacatgcagactccaaggtactgcactctctgtcaggcttttgtttcagggggtggagtttgctgctatatgggaattgcctgatcttccaacttttcaagacacactgggcatcgagatttttatgtgaacccacctgagtttgaaacctcatgctggccacacagaaaatgcctgtgggttgactgtggcccatgtgccaccagcttgagaccctgcattagaggctctaaaaggcaaagacctacagctcccctactgaggctggaaggagggggtcagttgcgtggggtgaccttggacctcttgccaccccagctttcaccttcttcgatcccaatgacccggcgtgccaggagatcctgtttgaccctcagaccaccatccccgagctgtttgccattgtgcgccagtgggtgccccaagtccagcacaagatagacgtcatcggcaatgaggtgagaacactggggaaaccagggggagaggggatgcggttccccacatgtgtgggtgaccctccctgctcccctggtactcacagattctgcgccgaggctgccatgtgaacgatcgtgacgggctgaccgacatgacactgctccactatgcgtgcaaagctggggcccacggagtcggtgagggccccctacccccaagtcataagccccaaagcctaggcccccagacccaacacgctgaaaaccacccagaactcaggccccatctggaacccgaagcttcggatcccaaagtatagtccctgaagcccagggtcctccccgtgcactgggcccatgctctggaatgggggttccaagctgacccggcctatcgcgcaggggaccccgcggcagccgtgcgcctctcgcagcagctgctggcgctgggcgcagatgtgacgctgcgcagccgctggaccaacatgaacgcgcttcactacgcggcctattttgatgtgcccgacctcgtgcgtgtgctgctgaagggtgcgaggccgcgaggtgaggaggagagccctggctgggagggggcaaggacctgggtgagggacgcggagacccaggtgaggccaggctgcgaggggaaggaggacggtgatctgaggagatagcgggaggttggaggcgtgggagagggggctcagggactaccactctagggagggtcggggctgccaagggagaggggggctccgaggtgggggcggggctctgcgtcggaggctctgggacctgcaagttaagagatgagccccgaggtgggaggagggctggggtcccacaggcgctcacccggaacccctcctcttgcccacttccagtggtgaactccacgtgcagtgacttcaaccacggctcagccctgcacatcgctgcttccagcctgtgcctgggcgccgccaaatgtttgctggagcacggcgccaaccctgcgctgagggtactgccacccttgcccagaacccgttaccctcctgctcccttcctcccccacttccctccagcaggtctctgcgtttcccgtgactccccaaatactacaaatgccgtctgtacattcagcaaatgcaataacagctgaaatatgcctagtgttcattacatgtcaggtgaagtctattataagccttgttttacaatggggaaactgaggcagagattaagggatctgcccagggtcatccagcctatcccatggcagtgcataacagcatttcaaggtcatgaggaaagttgggctaggccttctgtgaatgagagggttggtcctctcctaagccctcaatatgatctttgacctctgacctatgcattaccaggctccatccacaatgctaattaccctgcagccgtccaggcacatgtatgttggggtaacatggcctgtgcccctgagaccctgcctctccccattttccactggcccagagtttgactcctgactctataccacaggagcccactctcactctctctaattttttttttttttttttgagacagagactggctctgtcatccaggctggagtgcagtggtgcaatctcggctcactgcaacctctgcctaccaggttcaaacgattctcctgcctcagcctcccgagtaggtagaattataggcatgcgccaccacacccggctaatttttgtatttttagtagagatggagtttcaccatgttggccaggctggtctcgagctcctgacctcaggtgatctgcccacctcggcctcacaaattgctaggattataagcataagccactgcacccagcccacaggagcccattctcaatgttcatctcccacatgtcctcattacaggcttggggtctccagagattgcctccctgagggcgtgacctacagcactgaagtgtggccctcatccctactgcctacacccccaggcccaccctcaattacttgacacacccccagccctgggtctcaggggtgggtttccctggggatgtggtctgcacctttctgccctgccccttctttttttttttttttgagacggagtctcgctctgtcacccaggctggagtgcagtagcatgatcttggctcactgcaacctctgcttcccggattcaagcgattctcctgcctcagcctcccgagtagctgggattacaggcacacgccaccacacccggctaatttttgtatttttagtacagacgaggtttcaccatgttggccaggctggtcttgaactcctgacctcaagcatctgcctgcctcggcctcacaacgtactgggattacaggcgtgagccaccttaccccgccttgccctgacccttcttattcccaggttggcccaggatatgacctagtcttacccctgcatcacccagactggtggtctctaggggcagggcctccatgggggtgtgacctgtgccactgagtccctgccttcttttcccattggcccccagaatcgaaaaggacaggtgccggcggaggtggtcccagatcctatggacatgtccctggacaaggcagaggcggcactggtggccaaggagctgcggacgcttctggaagaggcagtgccactatcttgcgccctccccaaggtcacgctacccaactatgacaacgtcccaggcaatctcatgcttagcgcactgggcttgcgcctgggagaccgcgtgctgctggatggccagaaggtcaggggctgggatgtgtgtttgcatggtgggtgggggtgggactcagccccttaatcccttggagctgcgtcctcgggcagagtgcagtccctgccctttgtctacttgccgccctaactatccacccagtacttgattttatctcagttgttccgtgggtgtctcctttgagcctcaccctgtgctgagctctccatccagggtgggaaacaacccgtcatctgacagtgacggccgagagtggtcatggctgccatggggaggggtgagcagagtgatctgcgcagctctgtgcacctgtggctccccccgggtcttgtggtcctcgatcaggcccctctgctctcagagacaagtctggctaggcaagtccaggccagagtgattggggtgtgatggggaatgtacccaaattgcagatgtggaggagcaagccagggaaagaaagggagaaaggagtctcagcttgggggagcgggtatcacagctgagagggcagagagaatcttcatttatccagggactccaatttcactcatttcccggtgtcccttgggctccatacgggacccagtctgtccttagggagggagggctgtgtctgcccccgccctgctgtcatggggctccacttgtaatgaaggggagacagtcaagaaagtaaacctatggttgagatgatttctgggctgggcacggtagttcacacctctaatcccggcattttgggaggccgaggtgggaggatcacttgaggtcaggagttgttagagaccagcctgggcaacatagtgagatcctgcctctattgaaaaaaaaaaaaaaaggtaatttctggtagcaacaagggctgtcaacaccattacatgtttggatttagtaaattgtccctggctgaatgctggagtggttttagctggggtgttctgagaaggcttctctgaggaggtgatgtccaaactgagataggaaagaacttcctttgcaaagataaggaagcagaggatgcagtaggtatggagacccagaggcaggaaggggcagtgttgacgaggggagttatgggaagggcggtgaggtggagaggtcagcaaggctgggtcacagcagacctgtaggctactggaaggagtttgaattttgtttttgtgtttttgagacagggtcttgctgtcacccaggccagagtgcagtggcacgatcttggctcacagcaacctccacctcccagattcaagctattctcatgtcttagcctcccacgtagctgggattacaagtgtgtgccaacaagcctgggtttatttttattattatgattattattattattattttgagatggagtcttgctctgtcgcctaggctggagtgcggtggcgcgatctcagctcactgcaagctctgcctcctgggttcatgccattctcctgcctcagcctcccgagtagctgggactacaggtgcccaccaccatgcctggctaattatttgtatttttagtagagagagggtgtcactgtgttagccaggatggtcttgatctcctgacctcgtgatccgcccgcctcagcctcccaaagtgctgggattacaggcgtgagccaccgcgcctggccttttatttttatttttagtagcaacgggtttcaccatattggccaggctggtctcaaactcctgccctcaagcgattcgcccgccttggctcccaaagtgctgggattacaggcataagccactgcgcccggccccatccagaaagcattctgctgtgcacgatctaatcatatccattgcacaattcagaaggaaggttgggttgactcttcccattttacaagccagactataagaggctccaacaggtgaaaacctttatctgaagacacggaatactaatcactgccccttagagaagcagcatagcacagcgtcatgaactcaggctcagggacttgcccaggtaaatctcagctttgcaacttcccacctgtggacctggagccagtgattctgcctctttgggtgtcaatgtcttcatccgtaaatggagataataatagtaaccaccttagggggctggttgaggtttaaattaattaaaatgcgtaaggccattagaacagagtccagcgcatactaaatgctctttgtgtgtgccaggcactgttctagtccctccaccaacactcttaagatcagcactaattgtcggggcgcggtgcctcacgcctgtaatcccagcactttgggaggcagaggtgggcggatcacgaggtcaggagatcgagaccatcctggctaacccggtgaaacctcgtctctacaaaaaaaatacaaaaaattagccaggcatggtggcaggtgcctgtagtcccagctactcaggaggctgaggcaggagaatggcatgaacccaggaggcggagcttgcagtgagccaagatcatgccactgcactccagcctgggccaaagtgtgagactccgtctccaaaaaaaaataaataaataaaaataaaaaaagatcagcactaattaattagcctattatatggaccaggaactgaggcatggagaggtgaatgagcctcccataatgataataaccacactcactaaagtctcactgcagctaagcaagtttacatgtgttaaaaatgtttccgccaaatgtggtggctcatgcctgtaatcccagcactttgggaggctgaggcagaaggatcgcttgagcccaggaattcgagaccagcctgggcaacatagtgagacctcatctctactaaaaatgaaaaaattaaccaggcatggtggcacacacctatagtcctagctacttgggaggctgaagtgagaggatcgcttgagcccaggagttcaagaccagcctgggcaatcaacatggtgagacctcatctctactaataatgaaaaaattaatcaggcatggtggcgcacacctgtagtcctagctacttgggaggctgaagtgagaggatcacttgtgcccaggagtttgaggctgcactgtgccagggtcgtgccactgcacccctggcatgggcaacaaagtgagaccctgtctaaaaaaaaaaaaagtttccgccagatgatcactccatgaggtggcttactatctctattttacagatgaaactgaggctcaataagtcccctgaccaaagttacagcatgataatagctaacaggctgagcacagtggcttcacacctgtaatcccagcactttgggaggccaagatggggaggatcgcttgaggccaggagtttgaaactaacctgggcaacatagggatactccatttctatttttaacaaaagtttgttgttgttgttgttgttttaattagccaggctttggtggcgttcacctgtagtcccagctactcgggagactgaggagggaagattgcttgaacccaggagttcaaggttacactgagctatgattgcaccactgcactccagcctgggccacagagtgagaccctgtctctaaaatagaaaaaaaatttcaataacgaatacttgctgatcctttacttaataccaagccctgttctgagggctttaatttctctataacagccctgtccaacagagctttctgtaatggtggaaatattctgtctgtgctgtccagtaaagtagctacaagctacatgtgacaattgagcacttgaaatatggctagtgtgactggggaaatgcatttttaatttagtttaaatgtattgatttgtatttttatttatttatattttttcttgagacagagtcttgctctgttgctcaggctggagtgcagtggtgctatctgggctcactgcaaccctcctgggttcaagcaattctcctgcctcagcctcccgagtagctgggattacaggcgtgcaccatcatgcctggttaatttttgtatttttagtagagatgggggtttcaccatgttggccaggctggtcttgaactcctgacctcaggtgatcctcccacctcggcctcccagagtgctaggattataggtgtgagccaccgcgcccggactaaatttatttatttttaaatttaaaaatcatctgagtcttctttctaaggtatgtatttatttatttttgagacagggtcttgcttgttgcccaggctggagtgcagtggcaccatcatagctcactgcacccttgaactcctgggctcaagcgatcctcccacctcagcctcccaagtaactgggacaacaggcttgagctactgcacctggttaccttttttctttcttttatagagaatagggtcttgctgtctttgttttttggaacagattaagattagagggtctcgccattttcacccaggctggtctgaaactcctggcctcaagtgatcctccagccttggcatcccaaagtgttgggattataggcatgagccaccacacccggccttagtttaaatttaaattgttggccaggcatggtggctcatgcctgtgatcccagcactttgggaggccgaggcgggtggatcacctgaggtcaggaattcgagaccagcctggccaacatggcgaagccccgtctctactaaaaatacaaaaattagccaggcgtggtggcatgcacctgtagtcccagctacttgggaggctgagatgggagaattgcttgaacccaggaagtggaatttgcagtgagccgagatcgtgccactgcactcgagcctggcaacagagtgagacgctgtctcgaaaaaaaaaaaaataaataaaataaataaataaataaatttacattgtcctatgtggctagtcactattcactatatgagacagggcaactctttaacaatcctataaggtgagtataatttctgttcccatttcacagcaaaggaagttgaggcacacagaggttaagtcatgtagccagcaaatggtgatgtgtgacctggggtttgggcccagggcggcctcatgcaacccaccttgctgcccgtgtgtgggcactccacgttggcctcccagcattccttccttagccatcgcctcccttctctccccagacgggcacactgcggttctgtgggaccacggagtttgccagcggccagtgggtgggcgtggagctggacgaacctgagggcaagaacgatggcagcgttgggggcgttcggtacttcatctgccctcccaagcagggttagtccgacctcgggcccaagaggggtgtggctgggtgtccactcggcagttctgatgctgctgactgggaaataggggatggaggatgggggccgagggcagaggcttggacaacaccaggctcggattctgtacccctaggtctctttgcctccgtgtccaagatctccaaggcagtggacgcacccccctcctctgtcacctccacaccccggaccccccggatggacttctcccgtgtcaccggcaaaggccgcagggaacacaaaggtcagagaggggatccctgtggtgggaagagccagtttggggatgttgtgtgggtagctcagcttctgtgactcagtttctcctcaggcccaaactccagttttggaagacaagctctgagttcctgacttctgtgactcagtttcccctttggctcagtactggcaccccctagttcttagaaggacctgtgggttccctgccctctgtgacttagtttcctctcagacccaaaggtctcccccagttttagggaagaatccttggagatcctgtcttttgtcatttgatctacttttttttttttttttttttgagtcaagagtctcgccttgttgcccaggctggagcgtggtggcacgatcttggctcaccgcaacctccgcctcccgggttcaagcaattctcgtgcctcagcctcccgagtagctgggattacaggtgcccaccaccacatctggctaatgtttgtatttttttctgtagagacagggttttgccatgttggccaggctggtctcaaactcctgacctcaagtgatctgcccgcctcggcctctcaaaatgttgggattacaggcctgcgccactgcacatggcctgatttactctcggacccaattttcccttcattttaaaaggacagtttctgggttcctgacttctgactcagcttttccttatccaacatatcctcagctttgagaaaggattttggggttcttcaggttctctgactcagtttcccttcaggcctaaagccccttcctaattctctggcatctgggattcagtttcacttcaaacgaagaacagggttttctaccttggggttttccaggtggcacgaggttcccaaagctggcctcagccccactacccacctcctacaccttctacccttaggcaagaagaagaccccatcatccccatctctgggcagcttgcagcagcgtgacggggccaaggctgaggttggagaccaggtccttgtcgcgggccagaagcaggggatcgtgcgcttctacgggaagacagactttgccccaggtgaggatggggactctgggccgggaggcaggcagggccttgagaaatcctgacaccctcgtgctgcaggttactggtatggcattgagctggaccagcccacaggcaagcatgatggctctgtcttcggtgtccggtacttcacttgccccccgaggcatggggtcttcgcaccagcatcccgtattcagaggtgagcccaaacttccagcccaaacccagggcaccacctggagccctgatcccccctcagatggcctcctcctcccagaccagcaggacagtgtggacacccccgagcccccagccctttcctcatagatccctggggcccagctctcagtcagaccctggccttttgtggctctgacttctccccctccccgtgtctcctcaggattggcggatccactgattcccccggggacagcgttggagccaaaaaagtgcatcaagtgacaagtgagttaggggatgatatgttgggaggagtgtacgtttggggatgggaggaagggtcatgggttctcaggtatatactggtgacagtctctggtatttaattggggacacagggtccaggaaaatgatgagacaaggtccacaaaaagataggtgctagaggatatgaggaaattagcaacaaggctcttcggggacatgaggttgagcagatactggggacagggatagtcactgggggacatggtgggaattatggacaagaggcccagatgggtattgggaatgtaggatccaggtggggactggagacatggggaggtattaatgagaaggggtctggatgggtattgaggacacaggtggtctgtcatcccctcacttgacatcctgccctcctcttcagtgacgcagcccaaacgcaccttcaccacagtccggaccccaaaggacattgcatcagagaactccatttccaggtgtgtggccaacccctgtcccctctcctatgtgacattcagggagagggatccataaggcagttggacccagaggtctggagctctggtcagggctggaaagagaggttaggaaaacttgtgacttgtaagcatacccagaaacagtctttagggtgtagggccccgcactgaattctagtgaattccactttcgggtgggccggtaaaggaagcagaacacccttcactccatacgagcctcagaacaacagctagagaccgggcggggtggctcatgcctttaatcccagcactttgggaggccaaggcaggcggatcacctgaggtcaggagttcaagaccagcctggccaacatggtgaaaccccgtctctaccaaaaacacaaaagttagccggacacaatggcatacacctgtagtcccagctactcgggaggctgagacaggagaattgcttgaacctgggaggcagaggttgcagtgagccgagatcgtgccatggcactccagcctgggtgacagagtgagactccatctcagaaaacaaacaaacaaacaaaccacagccagagaggtagaggcagaatccagaaaggcctgatagcaaacactgggggaaaggctgggggtgatgggtgcagatgtccccgctgcctgcctaagggcgtgaccctgtcatcctcctttccaggttgctgttctgctgctggttcccctggatgctgagggcggagatgcagtcttagaggccctggacacctgacaaagagacagagtccccactagcatctcctgacacccgaggagccctgagtcaccctgagatagagattcccagtaacacatccagagtagagacccctgttagccagccctcgatcattgaggccccattattaacagatactcccataataacccccaaatacagaccccatgtcacccagaaagagattccctgagtagcaccttcaggctagtccctatccccaacccctcagagcagattcccagattaacagatttccatatcaccccaaatgatggtgaccctctccacataatgcattacaacagaacattcttgaatcacccaaccctggatcagaaacctccccattaacaaacactgccccttaagtcctcttgaaataaacataggtcacacccccaaagcaaaagagtaacagacattcatgtcattgttccccatttaacatcagtcctctcaagatgtcgtgaccccatggtcaccctgaagcccttagattccaacccctcaatcagagacttccttcattaacaaagacccttgttcttatccctcaagaagaaacccaccataaccagcccactgtcacccctaatttacagacaccaaaacagtcctggaagtgctaattacaggaccccccaagtcttcctaccctctgcaccctcaagaaacccccagtgccttgtatgaagcccaccccacatggcccacagctcctgtgctggccagactcccagaaaattctctattttttaagtaacgacttccccctttgggggaccccaaaatttggaggccccattctaggactctggggatcccaaaccctagagtacacacgtcccaaactcccctgtgccctcaagtcctacagcccctagaagaccccaatgccgtaactcctaggacccccaaatcatggaatcccaaatccccagggaatcccaaatttgaaaatccaatcccaagtccccaggaaacccaatcatgaggtccttgtgcctggtatggaggagactgcagtcaggatatgcattccaggctcccagacacctcaagccctattcacaggcaccaggaaaccccacacaggaattcccatccctggaaactggagaatttcaatgccccgagtccatgggtttcaagacaccaaattccaagagccccagccctaagggaaccccaaatcctaaagcctccatctctaataaatggaaggccccaaggccctgaggggatctcaaatcctggaaccccgatttcaatctacgttctagtcactggcctcaaaggaccccacagcacctgggccagaccaacagctcgagggagaacctgaaggcccagggggtccagggcggacctggggccccgaccaccaaggacagctcacgactgccccttcactgcatgtccccaaactcagcatgactcctgtcctcttcaataaagacgtttctatggcc

SEQ ID NO: 6249 - DNA, 5095 bp, Homo sapiens
gttgaatttggaaattggaggggacgctggtggacggtcagttttggggagtgctgggggtagagatggatgtcaatagggctgaaagtggggatccgggggagcccagagtaggagtccgaggaggctcagagcttggagtcctaaaaggctcggagtcggggatctgaatggttcagggagggaagaagatttgggagtcagcctcagagctaaagatctcagggtgctggagtgaaggggcgctcaggaggggaaatccgaggggcgtccaaatggggggatccgaggaggctgagggtggacatgtctgaggaggctcagattggggtcacaggagtgcacagaatgggattcggtggggggcgggggtcgctgagtgttgatagccgggctcacagttgcaggtctgaagcggggtctcaaggtgtttaaaggggctctggagtgcagccctgggggctatgtgtagagcttttgagaaaggctccctgtgtgtggggccagagaatgttctctgtgggaggattgagaaggcatatgtgtagttggatgggcccttagtggacagagtaatgggggattattcttggggctcattgtgtccgggcatggaacgtaggggctctctgtgtggcttgtaagatgctgaagactcagattttagagaccaagtgcgtttcagaagagggctgaggtgaggcctggcctgtgatggggtggaatgctgcatcatggtgttagggcgggaggcctagtgacttcagtatgtcctcccctccctacaggattgggtgcaaggagttggtgttgatggaggagcaggacgccagagtcccagccctggaaccgttcagagtggagcaggttgtcagaactcagggtgcagagggtgaaggaggcaggctgattcctgagttcttgggttgggactgcccccttccaccaaattcattcttactgtcagagtccattctggaatggcactggtcccttgactttagaccctgacctgtctgaggacatcctgagcctgtctccaggcataggggttgctctgtgatgatatgtcctctgtgtgggttgaagggccacaccttcagggggtctttctatcctaggcaccacctgtaatctactatgtccctgacttcatctccaaagaagaggaggagtatttgcttcgacaggtgacctcagtgccctactggtctgttttcccactcttcccatattcctccccaatgtccatcctctgtatgagagcccccaaggctgcagtgaagaccccgacagaaggaacaaggaagttacagagctcatactccctctactgagatagcccaatcctgctagcttagagaatagggggttataaacataggctgagatagcccagttcagatcattgagactggggagtaaagaattttgtattcagatttctgtgctgagatagcccagtaaactctttcctgtgctaaaatagcccagcatagacccagagcacaataaggttaccaaatacagaccatctacgctgagatggcccagtctgcattctgttcttaaggtttggggaaagaagaattttcaaagctcagagttcctgccctttgcagccccagtgcctaagttacagagcacagatcttccctgtgttggagtaacccactgatcttgagtccaggaaaaaattagctacagaacacagacttttttgctgagatagcccattccagacctttgcgttcttggcattgaaaaatctacatattatagaattcctgggctgaaatagcccagtacagctccataaccatgaagggaatgagtagattatcaactagagctagacttgttggactgagatagcccattctagatcattaggatcttggcagtggaagattttcaaagtactttctttgctgtgctgagatagcccagctttgcatactccctcccccaggcaataggaacaagtcggttgcagaactcaaactgtcctcagagagcccaggaatcaggaatttttgtttgtttgttttttgagacaatcttgctctgtcgcccaggctggactgcagtggcgtgatctcggttcactgtagcctccgcctcctgggttcaactgattcttgtgtttcagtctcctgagtagcttggattgcaggcgtgtgacaccacaccgcctcccaggttcaagcgattctcctgtctcatcctcccaagtagctgggattacaggtgcatgccaccatgcccagctaagttttgtatttttagtagagacggggtttccccatgttggccaggctggtctcgagctcctgacctcaagtgatctgcccgcctcggcctcccaaagtgctgggattacaggcatgagcaaccaggtttggcacggaatcaggaaattagaatgcagactatttgctgggctgaaagagccctgtccagccccagaactctgagtagattgtgagacccacaactctcagaccacggttgtgcagccctgattcctaaatcctggtagacacaggtgggctttggggccaaaggcgttcccaggaaaaaaggcaaaccacaaaatcctaggaacccaccgccccagggaatggtcccacagacacagatgacccatttccatcccggaggtaaaggcccctatgttggtctaggtgggaggatcatagaggggtgatcctgagaaaggagtgacccccttcccacctcttaggtttttaatgccccaaagccaaagtggacccagctctctgggagaaagttacagaactggggtaagtatccctggctgggggcaggagtgattctgggatgtaggctggggcaggggactcaggtccaatagacttaagacatcagagggtccctgacagctcaaggggccccaagagccaggaggattctgaaggggtcagtggaggtcctgagggattagggatttcctgatgagttgggagtatctgaaagggacctgtggtctggagaagtgaggaaacctctgaaggacccagtggctatctccaaacggtcaggggtccctgagaggatcagggtgcttccagccactgtggaatccctaatgggggatctattgctataggggggccctcaggaccccattgccttccccaggtgggcttcctcatccccgagggatggttcctgagcggctgcccccatggctccagcgctacgtggacaaagtgtcaaacctcagcctctttggaggcctcccagctaaccatgtcctcgtgaaccagtatctgcctggggagggcatcatggtaaccacacaccctcggcccgtgtccccccactcagacttctgagctgtgctggggcaggggactctgtacccaccctcactcattaggcagccacatctcccaaacaggcattcacctccctgtccctggcttgggaagcccccctttgacccagagggtgggggttgtggactcctgccctgcccagccctggtgcccactccctagccccacgaggacggaccactgtactacccgactgtcagcaccatcagcctgggctcccacaccgtgctggacttctacgagccgcggcggccagaggacgatgaccctacagaacaggtgggcccccagacactgccccagctgcttgtaggcacttcaacctcgcacatcctccaagatgacctggtcccacatgccttcggggtactcctggcactctcccagataccttcccttgtcccctcatggggtgtacccacttcctcccagacacccaacccatctgcttacagggtgtctgtcccacatgccatgattttcacaggctccccgatgccccaacctgctgaatggatacccctgactccccagcagacactgatatccttagataccccaccgccattaactcggggggcctcacctcctcccagatgctctatctgcccctgctcagggtgccccagacgtcctgctactccaggaatgtgatttggggtgcaggacacccccagattctccttgaccccttgacacaatttctctgagtgatgcatttctagcaccccagtgttcacagaaacgcccctgaacacgccgacccactccttgaggcttgccctcgagccctgcatgctcctggatgctctgacactccctcagctgtgcggttgtcctctaatgtcctgatgtccttgggaacccccactgcctctaacctctgcctcactctctcctcacctggtcctggcttcagccatgctctctcagcccagctctgcctgtatttcctggggactgcctattcctgggtcccagccccagcctcagcccctttgagatcccagctgcagctcccaccggccgctgaccctttgacgcccccatctgccacctagatcctgccccctcccgagggacggcagagccctcgccctccctttccagcagccccagcccaggccccagcaattttcactcctgaaccaccaaagcctccatcattgtgagcacacttgctcttcagcttttgcccctggggactagctgatccccggaggctaccgacctctcgcccacccccaccccccgacttcttgagccctgctgaccctcaacccgccctgcagcctcggcctccgccccggcccaccacctcgctactgctggaaccgcgcagcctgctggtgctccgcggccccgcctacacgcgtcttctccacggcatcgccgccgcccgcgtagacgcgctggacgccgcctcctcgccgcccaatgcggcagcctgcccgtcggcgcggccgggagcctgcctggtgcgcggcacccgggtctcgctgaccatccgccgcgtgccccgcgtgctgcgcgccggcctcctgctgggcaagtgaccgccagggccgggacccctcggattcccaggttcctgcccctttggggctgctgtgactccgcgacctaggaaccgtgggcaaagggggctcccctgggttatttattttcccaataattttgtgtgagctacagaagaccccataccaaataaacaaaaaaatctttccttg

SEQ ID NO: 6250 - DNA, 465 bp, Homo sapiens
gtgaggtgcagcaggcagacccctctgagggaaagagggctccaaagtgacaggtgttcatgggtccctgtggctgcatgttggaggaggacggggacagcaggtaagaggctgctgccgtagtgctggtggcagaagaagaaggatggaccaagatgagggcccagggtagcggtggggagagtgagatcctggaaatcttttggagatggagctactggacctgtgcattagaaggatgaggtgttcaaggctgtcacccagccccatccaggctgggatgatttgaggcagagcaggctacagctccaggtgggaagccaagccatgacaatggagccaggaccctgggctggcttcaggaggcctccgtggggaagatacaggttctgagagagttggaggggtcaatcggcagatctgtttcccagacactgctacaggcatgtagcatggtgattaaga

SEQ ID NO: 6251 - DNA, 2631 bp, Homo sapiens
ctggaaaggattcttgtagtgtctgccatggaacacagacagacctatgggaacacaggggaacctcttttagaaaacttgacaagcgagtaagacttggatcttttccgaagagcacaagcccgggcttcagaggatttggagaagttaaggctgcaaggccaaatcacagagggaagcaacatgattaaaacaattgcttttggtcgctatgaccttgatacctggtaccattctccatatcctgaagaatatgcacggctgggacgtctctatatgtgtgaattctgtttaaaatatatgaagagccaaatgatactccgccagcacatggccaaatgtgtgtggaaacacccacttggtgatgagatatatcgcaaaggttcagtctctgtgtttgaagtggatggcaagaaaaacaagatctactgccaaaacctgtgcctgctggccaaactttttctggaccacaagacattatattatgatgtggagcccttcctgttctatgttatgacagaggcggacaacactggctgtcacctgattggatatttttccaaggaaaagaattcattcctcaactacaacgtatcctgtatccttactatgcctcagtacatgagacagggctatggcaagatgcttattgatttcagttatttgctttccaaagttgaagaaaaagttggctccccagaatgtccactctcagatctggggcttataagctgttgcagttactggaaagaagtacttctccgctaactgcgtaatttccaaggcaaagagatttctatcaaagaaatcagtcaggagacggctgtgaatcctgtggacattgtcagcactctgcaagcccttcaggtgctcaagtactggaagggaaaacacctagttttaaagagacaggacctgattgatgagtagatagccaaagaggccaaaaggtccaactccaataaaaccatggatcccagctgcttaaaatggacccctcccaagggcccttaaagcgacctgtcattccgagccagcgaaccccagcagtaggaatccgtaccttagggatctgtcggtcatttctgttgctcttgtgattggcaagtacagtatcctttgggaaggccatccccctcaggactgtcctggctccgatctttgtgtacactgcagacactggttctgaggaactgttgtttcggcctcagtgaggttgcctggatgggatctgtattagacttgagtgcaggtctctcagcactgacccaaggagttctgttatggtactgtacctgtccagtcactggttctctcctcatgtcctctcaccccatgaggttgtattgtgtcttctaagcgtggtactagtgcttgccacctggtcaccagacctccaaatatggctgccaccaccaggacctttccagttactccttatatgtgtgttctatggaggggcagggaagaggtggcacttgtgattgtgtgtagattggcagggggtccattcactttgggttccatcttgctttaaatttctttccttcattttgattaagagacctctttttgatctgtattgggctaaccagagccaaatacttttgaagagtttcccagggactagtcatggtaatagcatataattgatctgaatgagatggagagaagaatgaagaggtggtggttctgggtttgatttgagttcacctgtgggcagtgggcagtgtcttggtgaaagggagcggatactactttttgcctcactgtaaagtacccactagtaaatatttcattctctctttactcccactttttacgtttgcagatgccaaaataatgtccacttctccctttcatgctgcatgttaactggttaattatactgcagaaaacttttcacctccactagtctgatacagtacatctgtacttccatataccttgcactgattttgtctgaatgccctgggagaagttgaaaatgactgaaagtgacttccgtatctcagcccatgactcagcaaggcagaatggccacccctgccaaggtttgcttctcttttcgacagtgcctcaccctccctctaggattaaagtgcttctgcttttccatgaactcctcctccatttcctttttgggatttgtcaccatccttctattctctggtcttctatttttggtgttgttcaagtgaaggaagagatgttccctctaatttctctctagcccattataacctgctatcttcgggcaacttttgatgtatgacatgtcacccttcccaacttggtctcctccaacatgctgtcttcatgtggagccctcaccacaatccctgactccggtcatttgtgcctttctcttgtcatctctgtacactacttatattcactgtgggttgagggagctaattttaagcatgttcagtggcagctcccctccagtttcagtgtcactgttaaaatttatccaaaagcaacttcactaggggttttcttaaggggtaaaggccttttacagaagctaaacccttccccacatgtggtagaatgtgctcttctgtatctactcctcaataaagcatgttctctgctaaaaaaaaaaaaaaaaaaaaaaaaaaaaac

SEQ ID NO: 6252 - DNA, 2631 bp, Homo sapiens; identical to SEQ ID NO: 6251

SEQ ID NO: 6253 - DNA, 5441 bp, Homo sapiens
gaagtgtcaaaggccagggacatccctgttgtcatcgacgcggtgagttgacttctctcctcctggctcggactcccggaaggcctgtgcagtgagcacggctccttgttctgtgcaggatggcctgtggctggtcgctcagcagccggccctcatccatggctaccggaaggctgtgctcactcccaaccacgtggagttcagcagactgtatgacgctgtggtgagtcagtggaccccctggagggtagatgcaagccctgttcgtcctgaagagggtgaaggacgagctccatgcttctgcccagcctgtccctgtggacacacctgcaagtaatcgctgtgcctctcccagcggatggcgcgtcttcccattaatgcgcttggattggatgaacgatggtgtagtgggcttgggacaggcagggactcgggtcagtcagcccctcctgcagtgcactctggacaggtcactttgtctgtgtcctgagtgcctcatctgtaatgtgatgatggcatcagcttcacggggttgtgaggatgagatgaggaaacctatgtaaagccgtgagtccccacatggtaagtgtcccatcaatgttagtgcccagtacgactggaatttgtattactcctgcaaagctctcagaacccagtcttgggtggtcctccttcagcctgctctgatgaggtagaggatgggcactggagcaggcaccgtgtcagcacctgctcggaggactcactgcaggtgatatcctgggcatcctcccacctacatggcctttaacaggtgcctgggtgatccctttagacacgagagcatgagtctcatggcggatgggacagggctatctgtcgtcgtgtgtctgaggaagactttgctttttctctgtcttcctgtgttgtcatagctcagaggccctatggacagcgatgacagccatggatctgtgctaagactcagccaagccctgggcaacgtgacggtggtccagaaaggagagcgcgacatcctctccaacggccagcagggtgagtggcggctgccctctgtgcatgggccagtgccaggtcagtcagcatggccacaccgagcatgagccctggaagacctctcccgtgcacacccgtgttcacacacattcacacagggattcctgatgagctcgtcaaccacactttcttcagagtccatgttttgacttttcactgttttgccaggggaggtgacagtggtgagggcaggctttcgagccgtgggccttacccgttggttgaattcccttgcctcagttatgagaagcagtctggcgggagggtgcctgcaacagcagggcacagtgcagggtcccgcgtctccagctgccaccttcatctcacctgtggcatccaccatccatgcagttatttgggtattttattgcatttcattctcttttatcaaaatgactggaaagtgcagaaagccccgaagctgatgctggtagtggaatctcaggcactgagtgtggcgagtctcaactggccactcccacggagcctggggaggcttcagcaagagccaagtgagagcagggcagaggccgggcccagcgccagcgaggcatctggggagccgtgcccttgttagcgctgaaaatggaagcccctccattcaggcctggacagatgatgggcagcgaatgtgctcacctgctgagctgtggggctggactaggtaccaaaatcagggtagaacactgaggcgtctgtgggcgggtgtgtgcacatccacacttgtacactcacattcacatgcacatatgtgcacacgcatgcaattcatacacatgcacagttgtgctcacagcctcgcacgcccttgcacactcgcacttatacacatgcatggtcatgctcacagcctcgcacacgccctcgcacactcatccacacacagctgtgcacaaggaacacagagcagatgttctcagagggactctgacacctttgagatgagggttttttaatcactggaaggctctcttgggtctaacaggttcagagaatgtaacacctggttttcaaaacatttttcaaagaaatagagaattcccatacacaggcatacgtgacgttatgaggccggtggaggcctcgctcggtgttgccctgtatggttgagctgtggtttaaggtgaactctggagtgtgggctgcaggtgagggctccgtccctgggagctggtgggaggagctggaggctggcgccgccctgctcagagctgcctgcttgggctcgtctgaggcggttccgagctgcaggtgtctccaccaacctgctgtgctacacagcggggtctggggcagcctcaccactgcgtgtcttggtttcctcttctgtaaaacagaggctgcctccaacccttggaacaaacagggaagagccgtagcaggcaggatgtgagtggagcctcaggctgctcctggagggtgtggctctgcctgctgtgcggccttccacacccgtggctactgtcacattcacacacatggccatgctgacacctgctctcacttctgccctgtgcagtgcttgtgtgcagccaggaaggcagcagccgcaggtgtggagggcaaggggacctcctgtcgggctccctgggcgtcctggtacactgggcgctccttgctggaccacagaaaacaaatgggtaaggccacgtcttcatttattctactttgaaaccgtctgatttttctaagctgtttcagtagctcatgcgttgaataagtagccctggaaacactgacaatgaactctaggcttcactggagagatctcggcacagacgaaccctcttggcagaagcttccaccccacacttgggcctgggcctgtccatcattcactgtggatggggcctggggcaggggtggtcttcagagctctccagagagttccgaggtgcaaccaaggcccagcagcacgctgttctgggaagttgagtggtttattctgtgtaacacagaatactaagatagaaaacagacagggtcaaggcttacttagacacttgttcttaaagatgtgaattttctttaagagacagcagaattctaggaccagggcccttggcccagttctgtagtcagagaactttatgaatgcaagcagttcccatacctctaagcatctccatttctcttctgtgagcccatcaaggtggtggctgcaggtgctaggtgtggcagacccgggcttctggagggtgggcagggctgtcatccagtggcctcatgtgtcctcattgccgggatggcagagtctgggaccatcccccaaactaggtgtgtccacatgaatttgagagccgaggaggtaggggtgtgggcaggagtcttactgttcattctgctgtgttcactcgagttgcctccacccctcccccaggagatggagccctggtagcaggaatccacattctcagacctcagatgccctctgcacctgggcactgagagcacagtcaaacagggctaagcagcttgtgccgcctggctttccccgggaacacctggcccactgtgtgccctagccctggacctgtctccgagtacatagacgtttcctgtgtgcctcctgccagggagtagtggagggttaatggtggttttcgctgtgataaacctgctttctcctcaggggcatatcagacttgaaattgacaatttggggtcctgagattgaaacaggagtcaaaaccagagcccagggtagctgcggcccccggaccacgacgcccacttccccacacctcctgctgtccccctctccgcaggtccagccctctcctggtggccgcgtttggcgcctgctctctcaccaggcagtgcaaccaccaagccttccagaagcacggtcgctccaccaccacctccgacatgatcgccgaggtgggggccgccttcagcaagctctttgaaacctgagcccacgcagaccagaagtaaacaggcaccttggacgggggagagcgtgtgtgtgatgggaaaatccggacccacgcgtgtgctgaaggcgtacggtgcttgccagattttcaacttgagcataaattggttgccattgagaatttaagaatctggaatattgcagcttttggttaaacttaatgcatggttggagatgttatggcgacactaaacaaagtattcctgaactttccttagctccttggtagtaactgggaagacagaaatgaagaaaatcacatgagaatgaagaattctttagcagctcaacagaatttctcggcctgctcccagatcggcgaagtttctacttgttactctctctgccgacgcccttcattccccccgcttcccttccctagtctttcctccggcagggagctgggcaggggtccccgggtgtctccctgagtcccgactgcactgactgggtccatcagagggctgcttcgttctccagctcatcttcttttaaagtggtgactagcttggtggtatctggctgctggtgtttggcttattgacatactccagggtaatcaatgatgactttgtttggaaacccttttggaggcaccatgggaacagaaggaaacatgagtgacgctgacccttgagtgtgtgggtggggagctctgagacgcctcctgtcccacgctctccggtgtccgtgtctacacaggggtccccatgatacccaccggccccagcagggcagaccggaccggggacgggcacggtgaagggctgcagcctggggtctgacgtggcccctagtgctgtctcaggagaaggctctggaggacttgaggcatgctgggcctggtgcagtgatggcgctaaggagacccggggaaagacagtatcgtggtcacgtatgcttaggaagcagcacagccgtgtccttagggatgttcgcgtccagtaaagacactggtaactgcggtttcagccaacactcttcatggcagtgtcgacctcgggttagcttctgttgtctttgtggatggttttcctggagcggcctgacgttgacgtgttctctggtcccatgtcttagcggggcatggtacggtttcgtgcctgacgcgtgcattagggtgttctcttatactttcagtagcgtctttccacagcaagggccaaaccctcctggttcccttcagagtctttttggcctgatgatgactcttgagtgataccctgtgatgcagacatgccccagatggattctactttctttaaaactagggactttcaagattaaaaaaaagattgtcactactaatttgacgcctaacttcagaagcttcactgtctacatgtgaacttttccagaaaaactgtgccatggacatttttcctctggggaattaacatctaaattctggtaactattaaaagacagatctggttaatttaaa

SEQ ID NO: 6254 - DNA, 10166 bp, Homo sapiens
gacactgttggttgccttactttaatgctgacctagcagccccgacaggaagctttaacataaagccttgaccctgagaagcatgggtgcgtcttgtcgtgagcaggttcatggctgtgctccatcctcagcccgctgatttttggtcttttgtcctttgatccagcagttcccacgtggatgttgtactgcttctgtcctggagaagaagagtgaggtccaactctgagcagacaccacgtcatgtggcacagggggctgacaggcgtaatcaggttcagggtgcctgttccctcaccggcctgtcctaaaaagcttgccaggcgcttagaaagggccccactacctccagcagaaggccaggagcttcaaggcacctgcaggaggtggcgggggctgagcaggacccacgtccccgtgctcagcgtcccctgcagccaacttggcccctccctcacggccctcccacctcattttttatgggggtgggtttctctactcagaagcatgggcagggcgcagtggctcacgcctgtaatcctggcactttgggaggctgaggtgggaggatcacctgaggtcgggagtttgagaccagcctgacccacgtggagaaaacctgtctctactaaaaataaaaaatcagccgagcatgggagtgcatgcctgtaatcctagctactcaggaggctgaggcaggagaatcgcttgaacctgggaggcagaggcagaggttgtggtgagccgagatcacgccattgcactccagcctgggtgacaagagtgaaactccgtctcaaaaaaaaagcatggtcacgggggatgtctgggcctctgatggccccacgtcctgttgacctacccggctcctggggtgatgtccctgaccttggtgcggcactcaccttgatgttgatgccgtgggcagtcaggccccggcgcagggtgtcgcatgcttccagcaggggctgcctttctaggagctgctgccgccgggcgtcccccgtggcctcgggcatggccagcgcaaactgccggaccttctgccggaaccgcaccagctcgtccaccacaccatgcaaggtagcctcgctgccgtctcctgaaacgtactgaagccagcagggcgcggttacgtcccccggagactgtggattgtggatgcccccctccccaccccgtggttgggctctgggccgacacccacccagccctgggcttccctgattccctgcagctgggcctctttctgggtctggcagggatgggtacagcccgcgagcgctgggctctgggcaaggctccactcaactctgagcatctgtcgtccaagcaaggctgagtgatcctcactcgggagttggaagaaagggctgggggctgcatgccgccccgccctgaacacaaacgctccctggcttccagacctcacgcaattgtggccgaggtatcaggagcaacctgaggatgaggctggggggcagcgactgagcgcttgcacacgtgtgtttcggcaaatggtctgagattcacagcctcaggtgctgaggacgggatttgcgcagaaggcctcgcgctgtcctcccactgagaacagatcctggggcggtgtggaaggggcagctgtacctatttgttaaatccatgtgtgtaaaataagaaacagacacaacatttgaccttggtgtcaaactacttaaacctcacacacccctcagttattgcttccatgataaaagacagtttttgttattacagaaatatgagcccagagtgggcccagacattgggccttgcggccagaggaaggtgaatgagatatctttgacaagggctaggcagagcttggccagatcccacttttcttactcaaaacagactccggaaagccacccctaaaaatgaacatgtacattgcaaaaacttgggtcatctcacaccagtcgacttttatgtgattggcaacagacgccggactgctggaaaggggaactaagtctaccaggtgatcaacaggtatacaaatgagccaaacttggaaaagacactatagttctctgttgagagccagcgagacatgtttggcccagagccaggccttcagcacacctgcttgggccccagtcccaagcggcgggaccctcggggtgctgggcagctggtctagagtggcagcccccgtccaggcagcagcagccgagccacaccccaaaagagccagagcgccttgtgctgagaattctacaagggtgtccaaagaatgacagggatgttcagggacacagcgccagccccaaggggcctctgtcagccacatacaaagtgatggtggggactttaagaataaggcaggaaacctcaaatctgtattgatagaataaacgagtttcaggtgagcctgataaggaagaggacattttcataggatccaagtctctttgcaaaaatgctcttgagttacaacggaagagaaggaatgtggagaagcctggcagcgtccaccttcactgcacagccagggtgagcctcgctgggaaggtgcaggtgactcgtgcctgtcggggagcccgtcctgtccgtacaaaacatgtgccaggcaagggggctcaggtcgccaacttgccctcaaatgggtcaggaaaaaatgttctcttactgtgcctgtgacttctgcacattctgagagtctttgaacataaacgtgtgtgcagagctggcgacattctgttgctgagatggactcatctctggttctgcgcacgagagtttgccaactgcagaagtagaattgtgcaattccaattaataagtattggctctgagtgtgtttatttttccaggaaagtaacatgtttttaaacaggtaaatacattagtgtggcatcataatgctctattccaagttaaaagggtaaaggttattgtcccaacatggagaaaattccagaattaagcatttaaaataataggacctacctgttgatttgccagagaaattccaacagtttcaaaaaactgttcaaagtaagagatgatggcaccaaacacagcaggacttctcggcccttcaggttcctgtaagagatcatgtcgcagaagctccttaaaagcagtcttgatggcagtgggcaaacggaattcaatgtcaaaagacaaaggcttcagcaggtcacttcagtctggcctttctcctggcttctatggagggaggacacagctctggcatcggctacctcactgcagaccatacaactataggtgcatgaggaatctcttgtgcctcagtttacccatcagtcatgtgggtggtgactagctcatcaggcttcgcgggtgaagcatgaccgtggagtatggcaggtggcgcatggtaggtggaggctgagtgggcactgggctgggtttctcagaaaacggggaaatcctggtacgtggctcacatcagttaccaagcacagagacccttgggtgacactagccttagtttgcaggtgccccagaattgcaaagcttgggaaggaaaagcgcaggacaaaagccagcctctttacttgtcccgccccttgccacaagaggcccctgttgccctagagctgggccagcctggtagtgccggcagcagctgcggtgaaggcaggaggccgcggacgggctgaggaggaggagctcccgtgcaggagcagcctggctgctggacctgccccagcccggcctggctgccttcagtgcggggcagcctgttcctgcagccggctgtgactcaaatgcccgcccccctcagaggcgagccctgcgcgtctgcagtatttggaccgaaggcacccggcaagggcacatggcaccctgccccacctgctggtgctctgaaacccaacactgcacgcagccagggatggagacctccacagagatgctcaactaacagagcatgtggccagaacccccaggtgtttccagaggtgggagaggcacaaacagcctcggcttcccgggtcatcaaaggtcacggggctcctgacgcagcgcctcccagggcctggcaggggaccctcagacgtgcaggaaccaaagcctgccgccgccttcacggtctttgtcccacctgccaaacacttgcagtgacccacgagtccaggctcagacccctgggtgcttggtgtggtcatcacactggggtgcagattgcataacagtgccttggggtaaatgggtctttccttaaaaagttccccacaaaagctctctctgtgaaagggccatgaatgcagtggggacatgagatgtgtcccctgaggatcaagcacacagaatttctcagcctcaggggctcctgagagcttgttccccaggtggccctgaggcccgggagggtcaagccccaggctgggtgccatcccgtgtgtcagcggcagactcgggctccatgagttcctccacagaagctgcgggaggcgaaatcagcagagatgccacccagccgacatgagaaaaacccaccagaggacccgacccatgcccctggcagcaggaccgcaaggccacctgttcgttgagctaccttcagggacgccctgagctgtccattcccgtggtgtgcaaggcccaggatggcatcaaccaccctgggtgtgtcaaagtcatctgccaaggccgccttcacggccctcttggtgctggagagcctgagggaagaggagagaacagtcacagcagagggagctccactctccccaggcggcccccacaccagtccttccccagggagagacgctgggggctctaatctggggactttctctaggtcatattcccaaagacttgagttcctgagtagcagaaaattatgtaacatcaactgcaaactgtcatgttaccccaagaaaaagtcccagagcagaggtcacctgtgacacttaaaatacaagacacacgtgggcattttcatgatggttttaaaaatcaatagatattgaggggagtggcaaggaagactcggtgggggagagacggcacggctgaccactcacaaagagaggctggggaggcccagcccggggctcccggatctcagcctcccgtggccactggctgcctaccctgctgaagtggcaggggtgggttatcaccaagaccatccggaagactctgcacgccgggatgaatgtgcagcgctgcccaggacacccgtgggtggggagtggaggcgatgctgtgggcccaggcctgtgtgttttatagattttggctcctcacagtcaggactgggagggatgagcagctccgctcctcgcacagggaacccgagcccaaagccactctgagcagggggctcagagcctgagggccccaggcacacttcctgccagcgccgtctccctgggatgtctcgggagcccctgaccccacacctcctgtccagcacccagtgtcctgtggcctctggggagcccctgaccccacacctcctgtccagctcccagtcccctgtggcctctggggagcccctgaccccacacctgcacctcctgcccagcaccctgtctcctggggcctctctgggcagtccctgaccccaaacctcctgtccagcgccctgtctcctgggggcccctcttccccttcaagagcccaccagcagcacccagcaggccacaggaggggtgccacgccgggtgctaggcgggcctcttacctctcccacagcatcgcttccctgacggagccgcaggccagctgccccttcatgtaggcacgtgcgtcctccaggaaagagcccagccccaggagcagctgctgagcttggagcatggcgctgtcactgtagtcgatggctgaggaggaagagatggtcactgaggcggtgcccaccatgctgtgcccctgccctggtccagcagaatcagtgttttctgagggcactgccacccagggaccacacggagagcgggacatgtggctctcacgccctccagtgaccgcgagtccctaggcccactggacacagaccacagggtctgtcccagctcagtggcacctgccgtgggagaacaaggtggcagtggagacatgctcccagtgcttccagccaagaggtgcatttccactgacggatggatggaggtgcggatgaatggctggctctggaaagaaggagccccgccctggatggatggaggtgcggatgaatggctagctctggaaagagggagccccgccctggggtcagaggcacctctagggaaggcccccccgagggaaagtgcctgtgtgtgatgggacagcccaaagggggagggaggagcagtccccagacctggctttagagtctgtgggtgtttcttaggccatctggatgaggagcccaaagtggaagggaggagcagtccccagacctggctttagagtctgtgggtgtttcttaggccacctggatgaggggccagtgtttctgtttacatctgttcatttcttgtggtttctagtctactgcattctgatgggtaagacaacaggagtgaatcgctttgcaatgatcacatatccttggatatcagcaaagccagccacatatttctagaaccttctcgtgcctactctgtttcccaggctgtctgagtccacagtccatgcttttgaggagtgctgctttaaacagctctttgaaaaccacaagaataaaaagagcctatctggacacatatgctcaaaattacatctcaacatgcctccaagtcctgacttcaaaacgagaattccaaaatcagacatggcttcaagctggaagcaacacagtgaaaacctcccccagggctgtctaatatcttacttaacatttttcctttttttctaaattcactttcagtttttgctttgaatagcttgatagaaaagagaaaaagccagaaacccacaaagcgatctgacaaaatttaaagataatattcggggactgatagagttgatgcatgggaggctgttagaataagattaccattaatgacacagcaagatgaggcatccagatggggaggggcagacagatgcccaggatggagacgccttctgcctcaaggtcaaggacagctgcatttctccaaagaggattctgctctacagatgggagacgcttctccaaagtgtcagcgcagcacagactgcaagggatgccaccaccgtccccctccatcttcccaaaggtgaagaaacaatgtctgggaagatcctgaactcccacaccattcgtggatggaagctcagacagcaagcgacggcccagctcctcatggccacctccgacctcggcggggtggggcagtcgtgtccactgtggggatccacgtcctgactaaccttgtgttcctagaaatccctcaccggcagatcggtgcctcctgaatcccacccaaaattcccactgggaatgtgttcctgaaagagctgcccaggcttgagaaagcctcttttcagaccaaacttcgtattcaaagctcaaaaagaactgcacacaattaggacagtcatacaagatgctgcccctaatcctgccacaatctgcgagaagggaggcggggcttccgagggcaaagtgcccctgggaagggatctgcagggaacagctttgaaaggaccacagcccccagccacgaggggagcaagcacgagccggggagagagctctgcgctcgcacacgggattcatctccgccgcctctgcccgtttccagcaacacggagccaggcggaaacagtttctccagcccattcgcctccccgactcttcctctcacggcacggctgggctgctttcatcacgcgtaagtgcacaccacacacagatgctgcacgaggccaggcgagcacgaggctggcgacacttctttctcaagctcgtgcgcccgtgagcgcaggtcccctgggccgatgcactgcagttccaccgaggggagaggttcagaccacgtctcagaaaacctgagtttgcagtagaaagccaacgacgtggcgtcagagccaggataaagacatggcccaaggtagcctttcggtggtcaaaggtgcaggtgtctgtgtgcccctctcacgctgacagagctgcaggccgggtgaaattctgcaggcacagcacaggggagggagatggatggggaccagcccaggggctcacccaaacccaccaaagctttgtgtgtgacataaagtgtgctggccagatagattcaccccatgggggaatgagaataaactatgtttcggctgcatgtccccactcccatcgtcttcattaaaaaggtgaaatcatcaatttggagcaagagagctaagtaggagggacaagaagggggagagggaggtggcatgacaacagcagcgacccagggcctcggcagtgtcaatggagcagaggggacaccagaggccagaaggacagcaaccctcgctcaccaggaaggaactgtcaccatctccagaggacactggccctgctcctgcagcactagccatacactgggaccttattgccagttaggtggtcaagccaggcagggcagtatcactgtccccagccctcacttgccaccagggatgcagctctggataacgactttttttttttttttttttttttttttttttttttttgagacagggtcttgctctgttacccaggctggagtgcagtggtgcgatctcggctcactgcacctccgcctcctggattgaagtgattctcctgcctcagcctcccgagtagctgagattacaggtgcatgccaccaagccaatttttttgtatttttttcagatggagtcttgctcagccacccaggctagagagcagtggcatgatcatggctcactgcagcctctgcctcccaggttcaagcaattctcctgcttcaccctcctgactagctgggattataggcacacatcgccatgcctggctaatttttgtatttttaggagagatggggttttaccacgttggccaaactggtctcgaactcctgacctcaagtgatccacctgcctcagcctcccaaagtgttgagattacaggtgtgagccatcgtgccaggccttttgtattttttgtagagataagatctcactatgttgcccaggcgggtctcaaactcctggactcaaaacatctgccagcctcggcctcccaaagtgctgggatcatacacgtgagccaccatgccaggccagtgctagacaactcctggccaagagcctagcccggggcagcaggcaactgtgcagcatgggaggaaccgtcatcacccatccaggagaccttgctctgctacacaccgttcggggaagtgctgcccctgggcaggacaggcagggtcacgtttgagggctcccatgttcaggggccgtgccaggctggccccttccaatctcccagttcacacagcaggaagccgaggtgctgcgagttcacgacttgtccagacccagagagaaggagtggagaggactcgagcttgacgaggaagcccacatccactgtgggccgggcccagaccagcactgggatccctcgtcctctgggttcactctcaacccgaaccgtaaggcacacagcagcctcactcaacaaggttctgcttattctctggcctgcattttgctgttttcagtcctgtcagaatgactgtctccgagctggggggggagtccactccacgtgtgctcggctcacctgagcggtagctgctccgcaggcagaagaaccggaagacatcgggggaaaaggtcttcagaaagtcctggtaaagcgagagacaggcagtcacgaggctttgcttttacgcttcgcactgttcagagaatatgttactttctacaattacataagttatctctacctatcaagaaatcaggaaccttgatgaaaatgagccctccaaactcacaattaccacctgtttcctggtgatttcctcactgaactttccacgttcgatctcagtatttgtggaaagagcaagaagagaaagccggtttgcactgaaaatccgcacctgcgcaggctccaggaggagtgtgtcctgtgctcagcctgggctctctttctgcacgacagggacgtgggacagacagcatggagcgatgctgtgctcaggaagagaccaggtaggtggcgggag

SEQ ID NO: 6255 - DNA, 493 bp, Homo sapiens
caggacccagtacaccctccgcagccgctggcccgggtgctaagtccctcattgccccgggccagcagggctggccggctgctccgagtgcggggcccgccaagcccacgcccacccggaactccagctggcccgcaagcgctgcaggcagccccagttcccgctcgcgcctctccctccacacctccctgcaagctgagggagtgggctccagccttggccagcccagaaaggggctcccacagtgcagtggtgggctgaagggctcctcaaatgccgccaaagtgggagcccaggcagaggaggtgctgagagcaagcgagggctctgaggactgccagcatgctgtcacctctcattttgtttaatgttttctattttaatgttttgtattatcaggtgtctgtcaagtcaggatcactttacatgctactgcagtgtataatcttgtcacaatgtattggctcataataataaaaaccaccaaatatta

SEQ ID NO: 6256 - DNA, 1496 bp, Homo sapiens
cccaacttctacattctaggatgaacccacaaaccacctggacatggagaccattgaggctctgggccgtgcctcaacaatttcagggtgagtgtgccttcaccctgaccactcctcccaggcctcggtgcctcttgtgtccccctgagcacctcctgccctcctgtctttcagggtggtgtgattctggtgtcccacgatgagcgctttatcaggctggtgtgccgggagttgtgggtatgcgaaggaggcggcgtcacccgtgtggaaggaggatttgaccagtaccgcgccctcctccaggaacagtttcgccgcgaaggcttcctctagggccaccaggctgaggactcgcccaggacatggactggtctctcagacccctgggccaccatgtaggccaccactccaggccgtggacttcccccaacttggggacagccttattcccaaatgtctctatccttttgactggagcatcttctgcacaaccttgggagcccatccaagggttggtgaggactggtctcccgggggtgggggtctggggggtaccctctggggttatagattcccccactgccccagctctgactggaccccaagtggctgctatgtaaattaaatctctccccgcgtctcctttgcctcatgtctgctgctccctgggcagtggttgcctcctactgagggctgtggactctcggattggcgttttcctatggcacttgtatccctcacgtgtaggaagcaatagcagcaccagccttgcctctagaagagacattgtcaagctactggggcatggaggtcatctgcctgcctgaccttggggtgggctgagccagtggaatgaagggcagtgtattggcatcattgcggtgctgttagccctagcctgggctcagcctcagctgaaggggtcttgggttctgtcgtcacagcccccactgatgggcagttgaactgattgtgtaacctggcctcacacgtggccagctgctttctccagtcatatctggctccggcttgccctgcttctctgctctctagactcagcactgaagagaagccatctttgtcctcactttgcttgggtgattgcatgttctttatatttcctctaaccatataggaggggcctgggaaatagggaatttaggacagggtctaacaggaaggcatggaacactttcttttcaaatgaagcaatctttaagaggggagagatgttgaacacaggtagtatcatttataaatattatttcttgaggagttagctgttatatgtcattgttatgcagaggacgttaaaatagagacatttgagctgagcacagtggtacgcacctgtagtcccagctgttggggaggccaaggtgggaggattgcttgagcccaggggtttgcggccagcctgggaaacttagcaagaccacttctctcaaaagaaaaaaataaaacagacatattgcgttgctctcagtgacaacaaa

SEQ ID NO: 6257 - DNA, 3981 bp, Homo sapiens
tgatacctgagtggtaggagtacaagccctttctaattttcttctgaacatgatattactcgtgtaggaagttatttttttaagtaataaatctagtctacctcatctcttctcccaggcctgagctgaagcctgtggacaaggaatcagaggtcgtaatgaagtaagtgctgggccagtggggctggtggggaattgcttgcttccagctgcccccacatcctcacccctacctcctgcaggttccctgatgggtttgagaagttctcgccgccaattctgcagctagatgaggtggatttctactacgatccgaagcacgtcatcttcagtcgcctctctgtgtctgctgatctcgagtctcgcatctgtgtggtaaggctgctgtttctctgtgctgcgagctgggactctcctgtctaagtgtgtggtgtggattggcccagatcctcaggctgtaaagggacgaggtctgtggaacaggagtgagggcccgggctaaggattttgcaggacttacactagccctgtcctctggccgcacagcgctgctcttcagggaggaagagcctagtgtatagtgttttaaaaatacttaaaaatacttaaagcagtgctttaccttattggtctcggttctgagttttctaaacctggagacattgaggagagagcatgggcttcagggtcagacttcggatcttgactatgccatttcctagcttggttaccaagcagcttcctaactcttaagatggcgctgacatctacctcacttggttcttgggaaaagtaagtccccagcacttagcaaatactcaagtattgctcaccttagtatatgcatttttctgtagagttagagttccttttttttttttttcggagacagagtcctgccctgttgccccggctggagtgcaatggcacaatcttggctcaccgcagctttcgcctcccgggttcaaacagttctccctcagccccacaagtagctgagattacaggcacccgccaccatgcccagctaattttttgcatttttagtagagatggggttttaccatattggccaggctggtctcaaactcctgacctcaaatgatctgcctgcctcagcctcccaaagtgctgggaatacaggcctgagccaccgtgcccggctagagtccttaaaaatatttttttggttgttgaaggagtcatcgggactggggactgcctgggaccccttctaatttccttctcctctgtgttacacacagcggtgctctttttattgatacataattgtacatatttatggggtacagagtgatacttccatgcatgtatacaatgtgtaatgatcaaatcagggtaattagcatattcatcataaacatttatcactttatgttgggaacattcagaatcttctagctttttgaaaatgtacagtctatcattgtgaactgtagcgtccctgcagtgctgtagaaccctagaacttattcctccattcctcctatctaactgcaattttgtttcagttaaccaacctctcccgaacccctctctcaattcccctcctccccccttatccttcccagcctctagtaaccacaactctgctctctacttctatgtgctcaacactttttagtgcccacatatgaatgagaacataccgtatttatttttctggcacacactgtatgacattttcatgtttcttaaggttggagagaatggggctgggaagtctaccatgctgaagctgcttttgggggacctggcacctgttcggggcatcagacacgctcacaggtcaggcccacccgcacccctgcccccatgagcacatttgcaggcacccatgctgcctgcgctccttcgtggccattgcctttgtctgtttttccacctcggcttctgcctgcaggaatctgaagattggctatttcagccagcaccatgtggagcagctggacctaaacgtcagtgctgtggaactgctggcacgcaagtttcctggtgagttagggatttgagtcgggggaagagtttgagtagggaagagggctgaggctgaccccggcagctaggcctgccttggggtgcgtgcagagcagccccgccaagcctagatggaaggacatggggacttggaggtgtggctggagggcacagggagggtgttgggccaagaagccacctgatctggggagtccttttccagggcggcctgaggaggagtaccgtcaccagctgggtcggtatggcatctccggagaactggccatgcgtcctcttgccagcctgtctgggggccagaagagccgagtggcctttgctcagatgactatgccctggtgaggcctcattttccagagctcttcccctcccatttccccttcttgcccagtagaaaactgtatcagaaggctttattttctctcaccgcaccccttcactgcccaccttcctggttctgccttccagccccaacttctacattctggatgaacccacaaaccacctggacatggagaccattgaggctctgggccgtgccctcaacaatttcagggtgagtgtgccttcaccctgaccactcctcccaggcctcggtgcctcttgtgtccccctgagcacctcctgccctcctgtctttcagggtggtgtgattctggtgtcccacgatgagcgctttatcaggctggtgtgccgggagttgtgggtatgcgaaggaggcggcgtcacccgtgtggaaggaggatttgaccagtaccgcgccctcctccaggaacagttccgccgcgaaggcttcctctagggccaccaggctgaggactcgcccaggacatggactggtctctcagacccctgggccaccatgtaggccaccactccaggccgtggacttcccccaacttggggacagccttattcccaaatgtctctatccttttgactggagcatcttctgcacaaccttgggagcccatccaagggttggtgaggactggtctcccgggggtgggggtctggggggtaccctctggggttatagattcccccactgccccagctctgactggaccccaagtggctgctatgtaaattaaatctctccccgcgtctcctttgcctcatgtctgctgctccctgggcagtggttgcctcctactgagggctgtggactctcggattggcgttttcctatggcacttgtatccctcacgtgtaggaagcaatagcagcaccagccttgcctctagaagagacattgtcaagctactggggcatggaggtcatctgcctgcctgaccttggggtgggctgagccagtggaatgaagggcagtgtattggcatcattgcggtgctgttagccctagcctgggctcagcctcagctgaaggggtcttgggttctgtcgtcacagcccccactgatgggcagttgaactgattgtgtaacctggcctcacacgtggccagctgctttctccagtcatatctggctccggcttgccctgcttctctgctctctagactcagcactgaagagaaaccatctttgtcctcactttgcttgggtgattgcatgttctttatatttcctctaaccatataggaggggcctgggaaatagggaatttaggacagggtctaacaggaaggcatagaacactttcttttcaaatgaagcaatctttaagaggggagagatgttgaacacaggtagtatcatttataaatattatttcttgaggagttagctgttatatgtcattgttatgcagaggacgttaaaatagagacatttgagctgagcacagtggtacgcacctgtagtcccagctgttggggaggccaaggtgggaggattgcttgagcccaggggtttgcggccagcctgggaaacttagcaagaccacttctctcaaaagaaaaaaataaaacagacatattgcgttgctctcagtgacaacaaa

SEQ ID NO: 6258 - DNA, 8690 bp, Homo sapiens
gtctcacagcgactgcgcggacgggttcctgagtggaacatggcgacttgcgccgaaatcctgcggagcgagttccccgaaattgacggacaagtcttcgactacgtgaccggtaagcagaactgaatcggccggctggggagaccgaagtggaggccgggggaaagtctaagcgagcgtcgtgcccgggactgttgccaggcctctcctctgcatgacctcttgtcccgggggctggttgggtctggagcctggactggggcctctgtctggggactgaaactgcttgtgtgtccaccctacccgataccttcctcgttctaccacgccctgcccaggcgtcttgcacagcggcagcgcggacttcgagtctgtggatgacctggtggaagctgtaggggaactattgcaagaggtgtccggggacagcaaggatgacgcgggcatcagggccgtgtgccagcgcatgtacaacactctgcgtctgtatgtgccagggagtaggggttgatgggggcgaagggacggcgaacggtccggagacaagaggtgggggaggaagatctgatggccatagagcttttccctcaactcctaactctgcgctttctatccctacccacatagggctgagccacaaagccagggaaatagccaggtgctactggacgcccctatccagttgtcaaagataacggagaactacggtgagagtgaggggaggttgaactaactgcccccctgtgcttttctccgcccccaaccatctgctgcctgcagcttagggctcctacgtcttttccacaggacaaggttgtaggagctagttgatgtctttaccgagggcagaagagcccatgatgggggtggggaggaggttggagggttctccctccaagctcttgggtagggtaggaagcataagagcctggagctggacagacttgctttcacccccagttttgcaacttgctaaccagctgcatgatcttgtaagagttggttatctgtccccagcctcgtctatgcctctgtatccttctacgtgagttttgttttgttttgttttgttttgtttttagtgcagggaagataatagccatctatctgcagtattataaggttttgtagaaaacatctgtgtctctgcctggttcctattagtcactcaaaatgttagtttcccttccctcagggagaaggtgactgcttttcttatcgcttacagactgtggaaccaaacttccaggactgctaaagagggaacagtcctcggtgaggaggaggaagcaagggaggggactgtctgtgatggggttgggagttgactgtctaattggagtatcttttggggggatttctgactatgtcttttcctgagcctttgagtctgttcatcatgggtaagttaagagggtttactcgagatgttctctcttggggttcctttctgagcctacacccgagagtgaagtcgatgtgtttggacccttagacagtgaatgcaaagaagttagagaaggccgaggctcgacttaaggcaaagcaggagaagcgctcagagaaggacacgctcaagaccagcaaccctctgtgagtgggggaagcatggctcagaagagagcagagcagcttttgcctggacagaaggtggtggggagcactaagagctgtccatttctccctttaaagagtcttagaagaggcatcagccagccaggcaggcagcagaaaggagagtcggttggaatcatctggcaagaacaaatcctatgatgtgcgaattgagaactttgatgtgtcttttggcgataggtgagggaatagtggtggcaggggttggctttctttttctaattagaggacaatttggagaggtgaaacggggctataaacaatgttaggtttgtcattaaacttgctgtgcacctatttctagagcatctttggtctcctttctccactcctgcagagtactgctggctggagcggatgtgaacctggcatggggccgccgttacgggctggtggggcggaatgggttggggaagacaacgttactgaagatgctggccacccggagtctgcgggttccagcccacatttccctgctgcacgttgagcaagaggttgctggagatgacactcctgccctgcagagtgtgctggagagtgacagtgtgcgagaggatttgctacggagggagcgggagctcactgcccagattgctgctggcaggtgaggactcccggctagggagtaactagcagccgctgtcgcttacagagcgcctgccgtcctggaacaatccataatttgcatgtacatcctagtaatcagcagagcttagaacttggcactctgggactcagaagcccttgttctttccacagtgcccattgccctttcttgttctttccacagtgcccatttccatagtgcccaaggtaatgagcactgtgcaaacccttcctgtattctcttcctcttccagccacaaggtagccaatggcctttccaacggtatagggtgcaggacatcctcctagactgcccccgcttaggccaattgctgtttctcctccctccagggcggagggctctgaagctgcagagctggcagaaatctatgccaaactggaggagattgaggctgacaaggcacctgccaggtatttaaagctccccctccctccttcagatttcctttcccttctgtggactgttccaactgagttcttcgatttcttctctactagggcatcagtcattctcgctgggcttggctttacccctaaaatgcagcagcagcccacccggtgagtgacccttgccattcttggctttgaaccctgttgtctcagccccttcctgccctgatgaacacccacccataatgtgactccatcattctttagggagttctcaggtggctggaggatgaggctggccctggcccgggccctctttgctaggtgagtctcctgggccagtgtatgaagccctatggaagattggtcttagctcttgggaggtggcatgagttgctgacctaaaacctcaggccatgtattctttttcataggccagatcttctgctgttagatggtgagtttgaaatggggcaccctgactttaggatgggcaggggtggtagcatccaagttcctagttctccagcccttcaatcccaagtgtgtgctcccctgcttctccagaacctacaaacatgctggatgtcagggccatcctgtggctggagaattacctgcaggtgagtgcctgtgggtgctggagtgtgttggggaaaggcggcctccaagatacctgggggcctgagaactgactgccctcccaaaccgggcctgctgtcctgtgacccctcagacgtggccctccaccatcctagtcgtctcccacgaccgcaacttcttgaatgccatcgccacagacatcatccacctgcacagccagcggctagatggttaccggggagactttgagaccttcatcaagagtaagcaggagcggctgctcaaccagcagcgtgaatatgaggcgcagcagcagtatcgccagcacatccaggtgtggggcctggcagggctgggggtcccatcccaggggttccagagtgggggatagtgggggaatttgaccaatgcctacactcctccacctgcaggttttcattgaccggtttcgctacaatgccaacagggcctctcaagtgcagagtaaactcaagatgctggagaagctgtgagtacagcatccttggccagggcctgactcctgttctcttcgtctccttccgcatttgcacgccacccttgccctaccattctaggtctccccttcgctagaagccaactgtgacttcctcctctgctgggaagcagagtattccacactgttcttggagggctaatcttgactagcacgtggcaaccactaatttactttctgtttctgcttctacgtatctgcttattctgggcatttcatataaatggaatcatacaatatgacctttgtgcctggcgtcttttacctggcgtcatgtgtgaggctcatccatattgtagcgtgcgtcagagcttcatttcttttcgtggctggataatattctgttgtgtggatatacagcattttgtttattgagtcatgaggggccatttgggttgtttccattttggttattatgaataatgttgctgtgaacattggtgtacaaatttttgtgtggacatatgttttcagcttgcttgggtgtatacctaggcgcagaattgctgggttacctggtaattccaaattaatgttttgaggaactgtcaaactgttttctaaagcaacaacatcattttacattcctaccaacaagggatgagagttccaatttctccatgtctttggcagcactgttattgactttttttttttagttttagccatcctagtggctgtgaagtgatagctcattgtggttttgatttgcattgccttaataactaatgataatgtgcattgggagtttaattttgaagtgccctttctataagtgctggcaggaagcttaaaatcataaagcttagatgtttgcgacgtggaaacatatcacaatatagtaactggggataaaaagtcacaaaaagcctaattctattttttagcatacagtaaatgagaagaatggactctaaagtaatgatacctgagtggtaggagtacaagccctttctaagttttctctgaacatatattactcgtgtaggaagttatttttttaagtaataaatctagtctacctcatctcttctcccaggcctgagctgaagcctgtggacaaggaatcagaggtcgtaatgaagtaagtgctgggccagtggggctggtggggaattgcttgcttccagctgcccccacatcctcacccctacctcctgcaggttccctgatgggtttgagaagttctcgccgccaattctgcagctagatgaggtggatttctactacgatccgaagcacgtcatcttcagtcgcctctctgtgtctgctgatctcgagtctcgcatctgtgtggtaaggctgctgtttctctgtgctgcgagctgggactctcctgtctaagtgtgtggtgtggattggcccagatcctcaggctgtaaagggacgaggtctgtggaacaggagtgagggcctgggctaaggattttgcaggacttacactagccctgtcctctggccgcacagcgctgctcttcagggaggaagagcctagtgtatagtgttttaaaaatacttaaaaatacttaaagcagtgctttaccttattggtctcggttctgagttttctaaacctggagacattgaggagagagcatgggcttcagggtcagacttcggatcttgactatgccatttcctagcttggttaccaagcagcttcctaactcttaagatggcgctgacatctacctcacttggttcttgggaaaagtaagtccccagcacttagcaaatactcaagtattgctcaccttagtatatgcatttttctgtagagttccttttttttttttttttttcggagacagagtcctgccctgttgccccggctggagtgcaatggcacaatcttggctcaccgcagctttcgcctcccgggttcaaacagttctccctcagccccacaagtagctgagattacaggcacccgccaccatgcccagctaattttttgcatttttagtagagatggggttttaccatattggccaggctggtctcaaactcctgacctcaaatgatctgcctgcctcagcctcccaaagtgctgggaatacaggcctgagccaccgtgcccggctagagtccttaaaaatatttttttggttgttgaaggagtcatcgggactggggactgcctgggaccccttctaatttccttctcctctgtgttacacacagcggtgctctttttattgatacataattgtacatatttatggggtacagagtgatacttccatgcatgtatacaatgtgtaatgatcaaatcagggtaattagcatattcatcataaacatttatcactttatgttgggaacattcagaatcttctagctttttgaaaatgtacagtctatcattgtgaactgtagcgtccctgcagtgctgtagaaccctagaacttattcctccattcctcctatctaactgcaattttgtttcagttaaccaacctctcccgaacccctctctcaattcccctcctccccccttatccttcccagcctctagtaaccacaactctgctctctacttctatgtgctcaacactttttagtgcccacatatgaatgagaacataccgtatttatttttctggcacacactgtatgacattttcatgtttcttaaggttggagagaatggggctgggaagtctaccatgctgaagctgcttttgggggacctggcacctgttcggggcatcagacacgctcacaggtcaggcccacccgcacccctgcccccatgagcacatttgcaggcacccatgctgcctgcgctccttcgtggccattgcctttgtctgtttttccacctcggcttctgcctgcaggaatctgaagattggctatttcagccagcaccatgtggagcagctggacctaaacgtcagtgctgtggaactgctggcacgcaagtttcctggtgagttagggatttgagtcgggggaagagtttgagtagggaagagggctgaggctgaccccggcagctaggcctgccttggggtgcgtgcagagcagccccgccaagcctagatggaaggacatggggacttggaggtgtggctggagggcacagggagggtgttgggccaagaagccacctgatctggggagtccttttccagggcggcctgaggaggagtaccgtcaccagctgggtcggtatggcatctccggagaactggccatgcgtcctcttgccagcctgtctgggggccagaagagccgagtggcctttgctcagatgactatgccctggtgaggcctcattttccagagctcttcccctcccatttccccttcttgcccagtagaaaactgtatcagaaggctttattttctctcaccgcaccccttcactgcccaccttcctggttctgccttccagccccaacttctacattctggatgaacccacaaaccacctggacatggagaccattgaggctctgggccgtgccctcaacaatttcagggtgagtgtgccttcaccctgaccactcctcccaggcctcggtgcctcttgtgtccccctgagcacctcctgccctcctgtctttcagggtggtgtgattctggtgtcccacgatgagcgctttatcaggctggtgtgccgggagttgtgggtatgcgaaggaggcggcgtcacccgtgtggaaggaggatttgaccagtaccgcgccctcctccaggaacagtttcgccgcgaaggcttcctctagggccaccaggctgaggactcgcccaggacatggactggtctctcagacccctgggccaccatgtaggccaccactccaggccgtggacttcccccaacttggggacagccttattcccaaatgtctctatccttttgactggagcatcttctgcacaaccttgggagcccatccaagggttggtgaggactggtctcccgggggtgggggtctggggggtaccctctggggttatagattcccccactgccccagctctgactggaccccaagtggctgctatgtaaattaaatctctccccgcgtctcctttgcctcatgtctgctgctccctgggcagtggttgcctcctactgagggctgtggactctcggattggcgttttcctatggcacttgtatccctcacgtgtaggaagcaatagcagcaccagccttgcctctagaagagacattgtcaagctactggggcatggaggtcatctgcctgcctgaccttggggtgggctgagccagtggaatgaagggcagtgtattggcatcattgcggtgctgttagccctagcctgggctcagcctcagctgaaggggtcttgggttctgtcgtcacagcccccactgatgggcagttgaactgattgtgtaacctggcctcacacgtggccagctgctttctccagtcatatctggctccggcttgccctgcttctctgctctctagactcagcactgaagagaagccatctttgtcctcactttgcttgggtgattgcatgttctttatatttcctctaaccatataggaggggcctgggaaatagggaatttaggacagggtctaacaggaaggcatggaacactttcttttcaaatgaagcaatctttaagaggggagagatgttgaacacaggtagtatcatttataaatattatttcttgaggagttagctgttatatgtcattgttatgcagaggacgttaaaatagagacatttgagctgagcacagtggtacgcacctgtagtcccagctgttggggaggccaaggtgggaggattgcttgagcccaggggtttgcggccagcctgggaaacttagcaagaccacttctctcaaaagaaaaaaataaaacagacatattgcgttgctctcagtgacaacaaa

SEQ ID NO: 6259 - DNA, 9849 bp, Homo sapiens
gtcggcgctagacgccggcgcgcacgcgcagccggggccggggcggggcggcggcactgcggtgaaagccgaggcagcgggcagacgagcagggggcgggcggacatcttgggatccggagagtggccgggccggcagagcagggggccgaggacaccaggtgagccggggatctggccttatggcgtggaggaggacgctgcgggtcgtctgcctcgccgcgcagctttgtcctgccctgcactgagctggcggaaagctgcccacacccgggagtggcttcagccttcggacccgggagctagctgacggtggggcgggggcgcccggggcgcgattgcagggctggcggggagcggtgccctccacctgacccgcctggcgcctcccatgagagggataccgcttggaatcctcccagagcaggaacgctgcgcagcgccccctccctaggatcgtgccaaccccctacccctccgcgcaaggacaatttccccgtctcgtaggacagtgacacccctttgtgccgccgccttgcaccgtgacaggtctcacgccatgcggcaccccctcctcttagttcagtggcaccccgcggctcttcttccttagacctgtgacagcccccgcacccccatggcaccatcttttcccacaatgtcctccccaaggcgaaaagcctagcaccctctcattactctgcacctgaaccccaagcaggctctgtctccccagctttcccttattcaccactgtcagttcccccggccggtttttccttcttaaagccttgaccttttccatactggaaacccttacctttacgttcactccaccagcccagtttgctgctgtgggctcacctgaggacgctgcctggctttcactgaaggtctttccccttaactaaatgttccattcttgcccaaggtccccctctggttctcgggtgcccttcgctacctaccactcgatacctgtggacttggtgctttgccccaggctctacctccattttgcatctcctctcccagcctgtttgggactgagggatgggatgagtccaccaccttgagagaccgctcacccctctggaagaccttgacagccacaggaaaaggctttattttccagtttagaaaagtcctctaaagtactccctgtgaaattaataccagggctaatccaggaaatctaaaaccaaattaatgccttttctcaaacagtctaaattaatttgacccaaataatttggataattcaggcatcctgacatccctgcttcttgcttataggcacccaggccagaaatgagttacttcatgggcctggaatcacgatttcagatggaaggatttcttaattttatgagcctgcgccacccccaccccccagtccttatttttattgcattccagagctttttgaaaggggggtggtaatcagaaataactgtaataagcagcttgggtgatggaagtgtagtctgccagccctaggaccttcctcctgtgccctttgcctgcttattccactgcctggaagaggttaagccacactcccgggtccacattagggcctaagggctcccttctcttctccttataccctttcctggaatgtttgaattctgtgaattagagtgccggaagttcaggccctgcgaccttctctgaagggtagtggagcccaagagactggatgctctaaaggttatgcctgggggccccaggcctgaaccaactggagtaatgcctaccgccattcctgcagccgcaggcaggcaggcaagccttagtgagtcactggcgggagcccgagagtctgcacaggagggggccgaaaaggatcattcctgagctcagtgctggggagagggggcgggggttactgatgctcagccccaggaaagggagggtcaaaatggccttagaatcctgggcctaatctctctctgtttctttctcccatctagtgtggaataaacaggaactggagcctggctgaggggaggggcatgtctgggagggctgcagggtcacttactaaagggttgagtcaggaaagaagctccagtgacctgcacagctccacaggggatgttggcagcgattctgaggtcttcttttaccctgcccccgcctgtcctaggtctgttctcagagcgatgggccgcggagactgatctgccgccatgattggaggcttattcatctataatcacaagggggaggtgctcatctcccgagtctaccgagatgacatcgggtgagtcccctggcggagccagctgtgccccaccactccagccccccagccccagcatacaggattaggtcttttcccaccattggcttgacttgggccaccctgacccctggctgcaccctggaagctcagctagtgtagcctggctcccattaggtctggtggtattggcccggcagccagcctgccagcccctaggtgggacctgtggaatggcatggtcccacagctttaggaactccttcccttcctgcatcctgtttctctagttacagtgcctttgcccaggctggtgaattccttctttgaggaggaggaggagaaatgtctccagtgggtggggttagtggccacgctggaggcactaatccatctaagccttgctctcagaagcccttcccatatcaaacgccttcactggattctgttgaaagcccctccaggctgcccaatcctctcctgctccctttctcaggagtcgtcaggctgctgactcagctgtcttcagttcctctggcccattccctggggagtggctggaagcgtgaggcactctctgggtcactgtgggagggcagggaagccatgctaccctctcagtagacccagagcagctccatatcctgggccttcacacagagccacagcctgccttctcattctgcgcccccttgcacgcccttgttctttgcgactgaagggacctatcctagcctccgaggcgctaaagagtaggctcctctggttcctgctgcctgtttttcttcctcagagagcttgagataaagtcacagaatgggcctgtggcagtgctcttcatttggctccctggctgatgggctggcttggcccttgcgggcgtttgtccattggctggtggtgtggcatgagctagagctgcagctgtggcaaggcctggcctgtctgaacctggctggctacaccccccaccccagaccccctcctgccttggatggactgggcaagccaaggccaggtcacacgccgccttgcctgtcttgtctgcttctgcctcacggtgtgtgccgccctcccggtgtgttgtgtgtctaaccctctctctcgttgctatcactctcctcttcttgctggcgtcatttctctcatcccatctcattggctgccgtagcaataggtaagcggcctctcaagctgctgcccaggtacaggtgggtgggggcctgcccccatcgttttcctgcatcctttttcattccctcaacttgctctggagttggatcctgggcaagaatgggtagcacaattccatggccccttggtacttctccctcctttgtgacttctgaagccatgctggctttgtctaacatctggaggagtcggccctccccactggtgggatcactagcgggaggactgaagaagcagtgtctctttctgtcctggacctgggagcttacagggaagctagataaagctgggaaattagggccagccctgggagtaaggaatatctgtctctaaacctgatgaacctcactttattaaggttacatcagccttaatagttgacttccctatttcttgtggcctttagacactagcccagctcaggcactcttcccatgcctccacagggagtcataagaagggaaccactccagtggtttaggcattggctttctttggagtgtgtgtgtcagacttctgcagaaaggagggtggggctgttagcagctgtggttgatccttatggggtaaggttcacctgggtgctgagcaggccctatgcactcttttcccccaggaggaacgcagtggatgcctttcgggtcaatgttatccatgcccggcagcaggtgcgcagccccgtcaccaacattgctcgcaccagcttcttccacgttaagcggtccaacatttggctggcagcagtcaccaagcagaatgtcaacgctgccatggtcttcgaattcctctataagatgtgtgacgtgatggctgcctactttggcaagatcagcgaggaaaacatcaagaacaattttgtgctcatatatgagctgctggatggtgaggctggcgggctggcacggcagcgggcgtagggtgggaaaaaaccaggctgggcctggcctgaaggtgggtgtaggtccgaggctctggtacactctgaactttctttcctgagtatttggtctcttgggctaggatctctatgcccctcagaaggccagttcacatccagacctgaaggctggtctgaagtagaacacagaaataggccagcaggtgatcttccaaggggctaggaacctgactcaggtttgatggctgaacctcctgtattcatcctctttcctttgtggcttggaccttagttcactaactgtccacccagttttccatctcagcagctgcttcagagcctgggggagagtgagatattacaagcctcttggggtgcactgttatctctgttcctctgtagagtgtgatctaagagaaggtgaatacttccaccttcccaatgtctattttctggagaaaacagctcaaagcttcttgacttgccacccactggccatgtgactcttctattgatttcttttcttttttttttttttttttgagacagggtcttgctcttgtcacctatgctgagtgcagtggtgcaattgcagcttactgaagcctcgacctcctaggctcaagcaatcctccagccttagcctcctgagtagctgggaccataggcacatgccaccatgcttggctcatttttactattttttgtagagctgggtctcgctatgttgcccaggctggtcttgaactcctgggctcaagtgattctcccaccttggcctcccgaagtgttgggattacaggcatgagccactgcacctggccttgatttctctatttgaaaaaaatcaaacatttgaattgttttcctgtaaagcacaaatcacagaataaatgctacaaagctagaagactttcttgcggatgatcccacatgggctttgggagctgtgccggtcagatgtgtaggcccaagtaggggctggaatgaagaagctctgtccaggggctgatggttcccttctttttgcagagattctagactttggctacccacagaattccgagacaggcgcgctgaaaaccttcatcacgcagcagggcatcaagagtcaggtacttgaattgtgcagactatagtcagggtggagtccaatctcccttcatctcagctggcccctgagccttgtctgagctgactcatgagccctcccatgacaggaagtgctggcctgagcctcctgccatgattgcaggccgattttgctctgtgtggtcctcccactgcaggagcagccaattcagcatctctattaccaggaatacagctcaagcagtttccttttgcactgaggggtgggggaggaggcctggtcttgaggcctggtattcctcaggaggagcgagcttgggccctctcctctaggatccaagcctcatagctttctcctccttttctgcctcccttgctgcttcatgtgggcacctcgttggccctgcggcctccagcatcaggtaagctcttccctcagcttccacccttgcagctttgctttgtttctccaggccctgccctttggggcttataggggaaaatggattacaggtggggactagaagggatggggaatgagggtggagtggggatagagacaggatgattaaagggacagaggagtgaggccattgctgtttgtttctgccctcatgtagacaaaagaagagcagtcacagatcaccagccaggtaactgggcagattggctggcggcgagagggtatcaagtatcgtcggaatgagctcttcctggatgtgctggagagtgtgaacctgctcatgtccccacaaggtgaggtccctctcacgacaaagttggagggggcccagggcaggatcctgggcctgcctgcctgactccgctgctccccatttatctgttccatcaccagggcaggtgctgagtgcccatgtgtcgggccgggtggtgatgaagagctacctgagtggcatgcctgaatgcaagtttgggatgaatgacaagattgttattgaaaagcagggcaaaggcacagctgatgaaacaagcaagaggtgcctgaggcaggagagctggtgggagagggtgtcccttggagggctcagtggggtctagtgaaccacaagtttcttctggatttcattcccactgtaattgcaaactctgttcctgacggtaagcctggctgttcgctcttgacattagtgctacgagagatgaggggatcgtcctcagagagcaagcccctttgtttggtccctaggaccaaggccttttctgtacatactgacagcctctgcccagtgtgcctgaaacacccaggtccctagcagaaggagccccaagagatgagcttgcaaggcttccctctcatcccaagctctggggcagacctccgagtcacaaagctgcattctagcagcttttcatagtctctggtgccagcctggggtggagtggtctcccagcatgacagctgtcattctcctgtaccaatgagacctcttctgcccctgcttgcagcgggaagcaatcaattgccattgatgactgcaccttccaccagtgtgtgcgactcagcaagtttgactctgaacgcagcatcagctttatcccgccagatggagagtttgagcttatgaggtgccattggggtgtgaggaggcagctagtgctgctggcagactggggagaggaagtgggtcagctctttggtaaccttgcttcccatcccttaaggtatcgcacaaccaaggacatcatccttcccttccgggtgatcccgctagtgcgagaagtgggacgcaccaaactggaggtcaaggtggtcatcaagtccaactttaaaccctcactgctggctcagaagatcgaggtgaggacagggggctcaaggaggaggaagaacttgtccctaggaataaaggtagctgatgtcacagcttgacagagctccctgacaggtgtgtcacttctaggtgaggatcccaaccccactgaacacaagcggggtgcaggtgatctgcatgaaggggaaggccaagtacaaggccagcgagaatgccatcgtgtggaagtgagtctttccttcattaggccacagcagggctcaagatcccagtataccctcttgttttcagctttgatccttctgaatgaggggcaggggagtgtgcctgtttgcttttctaggagcctctgcttgtactgtcagtctttatacctccatgtgagtatgtacacgcctgcatttgggttcatgcacgtgcttattttttaagatgctttggcatttccctttgtaatgtatacattacaaagggaatacattgcctttgtaatgtatctgtgaagcagacaaagcaaacgatagcatgcccaagtgtctaggcagaaactgcatcctgttgttctaaagaagtagacccaagtttccatagcaagtggttagcagggtcctgaccacttctccttgttctggcacctcctgcaagctcctgggctctctccttgcttgaaatgggcaactgcccttgaaactcctccaagccccaatgggctgcccattgtccctgtgttcccaggatcaagcgcatggcaggcatgaaggaatcgcagatcagcgcagagattgagcttctgcctaccaacgacaagaagaaatgggctcgaccccccatttccatgaactttgaggtatggcagaggaggggcctagactcatgccagggtatgctggaagacctcttagagatcattccgataaaccgctgcaccttagaggtgaggaaactgaggcctagaaagaagaactggctttaattcatagatccattcttcccctttcaagcctcttagtagaaattactatttgtaatgaggcaaatcttttacttctctcagcttgtcctaacacagttctttcaaaaaacttagattgtttaaatgccaggtaagacacaaagtttacttacagacaggataatgggctgactttgctttgcgcatgttagacataattttctccaccttatttttaagttcataatattgagcaggataagtatgttctaaagcagttctttggttgctgtctcctgctgattaaaggaactgattcaaggtgtcacaggtagggctttcttctttagtcacctcttagaaggtcccacgccgccccagcttctttcaggaccccagccatacaaacacctgtagtagcgatgaagtagggcagggcaacgggacttcccagaggagagcggctgtaagaggaaggccacatttctaactagctctccttgcccaggtgccattcgcgccctctggcctcaaggtgcgctacttgaaggtgtttgaaccgaagctgaactacagcgaccatgatgtcatcaaatgggtgcgctacattggccgcagtggcatttatgaaactcgctgctagctgccactaggcagctagcccacctccccagccaccctcctccacaggtccaggtgccgctccctcccccaccacacactagtgtctcctccctcctgctttgctgccttccctttgcaccagcccgagtctaggtctgggccaagcacattacaagtgggaccggtggagcagcccctgggctccctgggcaggggagttctgaggctcctgctctcccatccacctgtctgtcctggcctaatgccaggctctgagttctgtgaccaaagccaggtgggttccctttccttcccacccctgtggccacagctctggagtgggagggttggttgcccctcacctcagagctcccccaaaggccagtaatggatccccggcctcagtccctactctgctttgggatagtgtgagcttcattttgtacacgtgtgacttcgtccagttacaaacccaataaactctgtagagtggagttgctggcttagtgttgatgtgggagctacatggggagggaactggtgttgctctccgtgcagttttctgtactgaatactctaaaggctctttccttgtcttgtcccagttaggcccctcctgggccatccaagcccttatccttgtgggttctgggcccaggtttcctggctcctcttagaaagcctcaagggcatgcagccgcagcgggccccagtaccctggggatagattctttccctagctcctttttattccccctggtcctcggactcctaggctcaagagatcttacctgccccagcctctggagtagctgggatcacaagcacgcaccaccacagcacccagctctttctctaattcttaggcagatgttttctaattagattaagcataaattaagtgtgaagtttacatttggtcttgtagccatcctaagaaattgaccttttaattccatcatttacccaagcttcccaaatcttgctgactgggtggtaggaggaaagatttgcaaggagaataacataatggactgggcgcggtggct

SEQ ID NO: 6260 - DNA, 1703 bp, Homo sapiens
aaatgtagtaaccaattacagagacttctttaaagatataactgttgtgcttttttgaaggcaaagaacctgccctgaaaaagaatctgacctgaacacatgctgtcctaagcagttagtctagtgtgtctctggggtctatgcaggtttgcagtgtacagactgttatctcctgtctcagtatttgcccttcttatggaattactttccttcctcttactaccttatttcctcctcttcatttgtctcattagttgtattagccagatatatatttacttgtaggggagggggaatgtcaaatttcagtttctaggaattatatatggcatgagtcattgctatagcatcacagaaattttcatcaacgtctatctagaacagtcaggagttctagttatgagttctgtaatagatatttattgaacatgtgagaacaatgtaaagccaatagttggttcactcaaatatttactgagcactgggatacctccatgaataaaacaaagatcctaacccttgtgaagcttcattttaatgcagggggagacagaaataaaccataaacttaacaaataggtatattttatagtaaatcagtatgtaatagatgcagtgggggggcagggaatatgaaactgtgtaaagggaaattgatagtgcttggggacagtggctgtaggttacactactcagtatggtatcaggaaaggcctccttaagaagagatgtgtgtaggccaggtgccatggctcacacctataatcccagcactttggggggccaaggcggccggatcacctgaggtcaagagttcaagactagtctggccaacatggcgaaaccccatctctcctaaaaatacaaaaattagccgggcctggtggtgcactcctgtaatcccagctacatgggaggctgaggcaggagaatcacttgaacccaggatgtggaggttgcagtgagctgagattgagccactacactccagcgtgggcgacagaaagaagagtgtgcaaagacttaaaggaggtggggggagtaagccaaacagatagagggaaaaagcattccaggcgcagccacagccatgtcctaagaatcatgcaatgcgttggaggagctgcaaggaggctggtgagtctgggtggagtgagcaagaggagtagaaagaaatgcagtgcgagaggcatcaatacctggggctgttcctggagcaccttatatactgtgaggactgcttttcactaggagttagagagcacttttgggttggggttttttttaatgtttttattgagctaaaatttacataccatacaagtcacccatttgaagtgtaaaattcagtggtttttagtatattcacagatatattcaactattaccacagtcaattttagaacattttcattggctgggcgtggtggctcacacctgtaatcccagcactttgggaggctgaggcgggtggatcacctgaggtcaggagtttgagaccagcctggccaacatggtgaagccccatttgtactacaaatacaaaaattagcaggcatggtggcacgcacctgtaatcccagctactcagggggctgaggcaggagaattgcttgaacccaggaggcggaggttgcatcacgccattacactccagcctgggcaacaagagcgaaactccttctcaaaaaaaaaaaaaaaaa

SEQ ID NO: 6261 - DNA, 214 bp, Homo sapiens
gcaacattctttttttttttttttttttgagtcagagtcttgctctgtggcccaggctggagtgcagtggcgcgatctcggctcactgcaagcttcgcctcctgggttcacgccattctcctgcctcagcctcctgagtagctgggactacaggtgcccgccaccgcgcccggctaattttttgtatttttagtagagatggggtttcactgtg

SEQ ID NO: 6262 - DNA, 2193 bp, Homo sapiens
gaaaccaaggtgttggccaggccatgctctctctgaaggctctgggggcagaccccttccaggccactcttctagcgtctgacgtccccagcagtacttgcttccatggcgggtaaggcatcccttacatcatctgcctctgtcattgcgtggccctctctgctgtgtcttctccttttatggatgccagtcattggattttgcgcctaccacaccccaatgtgacctcatcttacctaattatacctgcaaaatctctgtttccaaataaggtcacattctgaggtaatgggggttaggatttcaacacgtcttttttgggagcacgattcaacccataacaatatgtaatatacccaaggttacccatctgggaggtaactgtcttcagggtaaacttggggaagcatcccctctctgtgtgaggcaagatttgaattcttttcatagcagcaagaggacagttgaggattccgtgaggtggtttgaccaaaggattttgtctgtttcattttctctgtccaaagcaatgccatccacataattgcaattttttcagaacatggattgagaaatgcttagaggttcgttttgtttttatatgttttaaaaaaatgttacttttaacaatgaaaagagatcattccttatatattgaccagtgattagattttaaatctacttttctataaaacacaacttttattctttcctatctttgtggaaaacattcacatcaaagtgccacatcatgggtatgcatacatgtttgtatatcatagactatctggatgtttttaagtttcttatcgagatataattcatataccataagtgttgccattttgaagtgtacaattcagtggcttttagtatattgagaaggttgtacaatcataattccagaatgttttcatcacctccagaaaagaaaccctgtacccatgaacaatcagtccctctctctcacccccattccctagcaaccactaatctgctttctgtttctatggatttgcctattctggacatttcatataaatggaatcatccaatatgtggccttttatgtctggcttctacttagcatcatatttttgaggatcatccgtgctatatcatggatgggtaccatgttcctttgatggctgaataatacccccttgtagggatggaccacgtttagtttatgcacacatgagcttgagtggctgctctttaaagggtataaaagaaaccagttctccctggaggggaccagggaaatggggctcatggatggcaagaggttttttcatcatggtgttttgtgttgtttaaatttttacattgtttgtatgttacctttaagaaatgaaggaattgatgtttacaattcagtgttcttgtgaaatgcagggtgtggcatttgtgatatgaccagggcctcctcacacctctgcagcttgagattctcaccaaagcacagcacgttcctcacccaggagtagggacagcagcccaggtccccaagggctggccagtttcagctgggagatgggtgactggttccttgcaccgcccctccgcattcacaatccatgtgtccctcggcacagttatgaatcactccatagtggagccactttagggtgagggagaattaggttagcaaatgctaacactggaaacgcactgtctgcctgggtcctgcgaggctggcacagtgtcaacagctgtgtgtaggagacgtgattgcctggaacccccaagaatgcacctaaaaatcatcaaacaccatcagattacaaaccaatataaagaattgatagtttttctatggaagaatcaaaaatcactttggaaaatagaatggaaatcaaaatcctgtaatagcaataaaaactaaagacttggcctggcgtggtggttcatgcctgtaaacccagcactttgggaggctcaggtagggggacttgaggctaggagtttgaaaccaaactgggtgacatagtgagaccctgcctctacaaaaaaataaaaaaattaactaggcatggtggtgcatgcctgtagtcctagctacttgagaggctgaggcaggaggattgcttgagcccaggacttggaggctatagtgagccatgatcgtgccactgcactgcagactgagaccctgtctcaaaacaaccaaacaaacaaacaaaaataaaa

SEQ ID NO: 6263 - DNA, 2194 bp, Homo sapiens
gaaaccaaggtgttggccaggccatgctctctctgaaggctctgggggcagaccccttccaggccactcttctagcgtctgacgtccccagcagtacttgcttccatggcgggtaaggcatcccttacatcatctgcctctgtcattgcgtggccctctctgctgtgtcttctccttttatggatgccagtcattggattttgcgcctaccacaccccaatgtgacctcatcttacctaattatacctgcaaaatctctgtttccaaataaggtcacattctgaggtaatgggggttaggatttcaacacgtcttttttgggagcacgattcaacccataacaatatgtaatatacccaaggttacccatctgggaggtaactgtcttcagggtaaacttggggaagcatcccctctctgtgtgaggcaagatttgaattcttttcatagcagcaagaggacagttgaggattccgtgaggtggtttgaccaaaggattttgtctgtttcattttctctgtccaaagcaatgccatccacataattgcaattttttcagaacatggattgagaaatgcttagaggttcgttttgtttttatatgttttaaaaaaatgtgacttttaacaatgaaaagagatcattccttatatattgaccagtgattagattttaaatctacttttctataaaacacaacttttattctttcctatctttagtggaaaacattcacatcaaagtgccacatcatgggtatgcatacatgtttgtatatcatagactatctggatgtttttaagtttcttatcgagatataattcatataccataagtgttgccattttgaagtgtacaattcagtggcttttagtatattgagaaggttgtacaatcataattccagaatgttttcatcacctccagaaaagaaaccctgtacccatgaacaatcagtccctctctctcacccccattccctagcaaccactaatctgctttctgtttctatggatttgcctattctggacatttcatataaatggaatcatccaatatgtggccttttatgtctggcttctacttagcatcatatttttgaggatcatccgtgctatatcatggatgggtaccatgttcctttgatggctgaataatacccccttgtagggatggaccacgtttagtttatgcacacatgagcttgagtggctgctctttaaagggtataaaagaaaccagttctccctggaggggaccagggaaatggggctcatggatggcaagaggttttttcatcatggtgttttgtgttgtttaaatttttacattgtttgtatgttacctttaagaaatgaaggaattgatgtttacaattcagtgttcttgtgaaatgcagggtgtggcatttgtgatatgaccagggcctcctcacacctctgcagcttgagattctcaccaaagcacagcacgttcctcacccaggagtagggacagcagcccaggtccccaagggctggccagtttcagctgggagatgggtgactggttccttgcaccgcccctccgcattcacaatccatgtgtccctcggcacagttatgaatcactccatagtggagccactttagggtgagggagaattaggttagcaaatgctaacactggaaacgcactgtctgcctgggtcctgcgaggctggcacagtgtcaacagctgtgtgtaggagacgtgattgcctggaacccccaagaatgcacctaaaaatcatcaaacaccatcagattacaaaccaatataaagaattgatagtttttctatggaagaatcaaaaatcactttggaaaatagaatggaaatcaaaatcctgtaatagcaataaaaactaaagacttggcctggcgtggtggttcatgcctgtaaacccagcactttgggaggctcaggtagggggacttgaggctaggagtttgaaaccaaactgggtgacatagtgagaccctgcctctacaaaaaaataaaaaaattaactaggcatggtggtgcatgcctgtagtcctagctacttgagaggctgaggcaggaggattgcttgagcccaggacttggaggctatagtgagccatgatcgtgccactgcactgcagactgagaccctgtctcaaaacaaccaaacaaacaaacaaaaataaaa

SEQ ID NO: 6264 - DNA, 30704 bp, Homo sapiens
cgggtcccgagggccatgccctgagcagacctgaagaggtaaggactcctcaacttgggcatgactctgacactcaccactgagcactcaccttgatgctgttccagctggagtagcccagccaggacccggcctcttcccgtgtcctctcccagaccatcccaaaccatcttgttttccccgggaaccctggggactgctggctggagaagacaggaagaggtgctgcctctcccagggtcctggaacttcactccaaggccccgtgggtgcttcagtgtcccaagtggatacggattctcatggaggacatggcatagtggataataggaaagtggagccgcatgcccaagcccagcacccaggagacaactcccactgcctgccctgttcccaagccttgaaaaaggatgacttcccctggactggctgtgtgtgtatgtgtgtgtgtgagtgtgtgtatgttagtgtgtgtgtgtgagagagacagtgcgtgtgtgtgtgtgtgagtgagtgtgtgtgtgtgtgtgtgagagagtgtgtgagtgtgggtgcatgtgcatgcacctgcagggagtgtggaaggaggaaggcaagctgatcgggcatggaatagagtgggcaccctggcagccatcctttgagttgaggacaccttctttttactttctttctttcttttctttttttttttttttttttgagatggagtctctctctgttgcccaggctacagtgcagtggtatgatctcggttcactgcagcctccgcttcctgggttcaagtgactctcctgcctcagcctcccaagtagctaggagcactaggcacaggcctgtgccaccacgcctggctaatttgtgttttttgtttgtttgttttgtttgtttttgagacagagtctcgctctgtcgcccaggctggagtgaagtggcgccatcttggctcactgcaagctctgcctcccgggttcacaccattctcctgcctcagcctcccaagtagctgggactacaggcacctgccaccacactggctaattttttgtattttcagtagagacagggtttcaccgtgttagccaggatggtctcgatctcctgacctcgtgaatagagactgggtttcaccatggtggccagtctggtctgaaacttccgacctcaagtgatccatccgtcttggcctcccaaagtgctgggattacaggtgtgagccaccgtgcctggccaagttgaggacattttctgatgtcctcatcaggtcattaccgagtcttctgggcccatgccctgggcctggtgtctgctggacacaggggacacagacatgagtccacatgagtggacaggttccgtgtcctgaggggcttgagatcccacccagtgctcttcatgagctccacagcccagggatggccacgagctgtatgttcctggcccatggtgaggtcaggacagaactgggaggcagtgctataaacttgtatagcgcttggatgttgctgccgtatcccagcgtgagaccaatgctccaccccggagagcagggggcactgtcaagcgctgttggactcagtatgtccttctcattcaatggagcagatttcccttctgatcacattcaattaaggaaaatggagatgggtggtagctgttacaccagccttccctcctgtgacactgtgtgtgccgtgttcagctggaggccgaggcggtgttccgggccatcaccattgcgggccggatcaactgccctgtgtacatcaccaaggtcatgagcaagagtgcagccgacatcatcgctctggccaggaagaaaggtatgcagccggccctgggccttctgggggcagctggggcctggaagggggtgtcctgcaggttcaagttcactccctcccgaactcagacaggcagccggaggagggaggggtggagcggggatgctcctgacacaaggatggtggctggaattctttggtcccaatgaccttaggatattcacctcgataagctcagctccatttaaagagaattttaataatatattatgtttaatctaatggatccacatattaattcagcatgtcatcaatgtaaaaatcattaatattttgcatgatgttttctgtactctcttcaaaattcagtatcttacatgtacacaactcagttcagactaaccacagcctcaggttattggtggccacatgcggctcaggactgccttattggacagagcagctgtggaccccaaatatgttgttttagtgtttttaagggcaagctgacaagtagaggctagaacagcacagcttgcctgaaactagctccattttgaagataaggaaaccggggctcagagaggttacagaaatctggaagcggtaccagccgggagcgggtaagcaggcaggttctggagctacaggaagccataaggtagccactaaccacacgtggctatctaaatttaaattaagtaatgttaagtaaaatgaacaagttagtttctcagtggcaccagccacaccagcttaacagccacatgtggccggtggttgctggttgggcagctgtgatacagggcacccccctcgctgcagaaagcgctgcttgatgggctgccctagagccgggcagagcttgcagctgcctctcctactgggcagcaggtggcctcaggcgagggcagcagggggtctcgggccacatctcttgcccttggtctctaatgcaaagatctttcctggggagcccgagcctctgcctgcaggcttttctggaagaagcccgccaggccgactccttgaaagacaagcaggaacttctgggaagttagtgctcgggaagccgccctccggcactgggctgacagaaacacatccaactccctttcccctggggtgggaggaccctgaggcgtgttcccgagcaggactgagtgccagggccctcagctgtgcctcgatgagaaatctccctttattggctgctttccctgccttatgtcacttcctcaatccccagccagtgtttcctggaatcacctcccaaataagactcttgaactagattcctaagatctgcttctggcagaaccctaactgagagagtaaatcgtgtctccatggcttggcttacaaatctataaaaggacataataatgtccaaatcgtaaaagcaacagccatatccacaggttgctgggtgagtcagctgccgtacgccccatggagcgcgtggcggggcgccgacaatgtggtggagctgggcccggacacccaaggtccctgcggtgcaggcggtgatgcctgcaagaacggtggccagtgttctggccttcagccagccccgttctccctccacagtcttccaattttgtgcctttgacatctgcctcaagagagtatttgcttttaaccaggcttatgttttcccctcctaagggcccctagtttttggagagcccattgccgccagcctggggaccgatggcacccattactggagcaagaactgggccaaggctgcggcgttcgtgacttcccctcccctgagcccggaccctaccacgcccgactacttgacctccctactggcctggtgagacctgtgagaacgtggggctgggggaggcagctggggcctttggaggcagagagttaatggtgggaatccgcaggctggtttggactcatgattgtagaggaggctctgccccgtgctctgcaaggactgcgctcatatggcttacaacaggccctcacggacctgaagatctgtggcatccagtgactgttccattcacatcaattgaccacctcctgttgagccaacctactgttaagcacctgctctgtggcaggcaccatggtgtatcgggaagcactcaggatcagggatggagacaaggctgtgtcaccccggacctggcacgtcacccgtgacatctctctgtctccctcgttttactcaaagtggaagcagacagtacctgtggcagagctgcctatgggacagtgcaggaaaaggacctggaaccgagtgctccagaagtggccgctgctgcctgcagcacacttgctgtggtgcacgcacactgtggagcccagcacctcagccccttcccttctgttagccaccaggagggaagagcacttagcaatagcagggccacacagcgaggctaagtgtccaggccgctctggaagcagagacgcatgctcagaacccaccgggaggcttgcagaaggctttctggaggagggggcatcaagactaaagcttggggatgagtaggagtttgcccaataggggaggataagatggggcttcttggcagaaggaaccttggaggagggggcagtggtgtgcgcccacgtggaaatcaccatccccctgatgatacagaaacctttgactagcgtagccaagggcttactcaacatctgcagtccaatgtctggtgggcagctcacgtttacaaagaactgcagatcttcccccataaagctgctagtcccacagtcttgcccatctaagaaaatgtcaggaacacggaccagaggccctagagtctgacaacgcctcacctgtctgctgtggccatcctggctcaggccaccatcatccctggcttccgaccaagactttctatttccacacgggcccaccccaccctacccatcacagtctgctgtcagacatttagaacctagattagatcaagcacccctctgcttggaaccagtaagtcctctgccagtgaaacccaagtccctgcaacatccaacaaggcagaactcaatccggtgcacacgccctgaccaacctccctccctgggcctcctctgcccttggctccctcggtccagtcccagcttcatgctgaccctgaaccccaggcaggaccctgcctcggggcctttacactcatgggaacccctggctagttccctctttcttagacgccacatggtttgctctgtgacttccttcagatctttgctagaaggctcctcagtgacgtaattttctgattatcctcctggaaatggcatctccagcctgtccccagcacgcctcatccccacctgctttggttgaatccctgacactcactctaacagcgcccatgtgccccattcgcctctgcttattgccagtctcccccatccctcagtatagctgacacatgcagaagctctctctttctgatcttagatgcagtccccattccttaaattgtaccgggcacataggaagcatgcaacacaattttgttgaataaatgagtgaagaaaacttctaaatatactcctctgcatctaggcaattgctaacatttcctgggcctctggattggaggacagcctcaccttcctcaccttgcatttagaaccactaataatggtccattcattttttattttattttattttatttattttattttattttattttattttattattttattttattttattttttgagactgcgttttgctcttgtcgcccaggctggagtgcaatggtgcaatctcggttcactgcaacctccacctcctgggttcaagcaattctcctgccttagcctcctgagtagctgggattacaagcgcccaccaccacgcctggctaattttttttttttttttttagtagagacaaggttttgccatgttggtcaggctggtcccgatctcctgacttcaggtgatccacagcctcccaaagtgctgggattacaggtgtgagccaccacactcagcctggtccattcattttattgtcttaggtgttcagctcagggcacctgatatatcaaagagtatttgtttttaaaacaccaggggacaaaagggtaaatcccagtgaacttgtgccactttgctgtaaccaatgaatagtgtttgttctgcaagcacagcacaaacactctggccagcccttaagccaactgccttatgtcaagaagacaaatgtcagcacacattactcactttgtaacgtgcaaagcatgaggccagtgacataaatggggcatccctgacttgtgacacgtgcaggcacacgctagagagtctctcttacccactggcttccttatctattcattcattcactggctgtgctgcatgtacctgtctgaagtcaggatttgccttcaaaatgaactagggtctgaactctaccttgttttgtccttgccagtggggacttgcaggtcacaggcagcggccactgtccctacagcactgcccagaaggcggtgggcaaggacaactttaccctgatccccgagggtgtcaacgggatagaggagcggatgacggtcgtctgggacaaggcggtggtaaggctggatctcttctcaggagcattctagaaacactctacctgccctgtgaaagccgatgcattatgcacgctgggttcttaaaagttcccttcttacatggaggcggaagcagatatactaggagggcgcaggagggaacgcataacttgagagatagtagctcaagtccgggagaggcctctgcatttgtggatgtcacccttgtcctttacatcttaagattgaaaaatgttttgttttgtttctcaaccacgtcttagttcctgtggaaatggctctgtaacgctgtgtgtgtgcatgtgcacacgtgttaggagttgggatgttgagtgggtagagagagaattcctgttgcagaggaagagctgggtctcactctgatcactgacctgaaaccaaaggtttttaatcttctgttaaactggggcctggtgacatggacaagatgtcatagtggctcttgcgtcaacatacctctgtgcggttaattaaatgtcctctctgatgaggctgggccttctggggttcttgatgatggcacgtttttagctgggagaggagagaattccaagccttgcaaggcctcagctggcagtcttccatttgtgcccagctgcccctcctcctggccccattatgagatgctcttctcatctgtgggtcttgcctgtaggctactggcaaaatggatgagaaccagtttgtcgctgtcaccagcaccaatgcagccaagatctttaacctgtacccaaggaaagggcggattgccgtgggctcggatgccgacgtggtcatctgggaccccgacaagttgaagaccataacagccaaaagtcacaagtcggtaagtcctggcctatttgtgctgctgagataagtgattcttcgttgtaatcatttttaaagactggttaaaaatgatttatgaattttccaactaggatgtgatctgatatctagcctgactcagtcattcccatttctcctccagttggagagattgggaggagggatctgagcaggctcaactaagctgcttctccttctctttctctctctctcttcctctcctctctctctgtctctttgctcctgcccatggatgcatgtgttcccagccatctgacactgcttataatgtgtaagcttcagggctcagcgagggaaagtattagatctaaggttctcaatttaattatcaagctggaaaggatttgatttggtatgtcggaaacctcccactcggttttgtggctggctgctaatagacaggaaagggttggccctaaagtgcacactttttcacattccatgcccatagttatgggccttctctgctttgtatcttatatgcctttgatttctccactcatccagcaacctaccaaagatgcgtgcacagagagggtgcatgcagagatggcagaagacaactgtgcctccctgaagggcttgctttaacaccctcctgcatggccaagagtggccttgggtctggattaacaactacacgcacagacccaagaggccacagtggtccctggttcactggagtctgtgcaagcacacaggccagaagtagtgcatgtgcacaccgtgatggagctgcagtgggtgttcccatggccccatgggctatgggctcacatactgcagaaggagtatgggctcacatactggagaaggagtatgggctcacatactggagaaggagaccacaggtgtggggacaggacatgaggcacaaggaagtttcataagaaagccacaggaaacacttgtagcagctcacggccatggccctggagtatccattggctgccacagacatggcctgcagaagcagaggtctcggtagctgctcactgaccttgtccggctcaccaatccaggtcattcttataatacacaatgctccctggtaacactacttgcttcccacagcccccatctccagggaacggggtgcctgagatcatcttcccatggagaaaggtttatgccacgcacatgtacagtccagcagggcttgcaattctattatttattatgaattatttcacgtgtgtacacactgcttggggtctgtgcacataggagaggcaatgggagagcgtctgagagggtcttgccagtgagagggtgtcttggtccattttgtgctactgtaatagataccacagactgggtaatttataagaaaataaatttatgtggctcacggttctggaggctgggaatttcagtattaaaatgccggcatctggcaaaggccttcttgctgagttatcccatggcagagggcagaaggataagacaggacaagtgtgaaagaagtatcaagaggacgctgaatttgcttttataacaagcccagtctcacaataactaactcattcctgtgataatagcattaaccattaatgagggcagagccttcatgacctaatcagctcttaatggtctcacatcttaataccattgcaatggcaagtcaatgtccagttgaattttgaggggatattccaaccatagcacagggtgtgcactcctaccgccatctggctgtgggagctgccccttgcttcacaaggtgatccttatctagaaaggaacgtgaatgtctgtgtcagccagtcaaaggtcggcggacaaggacccagaaggaagtagactgagctgggattgtcttactattccttttgttgttgttgagatggagtcttgctctgttgcccaggctggagtgcagtggcgcaatctcggctcactgcaagctccgcctcccgggttcacgccattctcctgcctcagcctcccgagtagctgggactacaggtgcctgccaccacgcccggctaattttgttttgtatttttagtagagacaggtttcaccatgttagccaggatggtctcgatctcctgacctcgtgatccgcccgtgtgggcctcccaaagtgctgggattacaggtgtgagccaccgcacccagcctcttactatttcagtgtgggatcagaggccacaccagattccatgctcaggagtgggcactctgattatcatcacaatccagccaaatactgttttgtagttacttcgtgcttagcattctccatgcatcatctcatttaatcctcacgatcttctaagttaggtatattgttattgataaatgagaaaatggagagagagagaggacacatgtgtaagtttcctctggacgctgttataaagtgccacaggttgggtggtttaaacaaaagaaatttcatctcttaaaagttctggggccgggcgcggtggctcacgcctgtaatcccagcactttgggaggccgaggcgggcggatcacgaggtcaggagatcgagaccatcccggctaaaacggtgaaaccctgtctctactaaaaatacaaaaaattagccgggcgtagtggcgggcgcctgtagtcccagctactcgggaggctgaggcaggagaatggcgtgaacccgggaggcggagcttgcggtgagccgagatcccaccactgcactccagcctgggcgacagagcgagactccgtctcaaaaaaaaaaaaaaaaaaaaaaaaagttctggaaggtagaagttgaaaccaaggtgttggccaggccatgctctctctgaaggctctgggggcagaccccttccaggccactcttctagcgtctgacgtccccagcagtacttgcttccatggcgggtaaggcatcccttacatcatctgcctctgtcattgcgtggccctctctgctgtgtcttctccttttatggatgccagtcattggattttgcgcctaccacaccccaatgtgacctcatcttacctaattatacctgcaaaatctctgtttccaaataaggtcacattctgaggtaatgggggttaggatttcaacacgtcttttttgggagcacgattcaacccataacaatatgtaatatacccaaggttacccatctgggaggtaactgtcttcagggtaaacttggggaagcatcccctctctgtgtgaggcaagatttgaattcttttcatagcagcaagaggacagttgaggattccgtgaggtggtttgaccaaaggattttgtctgtttcattttctctgtccaaagcaatgccatccacataattgcaattttttcagaacatggattgagaaatgcttagaggttcgttttgtttttatatgttttaaaaaaatgttacttttaacaatgaaaagagatcattccttatatattgaccagtgattagattttaaatctacttttctataaaacacaacttttattctttcctatctttgtggaaaacattcacatcaaagtgccacatcatgggtatgcatacatgtttgtatatcatagactatctggatgtttttaagtttcttatcgagatataattcatataccataagtgttgccattttgaagtgtacaattcagtggcttttagtatattgagaaggttgtacaatcataattccagaatgttttcatcacctccagaaaagaaaccctgtacccatgaacaatcagtccctctctctcacccccattccctagcaaccactaatctgctttctgtttctatggatttgcctattctggacatttcatataaatggaatcatccaatatgtggccttttatgtctggcttctacttagcatcatatttttgaggatcatccgtgctatatcatggatgggtaccatgttcctttgatggctgaataatacccccttgtagggatggaccacgtttagtttatgcacacatgagcttgagtggctgctctttaaagggtataaaagaaaccagttctccctggaggggaccagggaaatggggctcatggatggcaagaggttttttcatcatggtgttttgtgttgtttaaatttttacattgtttgtatgttacctttaagaaatgaaggaattgatgtttacaattcagtgttcttgtgaaatgcagggtgtggcatttgtgatatgaccagggcctcctcacacctctgcagcttgagattctcaccaaagcacagcacgttcctcacccaggagtagggacagcagcccaggtccccaagggctggccagtttcagctgggagatgggtgactggttccttgcaccgcccctccgcattcacaatccatgtgtccctcggcacagttatgaatcactccatagtggagccactttagggtgagggagaattaggttagcaaatgctaacactggaaacgcactgtctgcctgggtcctgcgaggctggcacagtgtcaacagctgtgtgtaggagacgtgattgcctggaacccccaagaatgcacctaaaaatcatcaaacaccatcagattacaaaccaatataaagaattgatagtttttctatggaagaatcaaaaatcactttggaaaatagaatggaaatcaaaatcctgtaatagcaataaaaactaaagacttggcctggcgtggtggttcatgcctgtaaacccagcactttgggaggctcaggtagggggacttgaggctaggagtttgaaaccaaactgggtgacatagtgagaccctgcctctacaaaaaaataaaaaaattaactaggcatggtggtgcatgcctgtagtcctagctacttgagaggctgaggcaggaggattgcttgagcccaggacttggaggctatagtgagccatgatcgtgccactgcactgcagactgagaccctgtctcaaaacaaccaaacaaacaaacaaaaataaaaaactaaagacttacataaattcagggacttttacactgagaagatccaatatagtgaacatatcaattctttctaatctaatctataaacttgatgtgatcccatcagaaaatttaattgtttagctaggaaagcagagttcccagatgagaaatgtgagagtagctgaaatagttctgaaaaaagggaagactgggcccgggggtatcagtcatcccagttattaaaacgtgtcataaagctgcaataaaccaaacagtttggcaggggtacaagaaaagagagccaaggaatagactgactgcatatgagaatttggtttacaataaaggagacaattagaattaggaaacgatagttactcatccaattgtgttagaacacctggcccaagaggcttaacctctgccctactatttactatcaaacaaatcaaaccatggttcaaagattaagataaaataaagctatgaaaggactagaatacaacacacattttttgaaagaatgataattttgaaggggaaaggatcttgctaagcaagacacaaaacttagaaatggtaaagaatggtctgtttgaccactgactacacaaaaattatacaaaataatctgtgtggcaaaaacaattacttcatttgagttccagagacagaggaccagggagggaggacatatttgcaacacacataacaaaggataaattctttaacattgagtgtgtacttttagaaatcagtaagaagaatgccaagaccctgagaaatagaataatgtgcaaaacacagtgacaccgtaagaaataaatatagaaatggcatgtgttgatttaaaaagagacccagtctcagtcacagatgcaaataaccacctagagatagtatttttcacctgtgccagcaactgagatcaggagtttaatatacatagatactgtttaccaaaggctgtcaggtaagctcacggagttttgttgggaatggaaactagtgttgtcttttttggagggcaaatctgtcaaagatgaaaatccatttactctttggcccccaactccacatctagaaacatgttcacgtgtgcagactgtggatgcaaagtctgtttcagcagtttttagcaaaggcatggtaatgacccaactgtttattcttgggaactgggcatataaatggtagtacatcctcctgatgaaatgtagcagtgtaaaagtattttgtatgtgtgctgatatggaacaattgctgaggtaaagaaaaattaagctgagaaatgtctgtgtagagatgtgtatatgtcagacagttattcatgcctcggacatacttagagatacagaagaaactcttcagggcatatgtctcagactcaagtagaacacagacttacctttctatccaatatcttttttaccagttgattgttttcaaccatgtatgtgacctacttttaaaataataaaaagcagttggctggtgacagttgacacacaactgtcaagtattcacttgaagaataatggaaagaaggtgagttttttgttttgtttttttctggagacagagtctcgctctgtcccccaggctggagtgcagtggcacgatctcggctcactgcaacctccacctcccagattcaagcagttctcatacctcagcctcccgagtagttgggggtacaggcatgagccaccgtgcccggccgaatgtgtgttttaaaggaaatgttattttgtctttcaaattagcagagaaagaaaaaaatggcattacccaatgctggagggggtaagtgccgatatcgtgtcaattgatctgaacccttgggaaaataatttggccatatggcacacgtgctttaaaacagctctattctttcacccagtaatttgattttagaaacctagagaaaaaaattttatttaaagacacattttaagtaaaatgaagaacattttacttatttttatgtccagtacagtcaaagcagccacattgcataaccccgggggacccccttcctctttgtgatgccccagaacaatattgatttgattatagaaagccaccggcagcctacatgcgcaacggtgagttgttggttatatacactgtggaccatacagtggaatattacagtcaataaaaggtatttttagagagaaaaaaaaacattggaacacgcttatgatataatgttaggcaaaatcgctgttatgaacagctcgtttggggcagagcaaatcctgggaagtaacactgaggctgttggtgcaggcggtggagtacaacatcttcgagggtatggagtgccacggctccccactagtggtcatcagccagggcaagatcgtctttgaagacggaaacatcaacgtcaacaagggcatgggccgcttcattccgcggaaggcgttcccggagcacctgtaccagcgcgtcaaaatcaggaataaggtgagtgtgtctgcaggggagcgggcccacccgtgggaccagagccgacagcgtctcttggggaatcgagatctgacgtgtgcagagttaataatgtcatcgccctgggaacctccgtttccttatctgttaaatgggttgagacgctggcctgggctcctgtctgaggacaggagtgagcatcaaatgaggacatgcaagttccagggctttgcaaactgtagaggggtgtgcacccgtgagggtgggtggatcatgggagggacgcttaccaagctgctctgggcgctgtcctgcgtcatcttaagtaatcctgcccacccacgggaggtgctgtgatcctccttttgcagcccagagcagtgaagggcttagccagagtcacggctcagaaaccctcgggtctggccctgtggagcaaggtgttacccctggcatcttgcaggcagggcttccttcagatccgccctttcttcctttccttcctcccttgacgtttctgccctgtcgttccttattttccttgaacaaccttagcactgacctcaggacatctgtcaaagggaaggagcaggctctattcctaactttagagcaactcagaggagggaactttctcacagctgagagagactcccgcccgtggccaacatcttccccagccaggccctcccatccccatggcagctgctttccccatgagacagctgatgtttgccagaaaggccagcttcgtgtgtgtgtgtgtgtgtgtgcacgcgcacatgtgtgtatgtctatgcgtgtcatgtgtgcatgtgtacatgcatgcacgtgtgtatgtgtgcatatggggatgtgtgtgcgtgtgttggagtgtgtgtgtgtgcgcgtgtgtgtatgcgagcatgtggtgagctctgtgtgtgtggccatgtgtgtacctgtgtggtcctgttctttgtatgcttcctaagtgaccaattgagatggagaagtccagagaccttcctgcattcccaggctccagcccggactgggaggctctgcatctggttttggtctctccccagcttccataaggtgtagcaccaggtcaaagacaccaagtcgcacagatgctttgcactggatggggaaacaagggatggggtggaaacaagtcagatccgagacaaggccaggcacaggcagcaggccatatgaggacaaggggactcatggaaatccctggctgggacacccactgaagaggcagacacaccccttggctggcttcatttccttcttggtctgaagctgaggcctgcggttaacagtcagcttccgtgagggcagatatctgaccccaaatgccaagacagcaatttgcaggagcaataggatcggggggtcccattgcacagggattccttcatgcctgcaggagctagaccaggtgaaggagagacctgcatcagagcctgcctctggccacctgagcttcagggagtgatgaacggcctcacccaggaagcaatgccacagccacagagaatgcacaggatacagtgaggcccagggagtcggggagcagggctccagggacagaggggagggccgttgacatgatgtgcaggtgctgggtctttaaacttggtgctaaaattaaggcttcctcctatggagagacaggagcccagagctgggggtcagggtgctatcacctgcagagaaggagggagccaggcctggggtcagggcactgtcacctgatatggaggatgaagccccgtgttgggttagggcactgccactgactcatgctgggaccctgtacaggtccctgaacacatgctgttctccagtgcctggagcaggtgccctcccaaccttggccatccctgaggtcacctgggctgctgtcagcagttcccagcaggctgacagcctcctgcctggaagccctgctgctttcagggtctctgcccccacaaccctttcccagtggggctagggctgtggctccattgccctccttcctcgtcctcctgcaggctggtgtggaggtgtcctccccacagcatccccagccctgccccccatagacctggcccactccttgtccctctgtactgagttttctccctccctgtctcagctccccactccttccccctttctggaaccatctcccaacaaactatctgccccccgaatctttgcctcgctgttgacttctacaagaacatacatgaagatgggcccgttgctgctgccttgtctgggactcaggggtcctttccgggggtgggtaggtggtagtgtcaggcaaagtgacttctctttggaagggatttggggtcctcctgcatgaagctttgtgtgtatgagtatgcgtgtgtgtaagtgtatatatgggtgtgtatacctgtatgagtgtgtgtgtgggcatgtatgcatgtgtatacatatgtgagtatgcctttgtgaagatctgtatgtgatttaagtgtgtgtgcgtgttcacgcgtgtatgctactgtgtaggcctgttttgttactgcatgtgcatgcatatatgtgtgcatgactgcatgtatgtgagtgcgtgtgcgtggtgtgtgcgtctgtatgtgtatgcatgtgggtatgtagatgtgtgtgtatgcatgcttgtgtgtatgaatgcctgtgtgcggctgcatgtgtgtgaagtgcacctgtcgtgtgtgcgtgttgtgtgtgtgtgtgcatgcacatttgaagtgacctcaggtttctctctcgcccgcagggctctgctttatctgcccagaagggcacacatgcacagtgtcgatcaatcacactctcccttcctctgtttaggtttttggattgcaaggggtttccaggggcatgtatgacggtcctgtgtacgaggtaccagctacacccaaatatgcaactcccgctccttcagccaaatcttcgccttctaaacaccagcccccacccatcagaaacctccaccagtccaacttcagcttatcaggtaggaaagagtggtggcccaggctccccacaattgcagcagttcaggccgagtccttcctgctgcttctgaggaaatggacacgtggccttggacactagatgaagaagcagggaagggagtgtgccccacccgagcctgctctcactggtggggcagagtgggctggcatggtcaccaagcagaggggggtccatgttaggggggcaacatggtggtacctgatgtgggtttacaaagagaggtaccaaaattgtcccagtgctcatccttacacacatttggggacactttcacactcttcctcatgaaagtaaacatggagtggtggggatgaacaagagatgggagtagctgccatttgcagggcatgtgctctgtgtaagtctttagcctgttcacccactgcagtgtactaagcactttcataacccatgattttattttatcctcactactccataaagtaacattataccctatttatttaaagaggaaacggaagccccaagaaatccagtgtcaaaataccaggacttggtgctcaacaaatgtgtgggaacaaaattagatgttgacctgatccctcctgactttcttaaggtctcagggcagtgtatctgtgatttggtgagatggccacatgagggcaggcacgcacacgttgagaaagttgaactggaattttgtcctgcaaactctttgaggcgttgcatgggttgcacaccgtgctgggtactaagagtatggtgattttttttcttagaaggccggatagtaaatactttaggctttgtaagctaagaggcaacatctaggatgtcaacatctaggatgttatattcaatagccatttgaaaatgtacaaactattctcaggtcatggatcgtacagaaacaggcggtgggccggatttggtcaatggacccgtttgctaattcctggtcaggaaaggcgatatgcttagcaaaagagagagtggaaggggcaaagagagagagagagagaggatgacgtgtgaattcagattgtgtggtggcagaacctcttatccattcaggaagtgtctgattcagtgattatgccgaggaggcatgaatcaaggaggcctccccattcatctcactctccataagactttgatggaagagcttccagtgtttcatatttttgcacaaaatggaccctaaatagaatgctaaaagtcatgtgatgctcaatcagcaaaccagggattggcttcatcctgggaaaaagctatctgggtgcaacaagacacaagctctcaaggagtttgcaaactggaccactgttctggagttatgcaattaaacactgcacaattgcaattaaacatggacagaaaatcctcctccccgttgttcttagaacaagaataacaatgaagttaaaagccacctggaagggcccctcctcacccttgttctctcagtttcactcttagtcctcctgaggcccacagcaccactgctgtcagccagcctcttggcaggttgataggtgacttcatttggtaccaacaacacagatgctttccaacatcataacaacctcacagatgccctttttaatatctgcgtatgttacgttatagagctgtaccatgagttagtgtctgttttcgtccatttacattgctataaaggattacctgaggctgggtaattaaagaggtttacttggctcacggctctgcaggctgtacaagcagcacggtgccagcgtctgcttctggtgagggcctcaggctacttccagcatggcagaaggcgaaggagagctagcgtgtgcagagatcacatggcaacagaggaagaaggcagaggtgctctttaacaaccagttcttccgagagctaatagagcaagaatttactcattactgtaaggctgacaccaagccattcatgagtggtctgtccttcatgacccaaacccctcccattaggccccacctccaactttgggatcaaatttcaacacgaagttttgggggacaaaagtccaaaccatattagtgtccttttttccagcaggtattttcaaagtacagacatgcaaccagcaaggtacagatggttgtaaggaaaaagttactaagtgctaggcctgattccaggcctttaggggagacttgtattgcaagaagacatattgtctaccagtgaaacaatgggagaaaagaaaagtcactactgtgaaccaaattcttagtggcttacatagacaaatcatgtaatgttggagttggaaggggctcatctagtctactgttcttattgtgcagaaaaggaaatgaggccaagggagtggggtggtgtcttactccaaattgcccaaattcaaggcatgattagcactgaaacttgagtctccttcctgttgcaggtgacaactacctggggccagtgttctgcagctagtaaaaaaaattcaccaagacagttgtcggtaaagaaagtcagatgtattagaaaaagtatgaaagggtacagtgggtaggtcagcaagaaaggagccgactgcaaggaaacaaaggcttgctggagattttataggatggtgcttgtgctgtgtgccgaagagggctttgtgcagtactgataatgctgtggttgcagtgagctaacttacttacgtttttctgttagctgaggatctggtgataagttgagtacaggaaggctgtgttgtagaccatgaagaaaggcagacttacagcttatttgctttctctttttgattttcctcagttccgccggctcaacttcccctccctgataaggactctatccttcccacctttcagcattatccacccttcatgatttactcatttaataaatatttgttgagctccaggcactgggtttgctgctagaattttacatctttatgcaagagaataggtaaaagtagaatggatggttggttttgaaagattaaaattaagaacctctgcacaccacccccccccccttcagatccacctatcgccaatgagggaagtaaatccagcttgcggagttcacatgcacatgcacacacatatgcacatgcatatacaaatgtgtacacacacaatatgtaaaatacctttggagtgtgggacagtgtgcctaagatcatgggctttgaaaaccaaccagtttgggcttcaatcctggcttccccacccaacacctgtgtcccgcaagacacgtggcctgaacctcaaattgctcacccgtaagttgggagtacaaacacccccttcatagtatgattgtgtgccctaaatgcagtaacatgttaaagcaccaaatgtgcgcctgcacacagtaggcactcagtaagtgtttgatcacctgtctcaggaatgtcggattttactggggattttgacaagaacaccacaaggtggtcagggctgaaggtggggggagcccagggactgaggggcacagaagagggagcagtggactctgtggaggccagggaggcttcccatggctggtcctggactgagccctgaatgaaggtgggtccagtggagtgcatggcagagtacatggcctccaggagcagcgtggaactgatgctaacagatcccatccagcagcgattggcgctctctttcaggtgcccagatagatgacaacaatcccaggcgcaccggccaccgcatcgtggcgccccctggtggccgctccaacatcaccagcctcggttgaacgtggatgcgcggaggagctagcctgaaggattctgggaatcatgtccatcccttttcctgtcagtgtttttgaaacccacagttttagttggtgctgatggagggagggggaagtcgaaggatgctctttcccttttctgtttaggaagaagtggtactagtgtggtgtgtttgcttggaaattccttgccccacagttgtgttcatgctgaatccacctcggagcatggtgttttcattcccccttcctagtgaaccacaggttttagcattgtcttgttctgtcccttccacttctaactccactggctccatgattctctgagtggtggttcctttgcaccctgtagatgttctaggatagttgatgcatgttactaaattacgtatgcaagtctgtgagtgcgtctgaggggacatcgccaaggactgactgagacacgatgccgagacctcaagccctgaggggcagtcccaaaacccttacagtgaagatgtttactcattgcccccacctctggtccacactagaaagaagctcgccccacctccacctgtgagatccgtgaattctcggaatggcaggggaagccttgcactaggttgcagagaagcatcctccacatcctgtgtcagaaaccctggtctccgtggcacttgtaactcaccgtgctgtcttctggtctgtgtgtgttcttcaagccagctctaggcttcaggccgagccaggttcacactcagaaagaggtctccccatccccattcggggctgacgatggggggctgatggctgcccctgcgtggcctgagtcctggtccctctgaggcagttgacggggcagtcagatttttaaagttttgtacaaagttttcctttgtaatcactcccatttttacttaacaaccaacttgttgtggctcttatttctgaattcaaagcttgtgaaaaaataaagaaaatgaactgcccactgacctgactagggcactttcatttcagtggtggtgtctggattgggtacgaatgcttggcagtccccccgcgtgataacgaatggtggtggctgcttcctgaggactcactcttggtagagactggtggatgtgggggtgggaggagagattcagttcatgacttctgaaggctgagttcctgagacccaaggaggcgaagagagggaagacggctgatgggcgggcttccacaaaataggctcaaatcttgcattgattccctcctgttgggcctttcctggctctctttcttcttgtattgtatggatcagcctcagactggaagctccaatctcctaaacttcacatttcttccttccatttccatgagctagagatacactaaaggacggataaaaacagcaggcaaagttgcttgcttccattagctgttgttagtaatagtgatgacaatgatggtggtgacagtaatgatggtggtgatggtgatgatggtgacgatagtggtgatgatgatggtggtgttggtgatagtgatgaagttgctggtaatgacaacaaatacatgggctgatagctgtatagcagttgctatatgccaggtgctctatgaggtagggattattatccccattgtacagatgaggaaactgactcagagtgagatcaataacttgtttaggatcacacacttaggaagtgatggaaccaggatttgaatccaggacccaggcactttgggccctagtccaaagctccttgctcctaattactgagctccaagggcatttgaggcagatggctttggatgctctggtcccacatcaacgcagggcttttcatgtacccttctcctcccccgctcctcggcttcgtgtggatacctttgtcaaggttgaaagaagtgttggctcagggtcagttatagacttccttgaaacaaggttaactaactactgagaaagaccaagaatggatggtaaggatttttggatggaaagaccaagaacggatggtaaggatttttgatgttcggctttggcccatttggactattaaagggaaacttccagaaaagtaaagttggcaggatgaagttatccagcctgttctctgggcctggcctcctcagtcctgtcagggtggaagtggaagcagaagcagccctagcaccttctctaagacagactctgacggggtgcttgcctgactcccaggtcatgggagccactgtccaaccagcataatctagagcccatgtcgaactttgggttccccagcgcctccaagaggcacagttaaaggggacaggagacctggtagctcagataatccttagttcttggagactgagctgcaacactccttttaaggcatgtgacttccttttacctcttgagattttgggaggagggagagagagtttctcagaaagttttaggggaaggctattctcattcattcatctgcaacccaattctcccagccatgtgacataacatactcacaggcccagggattaggatgtggtcatcttgttggcagggacggggagcgttattctgcctaccacagtagtcttctgggttttttctagaagttttatctttcacatttaggtctctgagccatctctcaataatctttatgtacaatataaggtaggactgaaggttctccatttcccatatgatctcccattgacccaacaccatttattgcaaagactattctttcccccattaagatgcagtggggcctttgttgtaagtcaggtgattgacccttctgattcagtggtccagaagtgtgctgccaaatcaatgttgaacaatgggtgaaggtgggtggggtagaaagcccttgtttgtagtgtttgctagttctgtggaccccacttctgttaccgattttctgtcttagtccatttggcatcactgtaactgaatacctgagatggggtaatttataaagaaaaggaattcatttcttacagactttgagactgagaagtccaaggttggggtggtgctggtgcatttggtgagagccttcttgctggtggggactctgcagagtcctaaggcagtgcagggcatcacatggtgagggggctgagtgtattggctcaggtctcgcttcctctgcttataaagctgctggtcccgctcccatgataacccattaatccactgactcactgatacattaatctatgaatgaattaatccattcatgaagggagagccctcatgacccaatcacctctaacaggccccacctttcagtactgccacattgggtattaagtttcaacataagtctcttgccatggccaatttcaacctatcgacattaagtaaatgagtttggaatccagaccacttaactgttggctctgatgtcccaggaaggggtggttctggcccctctgcatttgttggtgtattagtctgttctcactctgctgataaagacatacccaagactgggtaatttataaagaaaaagaggtttaatggactcacagttccacgtggctagaacttcacaatcatggcagaaggcacgtcttcatgatggcaggcaagagagagaatgagaaccaagtgaaaatggtttccccttctaaaccatcagacctcttgagacttattcactaccacaagaacagtatggggggaaactgcccccatgattcaattatctcccaccaggtccctcccacatcacggaattatgggagctacaattcaagatgagatttgggtggggacacagccaaaccacatcagttggtttgtctatctttgcctccagattgcatattgactcttaaaaagtgagacagaatgggcaaggtctttgcacatacttttccttcatctacgtaaagccaaaccattttcagatgtcaccagtagggtctaccatgttctagcccccagggttggtctggccaccttgatcatagacagtggacaagagaaggtgctacccttatcctggggccaaatctctatagactcaacagagctactcttctgacgtaagtgcgtaaccctcctctgtgttactctttccaaggcagagtgtggccgtgatgcccattgacagtgtcatttgcctaaaggttcattccaatcaagtccatttatgaagtgaaaaaccatgaaaagaagtttcctaagcaaaaggggctcttagcaagttgaactttctatttttctcttagtgcagacctgcagagattttagaggaaaagacacaggggccctggtgcacctggcttcagagtaaagcctctcactggtagtctgttcccaagaggaggaaagctgtggcatggctgtgcgtccagagtccatctgggaattttctgggagatctatcaaaccacttaggcagcctggctatccattatgcctggatgtggacttcaaagtctttccctatcagacgggagccaaacaccacgtgggtagcttggggtcccagcttgcaatggacaagagccccgacacggtgcaggaagcctctatagccactgccctcccccatccaggccactgtatttggaaggaagaatgtcgaccaggacctccatgactccagtttcatagcaaaaaagaacactccgtatcccaacgttcacttgtagccatgtgggcaaatgcctggtgcaggggatttctcctgggccaggcggccctgtgacctttaggctggggcctcagcctcactgattccttctcccaacctgccctgcctttgcccagagcatgacggaggcagctaagtggtttccagagaaaggagaacatggacaggagtcagttctctagggttgcctgggcccagagttctcaggaggttgaagggtcaactaagcctgagacggcaagtgccttggtccacgtcctctgagacgcagacactgagccaggattagatgtgggcaagatgtgtactgggggacatatctgtgaggcaaaatgaggagagagccagaggaggcagagcccacagatttgcgatgcagctgacagccccatgatggagggagagagggaggggagagaggggagaagggaagggagggagggaagggagagaggggaaggagggagggaagggagagaggggaaggagggagggagaaaagaaggacagagggggtaaggaaagaagggagggaggggaggaagggagtgaagagagggtagaaaggagggagggaggcaagactctggtgctgcacagttctacatctcagcaggtagagcaagaagtcctggggcccaggctgtcctctggaggagccctgtcatgtgggctaaggaggcctccacatccctgcctcttgcaggcactgggagcaccctgcaggaagtgtggcctccatgctcacgcagggaaggatttctgagcacggcaggaaatcccaaggatgttggtcgtttttgctccttgccgttggggacccaagaggtacatgttcatggccaccacagccagaacaaggcggatgaagagctcacctcagactaagtccagcggctggactgcaggctatgtcggtgggcaggaggtgcatcaggaagtggaccaagtccatcagcgggagcccagtggggaaaaaacagatccccaggcctcctgtccaatctgctgactcagaatctctgggatggggctaagaatgttgtttttaatgagcccctgggtaatgctgacacacagccaaatctataagccatggggggaaaatagtattcctggcctccctccctccctccttcctttccaatccatacaccacaggaggaaagtatatactcagcgttcctccctcccttccttccaaaccagttgccacaggaggaaaggaatattcccaggcctccctcccttccttccaccaggtgaccatgaatgcctgttatatgccaggtggcatgtggccggtcaatggtgtacattccaggggggacgtcaggtgcgaatcaaatgattactcaaagcaccgaactgcacactctgttaagggctatagaggaaacatttaggggagaataatcccatctcccactcctctggtttccatagagggaggggcttccactctctgggggacagcacaagggacttccctggcccctctccctctctcttttattcttctctggggaggaggagaaatacctgattggccagtctgggaaggatcactcccaagacagtgcctgcctctggatcgattcgttccccctataaatcacgctttaccctctaaacggccacatttcccccatttcccgtctccctatgagggtgtggaagcacctggacctcactggtttgtggggtcatcactctcctgcaattccccatgccatgcacgttacgttggaatgcttttctttttcctattggtctgcctttggtcaattgtttctcaaggagccttcgtagggtggaggaaaagcttgccctctgtgccccacagctgattcactgtaaagctcatggagctcacacttctgccacctgtgcacagaccccaccgagacccgggagtgggcttagccacgggttcactgacacattccttacagtttacaatgccacagtcagatcttttagctgcaatccttaagaccactgttccctttcctgctgatgccactgcatatcaggtgacactagggaggcctgggacatttggaggatctgggtaagggccagttgagttgggtttagtgggattgtttatgtgggtctcactgtacacctctgtgtatagtgatgaacttggacaagaaataaaggaaggttatttatatgctcccccaccgacctcaccccagtcccagcagcaaagaacacaggacctagaatctaaggggggccctgatgttgttcagggttgggggcagagggggatctctggagatgtgagtcctgactccatgtgaggagtggctaggagccactgggcagagggctggggaggggggcaggggtcttccagaaagaatgcacatcatgagcaaaggcccagtggggggcaggggtgtggcccatgtgaggccatgagagaagacagggaccaggtgcagagtgaaggggaagggcatctgctaggccgcaggggtgggctcagcctagacctctctgagcctcatggtccatggtaaagatctggctttttctcctaagagccagggaacgccgcccataaggccaggcagatttgcgttggagaacatgtgatgggcggatggcaggggcaggagaggcttctgtggcaacagcaagatcagcaccgccctggccagggcctcagaaggaatgtggtgcagaacgtgacccctggttggccaggagggtcctgggagagtgcactcaccctgggggagtacaaaaaaccgtgctggcttcatcctgcggtctcaagtacaggtcagagggtgctattttcaccaaagaattaaatcatgagttcatcataatacatcatctctcatggtccccttccaaatccacatccatccatcaccataacagcccacagcccataataagtggggatggtaaccaaaatggaggcagggtacctgcgaggcatcctggggctgcactgctgatcctcttctctctcccctggccctgagtgctgccttcatgtggctcagcccttccgtccttcaagccttcatcagcttcagggcagccccgagtctgtgcccaggtacactggctaaaatgcagtgtcttccaaatagccatatctcattttaatcagggagcaattccagcatggaagtccccatcatgctcctgctggcaggtacaggtgccagtttgtgacggatgaaagcaccgacagcccacgcgtcttcatcatggaggcctgtgccccagactgtgcccagcacaacagctgggcggcaagggtgggccagggtcgagcaaatgacacgttccctttggctaaggaagacaccccagaagcaaaatgctccatgcgacagccaggcattcaggctacaagctcggtggcggggaggcagccgggagccttctcagaggagaagggtcccgtgatcattccacagatgctttcagagctctgggctcagggtaaccgaccaattatggtgctgccagagggcctgcatttactatacacacgtcacaaaatcaggcttccccgggaggagccatcggactctgtgcagagggcccatgtgacaatataaaagtgatttctggccgggcgcggtggctaacgcctaatctcagcactttggggaggccgaggcaggtggacgatgaggtcaggagttcgagagcagcctggccagtatggtgaaaccccgtctctactaaaataaaatacaaaaaagatttagccaggcgtggtggcacacgtctgtagtcccagctactggggaggctgaggcaggaaaatcgcttgaacccgggagatggagattgccatgagccgagatcacgccactgcactccagcctgggcaaaagtgatttctatgcaaagcaggttttaagaatattgcaccaaggaagccatagctttgcacaactccatggaataaccaagttttttagtgaaccacaagagggagctgttggttaactttggagagcccactggctgatgggtgaggaactgaaggaagcgctctgatgattaagttttggccactgggaaggagtcacttgtttctaagagagtctatttcaggttttaagaaatgaaaagtcacaaatgaccctgaaaattcctgagataggggctcccagagccagagggctcactaggttctggggatttttggacgtatccacggctatgtcctggattagaccagggcaaggcaccctttgactcagcacagtgggtgataaccccatggacacggggcagtgtctggagacatccttggttgccacgaatggtgggagtgctggcatctggtgggcagagaccagggacactggaacatcctgtgatgctctgggcagctccttcccctgaagaatgatctcgcccggtatgttcacagtgctgagggtgacagtccctaacctccatcaaaggagcaattttccctccaggtgggaacggcctctcctggctgtggtgagaggggctggtctggaagtttctctccaggtgggaaaggcctctcctggctgtggtgtgaagggctggtctggaagcttctctccaggcaggaacggcctctcctggctgtggtgtgtggggctggtctgaaagtttctctccaggcagaaaaggtctctcctggctgtggtgtgaggagctg

SEQ ID NO: 6265 - DNA, 692 bp, Homo sapiens
tttgaaagaatgataattttgaaggggaaaggatcttgctaagcaagacacaaaacttagaaatggtaaagaatggtctgtttgaccactgactacacaaaaattatacaaaataatctgtgtggcaaaaacaattacttcatttgagttccagagacagaggaccagggagggaggacatatttgcaacacacataacaaaggataaattctttaacattgagtgtgtacttttagaaatcagtaagaagaatgccaagaccctgagaaatagaataatgtgcaaaacacagtgacaccgtaagaaataaatatagaaatggcatgtgttgatttaaaaagagacccagtctcagtcacagatgcaaataaccacctagagatagtatttttcacctgtgccagcaactgagatcaggagtttaatatacatagatactgtttaccaaaggctgtcaggtaagctcacggagttttgttgggaatggaaactagtgttgtcttttttggagggcaaatctgtcaaagatgaaaatccatttactctttggcccccaactccacatctagaaacatgttcacgtgtgcagactgtggatgcaaagtctgtttcagcagtttttagcaaaggcatggtaatgacccaactgtttattcttgggaactgggcatataaatggtagtacatcctc

SEQ ID NO: 6266 - DNA, 910 bp, Homo sapiens
ttttgttgttgttgagatggagtcttgctctgttgcccaggctggagtgcagtggcgcaatctcggctcactgcaagctccgcctcccgggttcacgccattgtcctgcctcagcctcccgagtagctgggactacaggtgcctgccaccacgcccggctaattttgttttgtatttttagtagagacaggtttcaccatgttagccaggatggtctcgatctcctgacctcgtgatccgcccgtgtgggcctcccaaagtgctgggattacaggtgtgagccaccgcacccagcctcttactatttcagtgtgggatcagaggccacaccagattccatgctcaggagtgggcactctgattatcatcacaatccagccaaatactgttttgtagttacttcgtgcttagcattctccatgcatcatctcatttaatcctcacgatcttctaagttaggtatattgttattgataaatgagaaaatggagagagagagaggacacatgtgtaagtttcctctggacgctgttataaagtgccacaggttgggtggtttaaacaaaagaaatttcatctcttaaaagttctggggccgggcgcggtggctcacgcctgtaatcccagcactttgggaggccgaggcgggcggatcacgaggtcaggagatcgagaccatcccggctaaaacggtgaaaccctgtctctactaaaaatacaaaaaattagccgggcgtagtggcgggcgcctgtagtcccagctactcgggaggctgaggcaggagaatggcgtgaacccgggaggcggagcttgcggtgagccgagatcccaccactgcactccagcctgggcgacagagcgagactccgtctcaaaaaaaaaaaaaaaaaaaaaaaaagttctggaagg

SEQ ID NO: 6267 - DNA, 327 bp, Homo sapiens
aagttctggggccgggcgcggtggctcacgcctggtaatcccagcactttgggaggccgaggcgggcggatcacgaggtcaggagatcgagaccatcccggctaaaacggtgaaaccctgtctctactaaaaatacaaaaaattagccgggcgtagtggcgggcgcctgtagtcccagctactcgggaggctgaggcaggagaatggcgtgaacccgggaggcggagcttgcggtgagccgagatcccaccactgcactccagcctgggcgacagagcgagactccgtctcaaaaaaaaaaaaaaaaaaaaaaaaagttctggaagg

SEQ ID NO: 6268 - DNA, 692 bp, Homo sapiens; identical to SEQ ID NO: 6265

SEQ ID NO: 6269 - DNA, 832 bp, Homo sapiens
tctccaggtgggaaaggcctctcctggctgtggtgtgaggggctggtctggaagcttctctccaggtggtaaaggcctctcctggctgtggtgagaggggctggtctggaagtttctgtccaggtgggaaaggcctctcctggctgtggtgtgtgagaggcttgtccggaagtttccaggcgggaaaggcctctcctggctgtagtgagagggctggtctggaagtttctctccaggctggaaaggcttctcttggctgtggtgtgaggggctggtctggaagtttctctaccggtgggaaaggcctctcctggctgtggtgagaggggatggtctggaaatttctctccaggtgagaaaggcccctcttggctgtggtatgaggggctggtctggaagtttctctccaggtgggaaaggcccctcctggctgtggtgtgtgaagggctggtctggaagcttctctccagatgggaaaggcctcttctgggtgtggtgagagggctggtctggaagtttctggatgctctcagcatctatcagggagagcaggtgcccccatgacatctctctgcacgggcagggtgtctactgtccggaagaagcccctccccaggtgaagtgagggttgggccacaccctcttcctcatattctaagtgtcctcagagaatacatttctgcaggtgtcattatgtatctgtgtgtcctcagccccagatgggcccagacaggcctttgggccagggattccagagtctgcatcaggggtccttggcctgaggctcggacccctcaagacgtccctccttggggagaaagatccatgaggc

SEQ ID NO: 6270 - DNA, 16422 bp, Homo sapiens
tttttttttgttttgttttttgagacagagtctcgctctgtcgcccaggctggagtagagtggcataatctctgctgactgcaacgtcctcctcccgggttcaagcaattgtcctacctcggcttccccagtagctgggattacaggacactgcaacgatgcccagctaatttttgtatttttagtagatacagggtttcaccatgttggtcaggctggtctcaaacccctgacctcaagtgatccacccgcctcggcctcccaaagtgctgggattacaggcatgagcgactgtgcccagccacaatgaacaactcgtatcagtgtagcaaactgtttactagccaaattggcagatgctagtcaagggctaaccttgcaatcagatctttctaaggataatagtctcagtctcttctgtacaaagacatttaagagaaagtcgttctccaaagacatttaagagaaagtcattctctttttttttttatttgagtcaaagtctcgctctgccacccaggctggagtgcagtgtcgcgatcttggctcactacaacctccgcctcctgggttcatgcaattctcctgcctcagcctcccaagtagctgggattacaggcgcctgccaccacgcccggctaaattttgtatttttggtagagacaggtttcgccatgttggccaggctggtctcaaactcctgactgcaagtgatctttgttttttatgacgttgatgtcttgatgagttctttagttggggtttgcctaatagcttctcatgattcgattcagattatgaatttttggcagaaataccacagaggtgacttgtgtctttctcagtgcattacgtcggaaagcacataataccaatttgtccctgtcctggtgacgctaaaggtgacttggttaaggtagtgttctccattataaagttaccctaatccttgttataattaaaaagtaagcctgggcaacatagtgagatctcgtctctacaaaaaatttaaaaattagccctctgggccgggtgtggtggctcacgcctgtaattccagcactttgggaggccgaggcggggtgatcacctgaggtcaggtcagggttcaagaccagcctgacaaacatagtgaaactccgtctctactcaaaatagaaaaaattagctgggcatggtggcaggcgcctgtaatcacagctactcaggaggctgaggcaggagaatcgcttgaacccaccacacctggctaatttttgtatttttagtagagaccgggtttcaccacgttggtcaggctggtcttgaacccctgacctcaggtgatctgcctgccttggcctcccaaagcgctgggattacaggcgtgagccacagcacccagccttttttttttttttttttttttttttaatagagagtcttgctctgtcgcccaggctggagtgcagtggcccgacctcggctcactgcaacctctgccttccaggttcaagcgattctccttcttcagccttccgagtagctgagattacaggtgcccgccatcatgcccggctaatttttgtatttttaatagagacggggtttcaccatgttggcccggctggtctcgaacttctgacctcaattgatccacctgcctcggcctcccaaaccgctgggattacaggcgtgagccactgcgcctggccaatgatgcttgcctaaaacaattattacagtagtagttgccaaatagttattttctaattccatcattccttgtacatttattagttggcattcctctgtgaggaagagttttcccttcgcctccatttatttatttagatcactttggactcttgtattcttttttaattcaaattctttcaatgtgtggttaaaacaagatgttccaggctaatcttgtactttccttgccccagccctgcaatcagctatttctctaaggggccctggttcctgttagtggaaaatggtaattaggcaagagaaatcaattacagccagtgtgactgattggaaaagaataaagatatccctattttcagatgatatgattttgtacctggtaaaccctagagaatcaatgataaaacactctaacaataaaagtattcagtaaaatggaaggatataaaattaacatagagaaatcaatggcttttgtatatatcaacaataaccagtgagaggatataaagacgcatagtggctcacatgtgtagtcccagctacttgggaagttgaaatgggaggatggcttgagcccaggagttcacggctgtagtgtgccatgatcatgcctataaatagccagtgcagtccagctggggcaacatagtgagatcctgtctctaccgaaaaaaaaaaagagatacaatgatagagaaaacctcatttacaatagcatccatagcatcaaagaaaataattaggaagaaatctaacaagaaatgtgaaaaaaatctatgtgtggaacactttaaaatgcttctgtcaaaacccattgatctttacgatataaaaaaagtttgttaatgtatgcaaaattttaaaaaaagcaaccaggaggtcagggaatccagtatggaatggagactgtgacaacataatttatatattacaaatgtaggcaagggccgggcacggtggctcacgcctgtaatcccagcactttgggaggctgaggtgggcagatcccttgcagccaggagtttgagaccaacctggccaacatggtgaaacctgtctcaccaaaaatacaaaaattagacgggcatggtgtcacgtgcccataatcccagcaacttgggaggctgaggtaggagaatcgctagaacctgggaggcagaggttgcagtaagccaagatcgggccactgaactccagagcgagacttcatctcaaaaaatcacacacatacaaaaaaaaaccaaaagtaggcctagtgtggtggctcacccctgaaatcttagcactttggaaggcagatgtgggtggatcacttgagcccaggagtttgagaccagcctgggcaacatagtaagacttggtttctacaaaaaattaaaaaaaaattagctgggcatggtagcctgtgcctgtagtcccagctacttgggaggctgaggtaggaggactggttgagcccagaaggtcgaggctgaagtgagccgagattgcaccactgcactccagtctggatgacagagcgagaccctgtctcaaaaaaaaaaaaaaaaagaaaaagaaaaggaaaaggccgtgtgtggtagcttagctcacgtctttaatcccagcactttgggaggccgaggcgggtggatcacctgaggtcaggagatcgagaccaggctggccaacatggtgaaaccccatttctactaaaatacaaaaaattagctgggtgtggcggtgtgtgcctgtaatcccagctactcgggaggctgagacaggagaatctcttgaacccaggaggcggaggttgcagtaagccgagatcgtgccattgcactccagcctgggcaacagagcgagactccgtctaaaaaaaaaaaaaaaaaaaaagccgggcatggtggctcaattctgtaatcctagcactttgggaggccgaggagggcggatcacctgaggtcaggagttcgagaccagcctgaccaacatagagaaaccccgtctctactaaaaatacaaaattagctgggtgtggtggtgggcacctgtaatccaagctactcgggaggctgaggtgggagaattgcttgagcccaggaggtggagggtgcggtgagccgagatcgtgccattgcactcaagcctgggcaacaagagtgaaactctgtctcaaaaaaacaaaaaacaaaacgaaaaaaaacttattggccgggcatgatggctcacacctgtaatcccagcactttgggaggcagaggtgggcggatcacctgacatcaggagtttgagaccagcctagccaacatggcaaaaccttgtctctactaaaaatacaaaaattaggccaggcgcagtggctcacgcctataatcccagcactttggaaggctgagacgggcggatcacctggggttcggagttcgagaccagcctggccaatatggtgaaaccccgtctctactaaaaatacaaaaaaaaatagctgggcatggtggcgcacacctgtaatcccagctactcgggaggctgaggcaggagaattgcttgaacctgggaggtggaggttatagtgagccgagattgtgccactgcaccccagcctgggtgacagagtgagactccatctcaaaaaagagaaaacaaaattattttgtagagacagggtctcactatgttacccagactggcttaaacttctggcctcaagctatcttcccacctcggccttccaaagtgctgggattataggtgtgagccactgtgcttggcctatctctgctttttttttttttttgtagacggagtttcggtcttgttgtccaggctggagtgctatggcacgatctcggctcactgcaacctccgcctcccaggttcaagcgattctcctgcctcagccctcccaaatagctgggactacagccgtgtgccaccatgcccagctaatttttgtatttttagtagagacggggtttcaccatcttggccaggctggtctcgaactcctgacctcatgatccacccgcctcggcctcccagagtgctgggattacaggcatgagccaccgcgcccggcttctgcttttctttgtttctagtttctctctagtaaagtgcatgaaatgtactaatcttaagtgtacactcagtgaatcctctcttcgtctctctcttttttttctctctctctccccgccaccatagccaccacccagatcaaagtataaagcacttttagtaccccagaaggtcccctttaccccttcaaagtcagtactcccccagaagtaaccattattctgatctctagcaacataagattcatttcgcttgttctttaacttcatataaatggaatcagctgctctttgtctctgacttctttctggcagcactatgtaagtttatccacgtggcagcacagatctgttctcttactgttgtgtggtattccattgtatgaacataccacatttacccattctcttcattgtttttctgtttgaaatttcctctctcttcctggttctcttcccacctccctccctgtttccctggaactagggggctcataccctgtccctggcccctggggtccctttcactctacttctcatcaccactactttctccagatccaaacagcaaagacccaagaactgaatatgctccgggaacagaccactgggctggcagctgagttgcagcagcagcaggctgagtacgaggaccttatgggacagaaagatgacctcaactcccagctccaggtaacacctttggctctggcctgtctcttcctagttccctagtaatggcccagtgaagtccccagtaaggtggagtgggaagactggagtcaggaggacctaggttccagtctggctccctaacttattagcacctgtgtgttctgggacaagtcatttcacttctctgaaactgagcctcttcagttagttaggatatcaattctttttcattttttaaattttaatttaatttaatttttttttgagatggagtcttgctctgtcacctagtctggagtgcagtggcgtgatctcggctcactgcaagctccgcctcccgtgttctcgccattctcctgcctcagcctcccgagtagctgggactataggcgcctgccaccatgcccggctaattttttgtatttttagtagagacggggtttcaccgtgttaaccaggatggtttcgatctcctgacctcgtgatctgcccgcctcggcctcccgaagtgctggtattacaggcgtgagccaccacgcccggcctccttttttttttttttttttttttttgagatggagtctcactctgttgcccaggctggagtgcagtagcgcgatctcagctcactgcaacctccgcctcctgggttcaagcgattctcctgcctcagcctccggagtagctgggattacaggcgcctggcaccacgcccagctaattttgtatttttagtagagacggggttttaccatgttggtcaggcttctcaaactcctgacctcaggagatctacccggctcagcctcccaagcaatatccattctgattccataatagaaaccagaataatagtagattaaataagatacaaatttagttccctctcattaaaagtccaggtaggttattcagggatggaatgatggctttccagtcatctgtgacccaggttctttctccattgctgttcctccaccttcaacacaagacttttatcttggcatccaagacggttgctgaaactccccgaccatcatgtttgtattctatctggaaggaaggaggaaaggggcagggaagagtgtgcccctttcctttaagagcataacctaaattacactcaccacttccacatacagaaataaatcacatggccacacctaaccataagggaggaggggaaacatctgctagacagctgtatgcccgatgataaattttattgctagggaagtaaggaagaatgaatactggggagcaactagcagtctctgctatatttcctatccagaaattgagatcacaataccaactttaccagggagaagggagatggtctaccagatggtcctgggtgactagcacctactggatgctctttatcaaactctttccctttggtgtctgcattaggagtcattacgggccaatagtcgactgctggaacaacttcaagaaatagggcaggagaaggagcagttgacccaggaattacaggaggctcggaaggtaggggaacatgagggttgaagggagaggatggggggtaggaattggctcagtccatggggatgggaggaggtgatataaccaaacatgtggggataggagggaaaggaaaattgactggtttctggttgaccagtttcttggccaaatccatgagagtgggaggggaaagaaagaaagtgaccagttctataaggatgggtgagtgccttagccagttcagtggggatgggagggagtggagtttggctagttccttgggcatgggaagagggttggaggccttttttcgatgttgtggaaggaagttgactgccatcgtcctggcccccagagtgcggagaagcggaaggccatgctggatgagctagcaatggaaacgctgcaagagaagtcccagcacaaggaagagctgggagcagttcgtctacggcatgagaaggaggtgctgggggtgcgtgcccgctatgagcgtgagctccgagagctgcatgaagacaagaagcgtcaggaggaggagctccgtgggcagatccgggaggagaaggtgggtgggtagatgatgatgcccttcttcctctaaaacctgggaaccacagcgttgctgataggccagtgggtggcatgcatcaggtgcccgctcctctgccttcctggcccatgacagtctgccccatcccaggcccggacacgggagctggagactctccagcagacagtggaagaacttcaagctcaggtacattccatggatggagccaagggctggtttgaacggcgcttgaaggaagccgaggtgagttggtgatgcctggtgaggaacagaggctgattggggccctcatgtcaaaccacagaagcaggagtggtcaggccctggaacttcccgagattttctggacttagggatatccccacagtcccctggctcaatagcagccctctggagtggatcaggggatggccatcagataggacagactgtcacgtgttaaggctgccctgcctttgtgcaaatttggaaaggcacctctttctcctgaaactgtacttctgtcaggaaattaatgcaatacactgatgttattgaacaagaacctgctgggtgcggtggctcacgcctgtaatctcagcactttggaaggccgaggtgggcggatcacttgaggtcaggagttcaagaccagcctggccaacatggtgaaaccctgtctctactaaaaatacaaaaattagccgggcatggtggctggcgcctgtaattccagctactcaggaggctgaggcagaagaatcacttgaacccaggaggcagaggtcgcagtgagctgatatcgtgtactgtactccagcctgggtgacggagtgagactctgtctcggaaaaagaacctttgttgccattttctggaaatctcataatacactgaaaggcattgtcatgtagcagtgaagagcacaggctggagccagttgtttgtctaggtttgaatcctggctgggccatttcctagctgtgtgaccttgggcaagttatctgacctctctgtggcctgttttcatcaatggtaaaaagggggtaacaataatatctaccatctaggtattacgggaggattatagaaaatgagttaatatatgtaaaactcttagaacattcttggcatgtagtaagcgctatgttttgttaaataaaataaaatgtaaatgcaaatctaagtcaaccatgcgaatggtgcaactttagatgtgacacttcagcatattgcctaagggcgtgtggggttccctgcaggagggtcatttctgcatacctctgggcccccattgcagtccctcatacccctaactgggcatgataccttctggggggctgtggccagacctgggacttgtcttgtaggaatccctgcagcagcagcagcaggaacaagaggaagccctcaagcagtgtcgggagcagcacgctgccgagctgaaggtgcctctcgcatgatggtgttcctctctccagacagtgacgggccctcctgggaggacagaggcttcccaagccaatgcctaagctgctttctgctttgcagggcaaggaggaggagctacaggatgtacgggatcagctcgagcaggcccaggaggagcgggactgccacctgaagaccattagcagcctgaagcaggtcagtggtcactgcacagccccagacacacccctgatcctcagcgtacaggaggggcagggagggagcatgcttcaggcagcccttccggcatctaccagccatgcctgctttctcccacaggaggtgaaggacacagtggatgggcagaggatcctggagaagaagggcagtgctgcggtaagacagagcggtgcccaagcacggctccctcctacctgtagcctccctcctatgggcccactgggcctcagtcctcatgttacccctgtcccccacagctcaaggacctcaagcggcagctgcatttggagcggaaacgggcagataagctgcaggagcgactgcaggacatcctcactaacagcaagagccgctcaggtgagggactaggacagggagaggaggctgaggcatgggggaggtagggcctgggcctgcaggctgcaggttagtcctgcctcttcctcagctgtgctttcctgcttctgtcgctctggaactccatcttttaccttttctctgtctctcctctgattctttctctgcattctctctttatttctatctttctctcgtttttgccctgtctcttctctgtttctgtctctgcctctgtctcagtttgttctctctctttcctctatgtttgcctttatctccttgctttctttctctagttttctccttttctctctcttttttttttttgagacagagtttcgctcttgttgcccaggctggagtgcaatggtgtgatctcggctcaccgcaacctctgcctcctggattcaagcaattctcctgcctcagcctcctgagtagctgggattacaggcatgcaccaccacgcccagctaattttgtatttttagtagagacggggtttctccatgttggtcaggctggtcccgaactcctgacctcaggtgatccgcccgcctcagcctcccaaagtgttgggattataggcatgagccactgggcccggcccccgccctttcttttctctgtccctttatctcttcccgccactctgtgtcctcttcgtctcttctgtttatatctctgtctgtctcctcactgtatgtactacattacacactcccacacctcacttggcatttctaaatctattgtatacaatctctcattctataaatctccctgctcaagtacagggtccctgatataaaactccctgagtctctgccctctagaagcccccagttgagctacggagacagacttatacatagtcagcaacgctgtggtgttttcattatacagctaatccaatctgttatttctgccacttcaagcagaagacacacacacacacacacacacacacacacacacacaactttagttgcttcagccttttttaagacggggatggcctataaatacatttaagtaagtaaaatgcagtgatggctctggtgcatctcttagattacagactcagagaaaacttggtcccttattcccccactcgggatacctacggatccccactcagtcaccccacccttgccagagatcctcgagggctttaagtgatgtggcaaaacagatgtgtatctctcaccaaatcaatttctctctgaggcactcggtctcctgaagtaacctttctttaaaaaggagttttgtttctgttttatcacagatgaatgtaagaatcttgggaaaggtgtaatcccagcactttgggaggccaaggtgggtggatcacctgaggtcaggggttcaagaccagcctggcctcccaaagtgctgggattacaggcgtgagccaccgcgcccggcatctttttttctctctgtctctgctctggctcacttctttcaccagggtctcagtttctatcatctgctctggctttccatctctggcattttctttctgcaagtggatgtgccctgtgccctctctagctgtcttcctttctctgaaccctgtgtccaagtgtgtctgccacttgagacccatgtgtacccatgtcgttctctttctccaacctcttccattttctccctctcattttgtatgtgtttctccagaaaggcagctctttcttttctttctgttttttgtttttttttttttgagacaagagtctcactctgtcacccaggctggagtgcaatggtgcgatttcggctcactgtaacctccgcctgcttgggttcaagcgattctcctgcctcagcctcctgaatcgctggaattacaggcacacacaaccacacctggctaatttttgtatttttagtagagacggggtttcttcatgttggccaggctgttctcgaactcctgacgtcaagtgatcagcccacctcagcctcccaaagtgctgggattacaggtgtgagccagtgcgcccagcctcagctcttttttctgtctctgtctctccctgtcctcctgtctgcttctgcctttccccatgcccaggtgtctctctttccatctctgttaaatctatttctgcctcttcctgctggttgctgccctgggactcaggggtactggggctcaagtttctcttccctccaccacccaggccttgaggagctggttctctcagagatgaactcaccaagccggacccagacaggggacagcagtagcatctcctccttcagctaccgggagatcttgcgggaaaaggagagctcggctgttccagccagggtaaggggaaaggaagaacctacagctccagcttctctcaacccaaaaatctgagaacccctccccttttctcctcacctaaacccatctcctactttgggcgcagcacacatattttcttgtcaacttttccccaagcccaccaacttggattcagattgcgacatgcaggacaggccagtcattctctctctctgactttctgtttaatcatctgtgggctaattcccccttctctggtgccataaattatgtggctcatagtaggtgcaccatccaaggagaaggtccctttttccaacttgtaatgatcactaattattattgccggctgtcatgtcagcctccttaccagccactttcctttggaaataacttttttattgttccacaaatagtatgtgctcattgtagtacattttttaaaaaccacaaatgagcaaagatttttttaaaaccttaaatgtctggccgggtgtggtggctcatccctataatcctacactttgggaggccaaggtgggcggatcacttgagctcaggagtttaagaccagcctgggaaatgtggtaaaactccgactctatttaaaaaaaaaacaaaaacaaaaaaaccttaaatgtcaaaaaaaaataatattttcaccatccagacgtcaccattataaattcttagttcagggctgggcgcggtggctcatgcctgtaaccctagcactttgggaggctgaggcgggcagatcacttgaggttaggagtttgagaactggcctggccaacatagcaaaacctcatctctactaaaatacaaaaattagccgggcgtggtggtgcgtgcctgtagtcccagctactcgaaaggttgaggcaagagaatcgcttgaacctgggaggtggaggttgcaatgagccgagatcacaccactgcactccagcctgggcaacagtgaaactccatctcaaaaaataaataaataaaataaattcttagttcatacccttccagaattctctctctttttaaaacctagatgagattaacctgttttttattcaactgttgtctctaccttcccaatttgatcaattttcatgtcattggctgggtgcggtggctcctgcctataatcccagtactttgggaggccgaggcgggcagatcacttgaggtcaggagttcaagaccagcctggccaacatggtgaaaccccatctctactaaaaatacaaaaattagctgggcgtagtggcgcgtgcctgtaattccatctactcgggaggctgaggcaggagaatcgcttgatcctgggagttggaggttgcagtgagccaagatcttgccattgcactccagcctgggcaacaagagtgaaattctgtctcaaaaaaaaaaaaaaaattcatgtcgtctgatactttgaccttaaccagatttctctagttggccccagaatgtcctttcttgctggttttatgaaaactagcattcagattcagagcacatgttacatctggttgttttatggcccttaaatctctttagtgcggtcccttttttcctgagaccaatttgttgaagaggccagcccagtcaccccacaggaagtatgctaccttttgggtttttctgctggcttcctggtggtatgatttaacatgtccctctcttccagttttcctgtcagctgaaagttagatctcatttgctttgggatcttccttcaatcctctccacaaggctctgatgtggttactctctacccccatttaggcagaggagaaaacagagtctgagggtaccaagatgggccaacagtcccagcttcagggcccatgttctctcacccacctctggcctggttctcctccccagtccctgacacctgtctggggtcggtggtgctgagcccggggctggcctctccccttctctttcctgcagtccttatccagcagccctcaagcccagccccctcggccagcagagctgtcagatgaggaagtggctgagctctttcagcggctggcagagacacagcaggagaaatggatgctggaggagaaggtgctgcctgcctgcctgcctgcccatccccacttgaagtgcccttgtgggtgtggggtctgcccgggcccgcctcatgtgtgaacatgtacagtagaggggtctcaggtgggctgggccatcttgcaggtgaagcacctggaagtgagcagtgcttccatggcagaggacctctgccggaagagcgccatcattgagacctacgtcatggacagccggatcggtcagtgtcccctccccggccctcagccctggtccagccttcacctggccctccctctccattctgtgctgcggcttctctcctctcctctcggaactcagcgaagctactgacaagaccatggcctgtggaggggagaacaggaaagcactgtctcttgatctcgcctcctccctcttctctctttctctgtcatctctccactctccattctccattgtgtctctctgtccactttctcctttcctctccctgtgcctcatcttcctctcctctctctctcccttctctcttctccgtttctctttttcaccccactccttcatcttgtctcgctgtctatattgttttccttctctgtatcttcattgcttttgctttctttcaaactttctccttcacagatttttctttattaatcagaatcatactgaccaacatgtgctgaggactttctgtgtgctctgtgcttcacatacagtcatgtgcatctttccagttccacaagttagttatcctcatttctcggggccatagagctagtgagtgacagagctaggttttgtatgtcaaagcctctgtcctacatgacatggcttttcctgctgccttctcccctggtattcgtctccctcttttctcctctggctctgcctggctctcctctggctctgccgagggggtggttttcagcctgggcccttgcagatgtgtctgtggcagcaggccacacagaccgcagcgggctgggcagcgtcctgagagacctagtgaagccaggcgacgagaaccttcgggagatgaacaagaagctgcagaacatgctggaggagcagctcaccaagaatatgcacttgcacaaggcaagtgtggcctgccagcctacccatctgttcacccagccacctgcctacccagccacatagcccctgggtcatctgccagtccccttgcccacccacccagcctgtcctcccagctatcctcctacccactcatcaactactccatcatgctctcatcttccaccctctcatcaacttattatccattcattccttccatgtacccgctcatccatttatctacacattcacccaaccatttgcccatctgtccatctacccaatctactacttacttatctcattgtctaccccatgtcctgccacccatttcttgacatatcattctcttatctactcatcaattgccccttgtgttacctttcacccacccagttacctgcctgcccacctgttgatctccatctgtcctctggacaattcattcgtccaccaatttgtctaccatagatcccccatgcccatgggtccacacacacatctttctgcccaaactgccacccaaggactttccccatctctgagagttagaaaggggtcagacccagctcctgcctttgagaagcaagctcacacttagaagagcaggtggccagagtggtggtgtatcctgcagcagcaccatgccacaggaggcatcccactcccattatctgtagctccccacccatcctcatgacttttctgagccctgcccactgttgggggtgctgtgagcttctccaagtaccttctcatcccaggccagacacagctgagcattgattaatgaaagggtgtgagggaaatcacagatgataccctacgtttggcaagggagcagcctgtccccttctctggcccctgatggttcatttgtttcttaggatatggaagttctgtcccaggaaattgtgcggctcagcaaggagtgcgtggggcctcctgacccagacctagagccaggagaaaccagctaaagacctgcaggctgcacccacctcctccccttcctaccccctaggatgctattcccttgggctgtggtggaaaaatgagggctggagccaaaatcaaatagcttgggagactggacattaaaggggctagaggcctgatggttagtgttaatgatcctgtcttagggcagaggccaccagggagtggggatcctgagggaaggggcagggatttctccttcttcttggtcctggctcccaagggcttctgtcttcatctctgcatgagctctccttcccagagaccaactcttttttattttattttattttattttttaatttatgtctggagcctggctactctgcatttgggattggggatgctgggtgggtgtgtggtccatgttcagcgttctagcaacacgtgtgtgtgtgtgtgtgtaaaggctatgcagccaaaataccatctggccagacgggcccacccactga

SEQ ID NO: 6271 - DNA, 370 bp, Homo sapiens
gggtaggagctgggcaggaagagaggggagtccaggaaggaggtggagagaattggcgaagttccctgccacccccattttccagatgacgcgactgaggcccaaccagctttgtaggaggcggagtctccccagggtccctctctggctgtcctaggggagggggctcagggagccacgaggcccctccctgcctctccatctcccggcaagctcagaggggcggggagagagagccagaggaggaggagaactcaggcagctctgcagagggggccaggagctcgggtgtttggtacccccagccccaccgctgttgctgctcctgcagcggggacacaggtgaggacgccccgagagagagggggag

SEQ ID NO: 6272 - DNA, 1946 bp, Homo sapiens
taattaaaaccccattgtctcagccgaaaatctccttaagctgataagcaacttcagcaaagtctcaggatacaaaatcaatgtacaaaaatcacaagcattcttatacaccaataacagacagagagccaaatcatgagtgaactcccattcacaattgcttcaaagagaataaaatacttaggaatccaacttacaagggacgtgaaggacctcttcaaggagaactacaaaccactgctcaatgaaataaaagaggatacaaagaaatggaagaacattccatgctcatgggtaggaagaatcaatattgtgaaaatggccatactgcccaaggtaatttatagattcaatgccatccccatcaagctaccaatgactttcttcacagaattggaaaaaactactttaaagttcatatggaaccaaaaaagagcctgcattgccaagtcaatcctaagccaaaagaacaaagctggaggcatcatgctacctgacttcaaactatactacaaggctacagtaaccaaaacagcatggtactggtaccaaaacagagatatagatcaatggaacagaacagagccctcagaaattacgccacatatctacaactatctgacctttgacaaatctgagaaaaacaagcaatggggaaaggattccctatttaataaatggtgctgggaaaactggctagccatatgtagaaagctgaaactggatcccttccttacaccttatacaaaaattaattcaagatggattaaagacttaaacgttagacctaaaaccataaaaaccctagaagaaaacctaggcattaccattcaggacataggcatgggcaagggcttcatgtctaaaacaccaaaagcaatggcaacaaaagccaaaattgacaaatgggatctaattagactaaagagcttctgcacagcaaaagaaactaccatcagagtgaacaggcaacctacaaaatgggagaaaattttcgcaacctactcatctgacaaagggctaatatccagaatctataatgaactcaaacaaatttagaagaaaaaaacaaacaaccccattaaaaagtgggcaaaggatatgaacagacacttctcaaaagaagacatttatgcagccaaaagacacatgaaaaaatgctcatcatcactggccatcagagaaatgcaaaccaaaaccacagtgagataccatctcacatcagttagaatggcaatcattaaaaagtcaggaaacaacaggtgctggagaggatgtggagaaataggaacacttttacactgttggtgggactgtaaactagttcaaccattgtggaagtcagtgtggcgattcctcagggatctagaaccagaaataccatttgacccagccatcccattactgggtatatacccaaaggactataaatcatgctgctatgaagacacatgcacatgtatgtttattgcatcagtattcacaatagcaaagacttggaaccaacccaaatgtccaacaatgatagactggattaagaaaatgtggcacatatacaccatggaatactatgcagccataaaaaatgatgagttcatgtcctttgtagggacatggatgaaattggaaatcatcattctcagtaaactatcgcaaggacaaaaaaccaaacactgcatgttctcacttatagatgggaattgaacaatgagaacacatggacacaggaaggggaacatcacactctggggactgttgtggggtggggggaggggggagggatagcattaggagatatacctaatgctaaatgacgagttaatgggtgcagcacaccagcatggcacatgtatacgtatgtaactaaccggcacattgtgcacatgtaccctaaaacttaaagtataataataataaaaaataaataaataaataaaatataataa

SEQ ID NO: 6273 - DNA, 2371 bp, Homo sapiens
tggtaagttggcatgaattttccatgaaacacttgactgccatttgcagcatcatatctactttttatgcacctaattatatttttcctttcacttttatgtttttttctaaaactgccacctaaatacctttccactccgttaaatgtatggagtcaagataaatttctcattcttgctctacagtttaagatgtataagaagtaaacacttccgtggaatagggcttaatttggggctcaaatgttttgttttcctcctgagatgtttttgaatggataagactactctggttttggatgcagcaacttttctcctggcatggaagaactaaggactttgataaacagtttcccattgatagtataatataatgaggggcccagtctgctcttgtgaaaattggctgagcggcagcagcccatcccagctgtgtgtgagtagccccgctgttaaaagtacacctgctgggaattgttggcacatgctcatagcatatgctctgtgggggaggtgcttttaattccaagaggagcttttctcccacatctgcggatgcagaacaaagatgcagcaggactttagaaaacaggagtgtttctactgacattttattcattgctttgttagtcccgcaaatggagcaacttctggttgtttgtaagcagaaaaacaaaacattcaaaaccaaaaacctaattagtacttttgtcctttatatccctaggatgctctagggagtagaggtggcaggcatctttatcttcacccactggcacattagcagcttatgcaacttaggaagtcactgggagatgagtcctaaaagcctgaatttcaggatggggaggagataagaagcagagaactttgggagaccatggggcatttagtcctggcatagacacagaatggatattcacaggaagattcctgaggccagatatgcaggagagcacacattgtcacaaggggtgtggtgggaagagaggtgctggatgcctaagacagacttctgtgcttggcagattgactgagtgttgactctgaatactttgtggtccagtccataataggccagtcactcctgcctgatgcatccctgttgcactgttcataaaacctgtatcatatggggaagcttcaaggctggcaggcttttcatcaagtaatcatcattccatgttcctacgtatccttgaaatcaaaaccaggcaatatgtgtgtttttggttttgttttacaaaaaggcatacaatgagacgaattcttaagataatgcacatacagaatcatcaataaagtttcaaagagtttatgaagaaaaggtattttcctttcttgtaaaaaatgttatatatatataatattctgatctgcattcaccttagggcttagcctcttattttatgaattttcaggctgtgatttgtgttggatggctaagctctaaaataatgcaaatagccccaatctttaaatatagcggtgctaagttgaacaagtaacacaatacagaaaatgctgatatgaatacttagtaataatacaaaagttcctgctaaattatatatgtgtatcactgcctgactagaaaccccacttttcttttctaatccagcacaaaatcaaactctgattctacaaccagtctttttaaagggcaaaaatgactcaacacctttgttttgtatggaaaacttttttttttacactaactgcaaaactgctttaaaaaaaggcttattcaggatagataagcatgtactccttttttaacttgctggaagacttgcccctccaaactagcacccccaaaagacaacttctttcagaaacggggtgttttacctaaacatagtagcttacatgttagccagcagtaggtcggcactagtgttttccacggttatcacctttgacaggtgatgtgcatctatagatagtggaagccaccccatgaggaggtgttaatagcagcatggtttcacttttggtaatcaggtaatcatgtgtatatacttagattcgcattattttaacatttctctgctactctgcacttcaggttcgttaagctattttaataattactggggttatggcaaacaccaatggaaatgtatatggcaactgctttcctgagcaagtgtgatttgttttatggctgttcaagttataaaattgttcttacattgtaggtaaacaaaatcttgatgtttttaaaggtcactgtaacttaaggttcaaatttctggcacagttttattagtattcacttcggaagctaataagataccatggttttctatgttactcccattgtaacattagtaaagtgactttcaataaaagatttatgttattttga

SEQ ID NO: 6274 - DNA, 3455 bp, Homo sapiens
cgttctgaggcacatcctcactgtaaacagtaatgctatatgcatgaagcttctgtttattgttttccatatttaaggaaacaacatcccataatagaaatgagcatgcagggctaaggcatataggatttttctgcaggactttaaagctttgaaaggccaatatcccataggctaactttaaacatgtatttttatttttgttttgttttttacttttcatatttatattagcatacaaggacaattgtatatatgtaacatttttaaaattttaaaaaaatgcagctgttacacacaagtgtattttgccaaatgcctaaaaattccgtcacaatcacatcatcgtcatccatccagtgatcttcaaagactataagcaggtaatgtaaatatagtggtcaatgctgtaaatgtgtctctccataattcgtatttgtccaaaacatgtgatatccctttaacctgtgcacagtctggaggcagttttattgagtgagtagttgagtgagagaacaaaatgcccagcaaaacttctggcctccacagtttgctgatgcaggagcccactctgctgccgatgggctgctccctggaaatcatctatcccatccgtccatcccatctcatcccagtgagccagcccctcagcagtgtgtgctgctgagattaagcaagtgcaccaaagacacatgagacaacgtactgccagtgagctggtagcttctggtttgccaatactctaaccctttgtggcctgaagttttgttccttggcaaaactttgtagtcacccttatctgtgaaatgaatgacttgttttaacaaaaacaactttgacactgttgattaagaatatttgtcatcactgggatgtgaatcccaacaagtcattctgcactgactctgaagcaagatgacggaagattctactgtttgagttgagcagcttcaaccattcataaagggttaagttagatctaaaccacagagatgcagcatctgcgaagttacactaacagctggtgggggaaagaatctgatgctttgaaacatatatttttaatccataggaaaataagattctattttaaaagacccttctttaaaaccaaagtttgatagctgttataatggcagatctgtcattccaaaagaaagctagctaccctagtgaggctggagattgatgggctcaatcacatggtctgctctgaagtatacttctgatttcctcatttgctgtgtgttcttaagaggaatggaatctgcagacaggttttcagatatactctcttaaatttgatcctctcccatagtatccatggacaaaatccatatcatcttcatatgtaatcaatttgattacatatcatgcccaaactgaagggccgagttagaaggcagcattttatactgtgtgtttatgtcttctgtaatggacctctcttttgaaagtctttgaaatgtttggaaagcaatttaatgatccaaaattacataatgtaaaacagcatttttcatgacaggaagggatgtgattgttgatatgaccataaagcgatccatcaggccaaggtttgggtgagtgttgggcagtgttgccacatagctcaagccaagaacagaagggcagacagattgaaagatgtagcaaataaagtgactttttaccaagatcactgtaacgtgcactgaatgtttcctggtactgagtgtacaaaaggctaatgctataaggtttattttgactataaaagagtttatagatttgaatataaggtgcctcatgtaaatatgcttcctagttacaggtacacaaactctaatttgaaagaatccacaaatggctagctgagaagttaacagatctctatcattcgtctgtgtgtctttcttccctcacctatttttacatgaaattattatttcaaatgaaaatcatgatcatgtgccttttgggagacatggtttctctagaggtatatagtttgtaattacccgccttggtaataaccttcctgtggaactgactaaaaatttttgttttatttgtagagattatgatttgaggtatacagtaactttaatgttctattcttggaatctactctatctcccatgtttaaacattcttagagccatttgtgggattcattgacaaatttatagtctcaagggagagtttcaagaagtatctatatgtatactcatggttggggttctagaggcattacatctaaatatttatgacttttcatccaccgaggtaggtagcattaaatatacaagcacagcattatttctctttaaatatctattttggagagaaactttgaggccgtatcacagtttatatcatgcaactaatatttatatttcccaatccactacaaaatcattgctaagcagaagagagcagttatttggcctttatgttccattgtatgcctttttcccctcttccagttttatgcattgataagactacagattggcaccctgctgcctgagaagttccatttatccatagtcattgcagtgcagtaaaccctgatttaaaggaacatttaagtctctccagtaagtgtgaacaggaaggcatgggatagaagagagtccttatggagtggactggccacatgaactgtcctccagccactctttatttagatgggaagtggcatggtcctctgaacgctgcaggctggaaatgatccccagggcacatgcaatctgtggaaaggaatacatcggacagtgcaacatggtgagggctttcaatttgctgtggttgctgtatttttaacaagacacccggagcttcgattaggaataacctatcattagagttgttcctttaaaaaatgttgatgaataaagcaaatgtgggtttaaaatgccaacttatttttcactttgatattggtgctttattaagtgataccatagtttctctctcttttccctgttactttaaaaagaattttaaaattgtgtttgtatataaggtcagtctggcatagaatttctgaaagtaacattaataggatttctaaagaagttgtcagaaagacaaaattggatattctctgcactttcagagaaggactatttatgtttgaatttcataacaggcttacatttcttttctattgattcccttgcatatctacataatttaatcctgtctattgtcccagatctcttgtggctactttacctgttaccttttttgggattttgttctttatgttttacagttaccttcggaccagaagatatatggtatttttattcacttttttcagtgttttaaaataaggtttgttcatttattcattttatccattcatttcctattgtcgtatagttctaaccatatatatagtactttaaatattttcttatgttattatttaacacaataataaattcttatctaaagaaaagatt

SEQ ID NO: 6275 - DNA, 1331 bp, Homo sapiens
agtcaaggtattgttttaatgtgagaaaaagagaaggaagtcactgatgaagggtttgtacatttagtatgagattttaaaagtttatggtgattacacatagctccatttcttgcatttataatattttagtcatataataagtcatttagatgaacactgaaacagtaactcggctgagccaaagcaaagtctagttcacagatggcagccagctcgtggacttgatggtaccacctggaacatcatgctgaaggacagtctaaactccagtttggctcagtagaagcaagagctttaatttaatatgactgctgtggtgcaaatctacgccaactatccccaggaagcaccaggtctctagcagccacattcctatggaagtaagtgcacgaaatgtgttaaaagtacttcataaatcatggatctcttgaaacacatgagtaaagcacacatctccaaaataaaattaaatcctaatgagggtgatttgaggagcttaattctccaaatagttgaagtattcaagcttgagctcacagctttaccatgctccaactagattctttaagaaaaagtaaacagaccaggaaataattttaaagtagtgggtgaggctacactagaagtatacaatgaattaaacacaacccaacataaaatagaaataaggcaacaggagatttcacttgtaatgaagactggctgtaattaaaggagatgaatacatcaaatttgtcaacgggaaggaaactttttctaactgcagggacatactgaaaactatgctccatgcttttggaaagaatgggtgaaagcagaaggggaggagattaagagattcgttttgaggtatcaataattaaaacggaattaactgaatgatgtctaatatggtttggctctgtgtccccacccaaatctcatctcgaattgtaatccccatgtgtccagggagggacctgtaagccttacatcgagggagggaagggattggatcatgggggcggtttcccccatgatgttcttgtgatagtgagttctcatgagatctgatggctttataagcatctggcacttccctgcttgcatttccatctcctgctgccttgtgaagaaggtgcctgcttcccctcccgccataattataagtaagtttcctgaggcctccccagccatgtggaactgtgagtcaaacctctttccttcgtaaattacccagtcttgggtaatgtctttagcagtgtgcgaacaaactaatataatgtcagagggatgcttttgtattcaccccaaagccaattcagaaccacaactgatgcagcacacct

SEQ ID NO: 6276 - DNA, 7694 bp, Homo sapiens
atcgttattatgcagtgaatttctgtatacaaaaataaaaaatgtatctgcaaaatgctgttaacgtttgatagagtgtcacattgtcaggtactagattgtttctgtagtcactatacttactgcctatttgtgataataaatagattgtgattttcaagttttcagctgatattggtgggagaacacttttgactcaatttctataaaatatgttttccttcataccctgtattctttatgtcttgatgaaaggtggtttattaatggacattggagtttttcctaatgcatgaaattttgagctgacaaagtttatattctgcttttaattcattgtttaatgctcataaaaaagatcaggattgcctaaccttatattattaaacttttagaaacccttgctggtttaaacggggtataatagttcatatctgtaatcccaacactttggaatgccaaggtgggaggatcacttcagcccaggaggtcaaggctgcagtgagctatgatcatgccactgtactccagcctgggtgacagagcaagacccttctcaaataaagatttttttctttgagatggagtctcgctctgttgcccagggtggagtgcagtggcaccatcttggctcactgcatcctccacctcccgggttcaagcagttctcctgcctcagcttccctagttgctgggactgcaggcatgtgccatcatgcccagctaattttgtgtatttttagtagagatggggtttcactgtgttagccaagatggtctcgatctcctgacctcgtgatccacccgcctcagcctctcaaagtactgggattacaggcgtgacaccatgctcggcctacttatttttttgttcataaaattaacagctttcacagtcattaattgttgcagcattcactcttagaatgttttttgtttgttttttaaaacaaggtctctctgtgttgccagtggtctcaaacttctgggctcaattgcttgattttcccaccccaggcttccaagtagctaggattacaagctcgtgtcgccacactcagctagaatatttatctatgtttcaaacctaatattcacatattaatccagatggacccaccgtatataattaatgttatattgatttgacatgatggtaatttatacagctacatgatctttgatggtgtaccagaaatgatgttaaggtaagtgttccgcaattcaaagtcttacagctgatgtggattgaatattggggtaaagcctaattttggtacatctctaaaaaagctactgaaccttatagaaacaagacaattagagttttcccattttcatatccctgcacctaccctatcaggcttttgtctaccagatcaaaattttacaatttgctcctttatacattttttttgtgttgtttttccagacagagtcttgctccgtcgcccaggctgcagtgcagtggcaagatcttggtccactgcaacctccggctcctgggttcaagcgattcttctgcctcagcctcccgagtagctgggattacgggcatgcgctaccacgcctggctaatttttgtattcttagtagagacggggtttcaccatgttggccaggctggtctcaaactcgacctcgtaatctgccttccttggcctcccaaagtgctgagattacaggcgtgagccaccaagtctggcctgatacatttttaaacatattagttgtagttccagtctcttatctctgtccttctaggcattctgttctttcttcgtttaattcagtaatacttatagagcacttaaaccctgagcattttatgcatgtatttcagccaagtgaggttttaagactgcctttaaatctcaactcagatgttacctcctaaaagatttttttcagcctcctgagttggaccttgttacatctgtattctcagagcattttaaacttactttgtttgtagcatcacattgtaatataaagaattgtttgagtatctcctttaccagattttgagctccttgaattaaaaaactgttttttcttgttcatttctgtgtctcaaagacacagaatgaggctgcctgatacactgcctcaagtaagcaagtacttggtacaaaggagttacagcacatatgcatttaatttatgggtttacactgtgtgcttaattaaaagataaataattgaaataatcaggcagtttcactggctgttgtacccagtgggtgtatgcctaagattgggacaatataagaagtataaactgttgttccagtatctgttctcatatgcctctcaaaagtaaacatctcaccaggcttgagtgcgtttctcctgttgaagataacttttcatagcttcatacctcaaacacaagccagccactcccactgacactcattccaatgatggaagaaaagccagctgtgttggacttgaggggtggtgtattaatctctaacatagtgcttttctaatgaacgatgaaggataattttgactggactgagtttcacaatatattatacactgacttcagaacctaactctcccccccacacccccgccaagaagaagtcttgctgtgtcgcccaggctggaatgcagtggcgtgatcttggctcactgcaacctccgcctcccaggttcaagtgattctcctgcctcagtctcccaagtagctgggattacaggcatgtgccaccacacccagctcatttttgtattttctgtagagacagggtttcaccatgtccaggctggtcttgaactcctgacctcgtgatccacaccccttggcctcccaaagtgctgggattacaggcgtgagccaccgcgtccagccctgaacctcactctttatatgaaagataggaatgctactatacagttttgttaaatgaatgatctgtcctttttctgcgtttctgtaatactttattattcaaatgacatttttgctgcttatttcatagctgtttacttttgtcttatcccaccagttaaaaaaacaggaatcatgtctttatacctctttgtatttggtatattgctttttatataatactcgtttatagaatgaatagacattttattttattatttatttatttatttatttaaagacagagtctcgccctgttgcccgggctggagtgcagtggcgtgatctcagctccctgcagcctccacttcctgagctgaagcagtcctccaggttcagcctctccagtacctaggactataggcgtgtgccaccacgcctggctaatttttgtgtttttttttgtagagacagagtttcaccatgttgcccaagctggtctcaaactcctgacctcaagtgatctgcccacctcgggtgggtcccaaagtgctgggattacaggtgtgagccactgcgcccagcattagacagctcactgtacagtgatcataaacctcagtaccctttgctaaatgttccctctcagttatcacttttctctctttcccacagctctttcgacgtgtagcagcagctttgccgggaatggaaagcacacaggacagaagcagagaagatagtatcctttttatttcattggaaatttttcattattaacactagtctttagagccctgcttgcttggctaaagaatattgtgccattgccttttacaaccaggaactgatgacttaaaggcatagaaattcatttgttttctatagcaaatgaggtctggttatccaagtgcaccctttgcagcctgcttctcgttgttaatcagtgagaggttttgtgtttgtttgcttgcttttaaatgagcaggaaactcttagaatccctgtgtccttgcctcttcattttgagtcccattgactctaggctttttcctcatggaatatcaaattttcatttctttttctaacacttgagctttctacttgacacaggcaagaaatagagtggagctttattgtagcctctgctttcagaaacaggacataatattagttcatttccaaggattgggacatctaatattagttaattctaaggatttttaatttgatgttttcagtgtttcatattcaccttctagtgtatttccatatgcaggcatttttattaagccatatagtttgtagcactttgtattcagctcttcccacttgtaaatgttatatgttttcataaaaaacataaaacaggccgggcgcggtggcttatgcctgtaatcccagcactttgggaggccaaggcaggtggatcacctgaggtcgggagttcaagaccagcctgaccaacatggagaaaccttgtctctactaaaaataaaaaaattacctgggcgtgatagtgcacgcctgtaatcccagctactaaggaggttgaggcaggagaattgcttgaacccaggaggcagaggttgcagtgagccgagatcacgccattgcactccagcctgggcaacaggatcgaaactccattccccccccaaaaaaaaaaacacaacaacaacataaaacataatatgtttcaaaaacaaaacaacaacaacaacaaaaaatgttctattgagttgaagtatgtccccgcgcccaccgccgtttttttctgagatggagtctcattctgtcgcccaggctggagtgcagcagcgcaatctcagctcaccacaacctctgcctcctgaattcaagtgattctcctgcctcagcctcccaagtagctgggaatacaggcatgagcaccatgcccagctaatttttatatttttagtagagatggggtttcgccatgttggccaggctggtcttgaactcctgacctcaggtgttcggcctgcctcaacctcccaaagtgttgggattacaggcatgagccacggcacccggcctgaagtcccattatttactaaatgtttcctctgctgttggaactatcttgtaggctattttcagatttatattatagatgattctatgaggaacatcatcttcatatcacttcttgccactgtagaataagttccttaggatagatacccataaatagagcttgtacctcattctgacccttgttgcatatagtagatataaacaagtttattccatttgagcaccttatatggtgaggcggctatgtagaaaatagtgagtgtgtaggctctgaagacagataggaatataagggccatcccagaaatgctagtgtttggaagaattgaaattgtactttcccatttatggcttcttaacttttgtttcagtgattgacataaaactggaaaagcctcaggagcaaccagtcagtgaaggaggctgttcctgctaatctcccatgtcatcttcaaccttcttcagaagctcactgctttggcccccttactctttcattgactgcagtgtgaatattggcttgaaccttttcccttcagtaataacgtattgcaattcatcattgctgcctgtctcgtggagatgatctattagcttcacaagcacaacaaaagtcagtgtcttcattatttatattttacaaaaagccaaaatatttcagcatattccagtgataactttaaaaattagatacattttcttaacatttttttcttttttaatgttatgataatgtacttcaaaatgatggaaatctcaacagtatgagtatggcttggttaacgagcggtatgttcacagcctactttatctctccttgcttttctcacctctcacttacccccattccctattaccctattcttacctagcctcccccgacttcctcaaaacaaacaagagatggcaaagcagcagttctaccaagcccattggaattatcctttaattttacagataccacttgctgtaggctacggaccaagatgtccaaaattattcttgagcactgatataaattacggtcttctttgaggtcaaaattcagccatcatggtaggcagtgcttgaatgagaaaaggctcctggtgcatcttcaaaatgagtcctaaagaacatactgagtacttagaagtagaagaacataagatgtatttctgactaaaacaaatggctctttcacatgtgctttattagactctgggagagaaaattaaccaagtgcttcagaacaggtttttagtatttaattcttcacggtaagaaaatgaagttctaatgaactgtttctcccaaggttttaaaattgtcaagagttattctgtttgtttaaaaaataagaaacctctttaagcaatagattttgcttgggttttcttttttaaaaacataatactgtgcaggcaaggcactgtaaaagttttaattccttccagaagaaccagtggaagaatttaaatttggcgctacgatcaaaactactgaattagtagaaataatgatgtctaaagcttaccaacaaaagaaccctcagcagaataacaaaaactttgctcaggacatttgaggtcaaattgaagacggaaaccggaaaccgttttcttgtaagcccctagaggcagatcaggtaaagcatacatagtagagggaaaggagagaatggaaataaaactcaatattatgcagatttatgccttattttttagcattttttaaggttgggtctttcaggctggttttggtttgtattagatctgtatagtttaattaactggtgatttagttttatatttaagctacaattaatcttttttctttggtgatatttatttctttgccttttttttttttaacaactttcaatcttcagatgtttcgttgaatctatttagagcttcaccatggcaatatgtatttcccttaaaacactgcaaacaaatatactaggagtgtgcccttttaatctttactagttattgtgagattgctgtgtaagctaataaacacatttgtaaatacattgtttgcaggacgaaaacttctgagttacagctcaggaaaagcctgctgaatttatgttgtaagcattacttaacacagtataaagatgaaaagacaacaaaaatatcttcatacttcctcatcccctcattggaacaaaaccttaaactgggagaaccttagtcccctctctttcctcttcctcctccacttcccacttattgtcaccttgtaatattcagagagcacttggattatggatctgaatagagaaatgcttacagataatcattagcccacataccagtaacttatacttaaagatgggatggagttgtaaagtgcttttataatacaatataattgttaaaggcaagggttgactctttgttttattttgacatggcatgtcctgaaataaatattgattcaatatggcagatgggtcatattctttatttggaagaagttgtgacttctgacatgggtgtgattgtcttcctacactgttgcatttgattctttttatgtatttttaagaaagtaaccagttatactgcttttaatattgattggtctttttatttggcttggagttcttcaaagcattgaagtgtgttcatagtccaggttttttttttaataaacacaattttgctgccaaaaatatataaataaaacacgaaagaaaacaattattgacctggtttcccattcctgccaagatggtgaattagcatttacttctccctctctgggaagacctttaaagcagacatggacagaatcc

SEQ ID NO: 6277 - DNA, 126 bp, Homo sapiens
agatcgagaccatcctggttaacacggtgaaaccccgtctctactaaaaatacaaaaaattagccaggtgtggtggtgcgtgcctgtagtcccagctatttgggaggctgaggcaggagaatcact

SEQ ID NO: 6278 - DNA, 1247 bp, Homo sapiens
cattatgtctgtaaaaacaatgtacatatctggccacacgtggtggctcatgcctgtaatcacagcactttgggaggccaagatgcgtggatcacttgaggtcaggagttcgagaccagcctggccagtacaatgaacccctgtctctactaaaaatacaaaatttagccagatgtggtggccgatgcctgtaatctcatctactcaggaggctgaggcaggagaatcgcttgaacctgggaggcagaggttgcggtaagcctagatagtaccactgcactccagcctgggggacagatagcaaaactctgtctcagaaaaaaaaaaaaaacaacaatgtatgtatcttaattaaaaaatactttattactaaaaaatgctaatgatcatctgatcgtagccttctgcaaatcataatgtttttgctgttggaaggtcttgccttgatgttaatgtctgctgaccgatgagggtagtagttgctgaaggctagagtggctgtggcaatttcttaaaataatactattaatacaatgtagttttctgcattgatcgattcttttatcacaaatgatttctctgtagcatgcaatgctgtttcatagtattttacccatagtagaacttctttcaaaattggcatttcagtccagtcgcagtggcacatgcctttaatctcagcactttgggaggctgaggcaggtggatcacctgaggtcaggagtttaagactagcccggccaacatggtgaaaccccatctctactaaaaatacaagaattagccctgtgtggtggcgcacacctgtggtaccagctacttggaaggataaggcaggagaatcacttgaacccaggaggcggaggttgtggcgagctgagattgtgccactgcactccagcctaggtgacaaagtgagactgcatctaaaaaaaatagtgccaccaggtgcggtggtgcatgcctgtaatcccagcactttgggaggctgaggtaggcagatcacttgagctcaggagttggagaccaccctgggtaacatggcaaaacctcttttctacaaaaaaaatacaaaaattagccaggtgtggtggcatgcccctgtagtcccagctacttgggaggctgaggtgggaggattacttgagcccatgaggtcgagacctcagggagccatgattgtgccactgcactccagcttgggtgacagagcaagaccatatctccaaaaaaaaaaaaaaaaaaaa

SEQ ID NO: 6279 - DNA, 102 bp, Homo sapiens
gaggcggaggttgcggtgagccgagatcgggccattgcactccagcctgggcaacaagagcgaaactccatctcaaaaaaaaaaaaaaaaaaaaaaaaaaaa

SEQ ID NO: 6280 - DNA, 1416 bp, Homo sapiens
aatttgaggagatataaagtacaggaatgggatctcagtacaatgctgtccacctggtggtgacttttctaagcactgtggtatattgggaccttagggctttctttgtgaatatgtatggtcattgttaatatcttgattctttgcttcttattgacaagtgatgattataattcaatggacaacctgaatcttggaggaagggaagaagatgctgaactctctgttaatttagcataaaacttgactttttgtattctagaaattcaagtctatacaggtataataaagcaaaaatatgtaatttatgttgcttctctcaatacattaggtaatttagtttgaaaaaaaactacctttaaaaattgacgttatttttctcttccaaaatatttccaataaacttacatattgtcttttattaacattgtgttaatgtccaagtttataaatagaatttttgtataacaagacacattatcatctaattattttttattctagatgtgaaatgccaatttacagaatattgttttagatttctgtataaatgttaatccctcttaaggcctacttaatgtagattaataaaacaattattatagtctcttagaggttcacattacaattccaaattgtaagtgattctatgctttcatgattgtctaagcctgatataacagtcatgttcagttttttaatattcttgatgttagtttttgtttttgctataaatacactgccctggaatttaacatatctcttctttttgatgaaacttaaacagtaatagacaaaattaggctagtttttattttttcatacaacttttaggattaaaagttgccttctcaaaaacatgacaatacttagagatacttatttcattttctgtgtctgcctcaaattttccatttaatataaaaatagatatatttaattgtttataagtataattgattggcatatgcacatgccatcttagttttaacacagggtttggaaactagataaacaagattattttagctgtctttttatacatgcaaatggaatttaaacctggatggttcaagtgtagttttgaaggggaattaaaacataataggatttctggctgggcatggtggctcacacctgtaatcccagcactttgggaggccgaggtgggtggatccacttgaggtcaggagttcaagaccagcctgaccaacatggagaaaccctgtctctactaaaaatacaaaaattagctgggcatggtgacgcatgcctgtaatctcagctactcaggaggctgaggcaggagaatcacttgaacctgggaggcggaggttgcagtgagccgagattgcaccattgcactccagcctgggcaacaagaacgaaactccatctcaaaaaaaaaaaaaaaaa

SEQ ID NO: 6281 - DNA, 436 bp, Homo sapiens
catgttggccaggctgccggtctggaactcctgacctcaggtgatccgcccacctcagcctcccaaagttctgggattacaggcatgagccaccacacccagctgacacctttcatttgttaagtctctgttatgtgccagatactatgctaataagctagcgtggattatgtcatttaatatgtatagctatttgatgaggtatttttctccctatttttgagaaaagcttggagaagtagttttccttgaaatcagacagccagtaagctgcagaaccaaaattcaaactcaggtctctgattccaaggcctgtagtgtatatatcaatttattgttatgttaagccttacatatactcttccataacatataataccatacctctatgcagtttattttatattgcatatttcagcatgtaactcgacctttt

SEQ ID NO: 6282 - DNA, 2786 bp, Homo sapiens
ccaaacccatttattactggcttgaccaggacaaatcctttcagtgacaggactgctgctcctggaaacccatttagagccaagtctgaagaatcagaggcaacttcatggttctccaaagaagagcccgttactatcagtcctttcccttctctgcagcctcttggtcataacaaaagcagggcttcatcttcacttgatggctttaaggacagttttgatctacagggccagtctacattaaaaattagcaacccgaaaggatgggtaaccttcgaggaagaagaggattttggtgtgaaagggaagtcaaagtcagcttgttcagacttactgggtaatcagccaagttcattttctggctccaacctgacattgaatgatgactggaataaaggtacaaatgtctccttctgtgtgttgccgtcaagaagacctcctccacctcctgtccctctgctcccgcccggcaccagccctccagtagatcctttcacgaccttggcctctaaggcttcacccacactggactttacagaaagataacgccatgcaatagaaaacagtgggtacttgcttttggcaggatagagctaagagaattgggcattagtatttcattatgtgcaataagtcattgtaagtgcactgatatcttcacaaaacaccactatttgatgtgtacagagttggactatgtgtatattggaaataaggaaaaacccttctcattgttaactggagttttgatgtatttctctttggatgaataggagacagtagtagccataaaaagtacttatactttagaaaacagtccttattcagaaacttttcggtcagtcttctgaagaatctcaaaaagcccacccaactttcagctgacatttccaccagccctctcatacttgttaacaattggtatctttgagtatttaccaaagagctgccaaggttacagtgaacagagttttgaaaggcattgctttaaaggaaaaaagtataggtatgtgtacatatataatacatacaaacacatgtacttctgtatacatttacatatttttacaattcatactttaatttctaggctataactcagaccaaattatacctaaaagttccaacaaagtccctttttcaatatcacattaccaaaaagatggctgcaaatgtaatttggacctttcattaattttgttttcaaaactagaataatctcaccacagaatcagaattttctaccgttccacacccaaccccttcaaatacacacaaccttgttacttttcactccagcaccttcatacgcttttctccaggaggaggttcttgcagctggaaacagcctattttgtggtcactgtcaagtggatggatattctagcgctcccaaaaaagcactatggccttatatgcagggaaggcacataccaccaagttcaatgagaaatattagagctaaccgtactctcttctctgcgtacgttcgagtatacgttgcccatatccctcccatattttctttttgctgcttttgctctggaactttgcttttagcagggaaagcagctgtcccctgagtgctttgaattgggaatatacccagtgtgtgttctcccccctcttacgaggctacataacacatctatgatgctgctttaagtttttagaggctatacctcaaagtagctgcggattttgtctcctgcactgccaatatgcaactgatcccgcttttattaattttttgaagaagtacacagaatttttacagaatgtagtattttgatatcattaagtaaaccaatcagaaaactccttgagcaatagttgtttctttgtcagtttcagttacaatcatctttacccattaagacttacattaacattccttttatataaagagttgtatatgtccacctaaattcctatgtccacacttaacctttaaagatgtacattgagggaatatcaaaaaatagcgttcatggctacgaatatgtagaatgttaaaagcacagcaaactgcactgcacttataaagcaaatctattagaaaaaaagcatttttctaaatgctcaaatgttatcaaaatactatatttatagaagtaatcttctctgttaacagccaagatttgctgttagaaataactcttgtgagttttatattgtgctttttggaggttctaatcatttcagcagtagcgtcttaaacagcagtattactataagcagttgcttcaaaatgtgaattaacttgttgaaactgtggctttaacatccatgtgactagtgtatatggtatttgctctccattagcaaaataattcattgttaggtaaacttcactagtgcaaattgcagatctgtgagcaatgtttcctattgaatataaactactgtctaaaatatacatatcagcagcccagcctttatcaggaaaattatacttggcaagttgctgaaaatgcacaaagttatgaaagttaaaggtatgctgcaaataactagccattattctatgtattattaaatatttactagttctgttaaaagcagagcagaagttagacactaaggatctctttgtgaactctgtgttctctatattagattgctgtttatatgtaagaattttattgcttatgtggcatacaatatttataactataaactttatagaagtacagtattaaagtcagtggtacacagacattctgtacatatcctgtgaaacgtgctgtcatatgaaataaatatatctgtctttaccatgctga

SEQ ID NO: 6283 - DNA, 2786 bp, Homo sapiens; identical to SEQ ID NO: 6282

SEQ ID NO: 6284 - DNA, 2786 bp, Homo sapiens; identical to SEQ ID NO: 6282

SEQ ID NO: 6285 - DNA, 270 bp, Homo sapiens
cacgcctgtagtcccagctactcaagaggctgaggcacaagaatcacttgaacccgggaggtggaggttgcagtgagccaaaatcgtgccattgcactccagcctgggtgacagcacaagacttggtctccaaaaaaaaaaaaaagagggggtgggcaaagaactctcaaaatttatttttccaagtagaagacagaaagatggagtcttcgtcttaggaataaaatatgctaatagaattaattttatctataaaattgaatttccata

SEQ ID NO: 6286 - DNA, 270 bp, Homo sapiens; identical to SEQ ID NO: 6285

SEQ ID NO: 6287 - DNA, 270 bp, Homo sapiens; identical to SEQ ID NO: 6285

SEQ ID NO: 6288 - DNA, 1362 bp, Homo sapiens
ggtgaagtgtagctgctccctcctctccccgttcctctctgtccccccatcaggggaatacctactcattcttcaagccccggttcaaagtcgcctcctcctgatgcccacctgctgcaggaattgaacctccactttgcatctatagtgcttcagaccagccttgaggagaatgtcactgtggtgtggtgtagccatctatacttgtcctcctcctacaaggctgtgagccacttgaaggcttctgatgaagcaggaacaaaaatattaagatgtgaatatttacagcctttcttctcctgccatgttcccacatctgagctgatcaaggtgatacaaagtggaagatgcttcactgaagaaagagcataaagttagcagcaaaagctggatcagaatagaatcgatccagtcaactagaggtggaggcaagagagagcagagctagagttttaggagagaaaaaggaaaaagaaaaaagggggtggggagtgtagtgacctatggcactttggggaaaggcaggcctgaagaggatttggagagagtttctgtctgttgtacgacatagttgcttttcccaccttgccgcttgtttgggagttttgcaaaggcttcattgccaatcaatgcttttggagactatcagggtttcttctggatgtgacccaggcttcaaatggcctaagatttgttcaggttgcattgtacattttgggcccagctcagcaggtatgcagaataatacaaagatgagacaaaagagcaggtggagggacaggaggaggagtgcacacaggctgtggctctctgtccctctctgggcagaccaccatggtggacaatgctcatgcgttcatgacaacttgttccccagggagccccagattttgatgaaccatctccccaggtcccgcctctcccaaattgtggataaataaagccctaagatttttaataggcacaaccattgaggatgtatcagaaatactccctctctgtggttttggtgcagacaggaggggatgggtgttgggtgtgattctctttcagcctttctttcttcccctctcaagaaagcttatcaggaagcacacaagcacaatacttctagataaatattacttcatttgactccttctaggaatcttgtgaggtgggattaatgttcttattttaatttcaacttccaattgtttattatcagcatgtagagatataatttatttttgaatattgacctattatgaaattttactgaacttaatacttctagttttatttttgattgattcttagagttttctatgaagacaatcatgttgtctgtgaataaagatggtttctatttttcctttccaa

SEQ ID NO: 6289 - DNA, 488 bp, Homo sapiens
ggtcaggagttccagaccagcctggccaacacggtgaaaccccgtctctactaaaaatacaaaaattagccagacgtggtggcgggcacctgtaatcccagctactcgggaggttgaggcaggagaatcacttgaacccgggagacggaggttgcagtgaaccgagaccatgccactgcactccagcctgagcgacagagcaagactccatctcaaaacaacaacaacaacaaatttcaaaaagcataaaagagagggtggaatgtctccctctacctctaccccggtgtcctggttctctctttcaactcccagttcctatcccaaggggaaccaatgtccccagattcttgggtgtccttccagagaccttatatccaagaataaacaaatatgtatagtctttcctgcctctgccacaaatgatgacgtgctgtacacactgactgcacctcactggtctcacctgtatgtcccggtgaccagag

SEQ ID NO: 6290 - DNA, 1485 bp, Homo sapiens
cagttttgatccccagagagccccctgtacccttcagctgagtactctcaccattgtgccttgggctccctgagattccccaaccaaaggaccctcagggctcctcagcctctgcaaggcttcctggcttgccctgaaaggaaaagtcctgatattggcctctaggatttattaaggacaagagcttagagtttcagagcttctccctggggaagctctggcaaagatgacagagatggttcttttcaatgcccaaggttgttttttgatatgtggtctgctggtgagcagggccatgcacaatgtgtcagaaggctcttgatttgcagaaatggtgtaaatggagaccccttttggccaaggaagtggggaggcgggcacaaacataatctctgttccacttggaatgcttcgcagggagtctccattggtgggttaagcacgatcaccaattgatcacaccagcctggggcagagggtgtggggacagggaagaagaagggagtttgagctccaggtccctgcacgggaaaaacattggcaatagcctccttaccaaccaaccgtcccatctctctgctccttctgacttactaggatggcctcagagaaggcacagtgttaacccagccttatcacagttgtggaagcgccaggggaatgggagagtcaggggattaataatagtaggagcaatgccttacatctagtagatgcttcacactttcccagaagctattacttaatgaatctcacttaaattgtgtctgtaccatattagaatatcctgtgcagggataaatatgcccacttgaccgtcttattggaaactgcacacagtgaggaaatgcagcttgttcaatgacaagtggcagagccagggctgggactcaaaagcagtgagatctgattgttggtccagaagtttgttattctctcagcttgattaaactgcccttactcctgtttttccctattctatctccagaatttgacaagaggctgtcagctaaaatctagttattccagccgcataagctctatagttcaaccccagtggagtctttggggttgagatgctgaggcccttttcagagccccacaataaccaggtggctaagtgcaaaatgaaaacagcagaaagactaatgtccccactgagccacttaccatctctttgtggttggggtagtatgtctgttcaatgagagggaacttttctcctcccagtgtcttatagatagcgaccagctgggcaaactgcaaaagaaaagcaaatgttacagcttatcttagataacttctgaaacagatgaaacatcaactcatcaaatatttattgagcatttgctctgtggaggactttatgctaagcattgtgaggatataaaagaagtgtacaattcctatttccaaggatatgatacgcattagttggggaagggaaagagagtgagctaaaattcaattagctttctcaattgt

SEQ ID NO: 6291 - DNA, 1485 bp, Homo sapiens
cagttttgatccccagagagccccctgtacccttcagctgagtactctcaccattgtgccttgggctccctgagattccccaaccaaaggaccctcagggctcctcagcctctgcaaggcttcctggcttgccctgaaaggaaaagtcctgatattggcctctaggatttattaaggacaagagcttagagtttcagagcttctccctggggaagctctggcaaagatgacagagatggttcttttcaatgcccaaggttgttttttgatatgtggtctgctggtgagcagggccatgcacaatgtgtcagaaggctcttgatttgcagaaatggtgtaaatggagaccccttttggccaaggaagtggggaggcgggcacaaacataatctctgttccacttggaatgcttcgcagggagtctccattggtgggttaagcacgatcaccaattgatcacaccagcctggggcagagggtgtggggacagggaagaagaagggagtttgagctccaggtccctgcacgggaaaaacattggcaatagcctccttaccaaccaaccgtcccatctctctgctccttctgacttactaggatggcctcagagaaggcacagtgttaacccagccttatcacagttgtggaagcgccaggggaatgggagagtcaggggattaataatagtaggagcaatgccttacatctagtagatgcttcacactttcccagaagctattacttaatgaatctcacttaaattgtgtctgtaccatattagaatatcctgtgcagggataaatatgcccacttgaccgtcttattggaaactgcacacagtgaggaaatgcagcttgttcaatgacaagtggcagagccagggctgggactcaaaagcagtgagatctgattgttggtccagaagtttgttattctctcagcttgattaaactgcccttactcctgtttttccctattctatctccagaatttgacaagaggctgtcagctaaaatctagttattccagccgcataagctctatagttcaaccccagtggagtctttggggttgagatgctgaggcccttttcagagccccacaataaccaggtggctaagtgcaaaatgaaaacagcagaaagactaatgtccccactgagccacttaccatctctttgtggttggggtagtatgtctgttcaatgagagggaacttttctcctcccagtgtcttatagatagcgaccagctgggcaaactgcaaaagaaaagcaaatgttacagcttatcttagataacttctgaaacagatgaaacatcaactcatcaaatatttattgagcatttgctctgtggaggactttatgctaagcattgtgaggatataaaagaagtgtacaattcctatttccaaggatatgatacgcattagttggggaagggaaagagagtgagctaaaattcaattacctttctcaattgt

SEQ ID NO: 6292 - DNA, 1485 bp, Homo sapiens; identical to SEQ ID NO: 6291

SEQ ID NO: 6293 - DNA, 5796 bp, Homo sapiens
gagccctgctggggccgtccagtcccccagacctcacaggctcagtcgcggatctgcagtgtcatgcctgggagccctcggcccgcgccaagctgggtgctgttgctgcggctgctggcgttgctgcggcccccggggctgggtgaggcatgcagctgcgccccggcgcaccctcagcagcacatctgccactcggcacttggtgagtccgaggtccgcgaggtccacagcagggggtggttgtgggggattagtatctggccagcagtacaccaggagtccagaggaaaagggaggagctcaaattcttaccggttgtctcttgctgaggctgatgggtggagaaggaccaggcgccatagcaaccttgcaagcccagaacctgactgattcataaggaaatgaagatttcatcagggacttccatagcgacctccctcactccggccatactgcaattatggagtgtcattacacaaggtgtcaccggagctatctgatgattattctgaactactagactggggacagaaaggggaggggagagggcttgcattgtaactacccgtgtctgtccaggcctataactgaggttgccaccaagcccctatggcaacacacacgttctgtcctttctcttccctctgcctggaatgccctccctcacacccttaaattcagaaagactcctactcatccttcaagggctaacttaggtctctccccttctctgcaggctcccgggctccttggtgccgcctcagcatctctaaccgtcttagcgctcctactatgctgtgctgttgttctttacacgtgtgcactccactagatcaagagcttggcaggatggggaccctgtcttaatcacatctatgggcctagtgcctagtgcaaggccaggcacagaggaagaacatcatcaacagtttttggttattaatgctcaaatggcaagagatgcaatacctcagtgcagggtcagaacatttatgaattcaataaacatttactaatatcaactgtaggcgggatgagaggccttgaccacagcaatagataaacttcacaccgactgccctgaaggggctcctcctcccttctctactctgactcctaccctgtgccccactgcacaaacggctatggagaactagagctctccagactaactggttcaaaaggcagaaacagcttagcggttataggacctaataagcctgaggggtttggaacttccagtgactgcaggggaggtgtttccaggtcccccttctcacacatcacgttgctcacaacccagccacaccaaaaccaagaactgccctatagacttcttcatggaccctggatcatccagacctcaggtgtattgcccccaccagctgctgaaggttccctcttttctcttcctatgcagtgattcgggccaaaatctccagtgagaaggtagttccggccagtgcagaccctgctgacactgaaaaaatgctccggtatgaaatcaaacagataaaggtacatgggggcaggctgggatgtgtagcccctaaggctgatggagaaagtggagtctgtgttctgggagggctggtagctttcaggtggcctggctcagtaatccttgggtctagatactgaagtggaactggatgagatttggaggcagagcccatagaatcccagggatattgccagggagggcctcagcatccatctggtcccacagctgctggtgtatggtgccactacaggtacctactggaataaaccaaggtttaggtgtttttttttgttgttgttttgttttaagagagaaaataacccagtagggacatctgaggacacaaaatcctcaactagacttttgcttacatttttaggctgagaagtgagaggtttttgtctgttaatatatacagtacactcactgacccaatattgcctttttttgtaattgcctgtcagatgttcaaagggtttgagaaagtcaaggatgttcagtatatctatacgccttttgactcttccctctgtggtgtgaaactagaagccaacagccagaagcagtatctcttgactggtaagttaaaagaccaacaactggccttaatataatagattctgccctaggggaggtagtgagaaaggagccagggtcttccttgggcagtaggctgagccaggtggcattttcttgggcataaaacagagctgtgttagtgacagacaacctctgggttaggaggagccttgtaacctccctttaaatgtaagagttcttagtacagtgaccctggccaccgtttcactattttaaggacaggctgctcacccagtgtagggcagctgcttccgtttttcaaatagtttaaattagtataagatttttggcaacttgagtcaaagtctcctctctaaaactgctccttgcaggtcaactctgccttttgcacaggacttaacaggagcttgagtctaacatagttctgtctctgtgaacttgggcccaggcaggattcctccatactgaattggctgggatagaacagttaaagaatcacacaaaaatatgactccataaatgaatgcaacattaaattattttggagttcagagaacggaactatttggtagttgtgaactatcagggaagcttcattgtgtaggtgggatctaaactggcctgaaaacataaaacaatatttagaaagaaagcaagggaaagaaaaagcacagcagtgggggagggaacaggtgaagggattccacgatctatccacacattcagcaatgaatgaccacttagtcactgccatgccttggccaggagagtggagattcagtaacaaggcacagtccttaaaagagttcactgtccagacatggctcttgatgagtcataggcactggaggctacaatgataagggcttcctagctctgaggatgtggaattgtacagaactgaggagctcctggatggaagaggcagaggcaggacacaccactgagccctgcagttcccaggtctagcagaccaggccctttcaaactctattatcgcacctccttcctaagcacctgccctctgtgtgtctagcccgctgctaggcatggaggtacagcaggggaaatgaggaaacatgttccctgccttcagggaggtcaagtctaactgagggtggggagaaatgacaaaaaatagtctaagaaaagttatcaatggtgcccaggtcctacaggagaaggcacaagctcctttgcctggtgttgaaagctctttgtgaccagaacactgctgccctctctagctttgtcaatatcagttcccagcccctcactttcccaagaactgaactcagctacctgtggttgcagaaggtatgctgccaggctgtgtctccctgcctctgcacaggatagtggcaatgacaggaagcccttcccccaacctgtttggtaggcagactcccactcatcccttcaaggcccaatgcaagcacagtcttctctgagacaccttctttgccccacactccttccatagatggaaataattgtatgttcctttgttcttatactgcactttgtatagaaccacacaatagtgtaatttttccctacttatccatctaccctactcatttctaagctccttgggagcagagatcctgtcatttttatatctgtattcctggtactagatcacagcagtcactcagtgagtaaatgattgagcgactgaggttctaaaagaggcatgggctagctaggtggtcagagatggctttgaggtggcactgaaagggtctttgaaaggtgaaaaggagcttcataggtaaaaagggggaaatttcctatggggaaggtaaaagactcaccaatctagagcaggagcctggcctgtgcagatactgggaagggctggaaaggggaagggacctattatttattgaatatcttctgtgggaccacactgtgctgggaactttatagacaatctctcatttaatctgacaactttataattttcatcttccagctgagaggttatacaacttccttaagatcattcagctagtaaatgacagaaaagaaagggggatcccacacagactttgactttaaagaccacattcttctctctgtaccatgctaaacgaaaaggccttcaccagatcccacaactctgcctcgtacaaacataatctgcttatctttttgctagaaagattatagtagttttatttattggtcccttcactgagccccatgccaccactgccaccaaagtcattggggaggctgcaattctgggcttttcaaggacctgggcccctggggctccaggagaagaatcctgatgcttgactctcctccatctccccttgaaggtcaggtcctcagtgatggaaaagtcttcatccatctgtgcaactacatcgagccctgggaggacctgtccttggtgcagagggaaagtctgaatcatcactaccatctgaactgtggctgccaagtaagggaatgtccatttccaaagtctttagggatgggggaagggttctgagccttcattcatgcatgaatttattcacttactagactatacttgagatctgcactgtatgaagttggggatgagaaagcaatacagtctataggccctgatctcaaagtacttacactttggctgggaaggtggccatcacaggaggcagaccgagataactgtaacacagctaccctttaaagagagtctattctttgccagccactgtaatagtaaatttactgtaaatgtttaatttagtctccaaaacatatttatgaagaattaagatttccattttaaggtgaagaaatgaaagctctggcaagtgaagtgctcaaggtcagtggtagagtaaggaccctcagagctgtctgactccagagatgccactaagtggcaatattgaatatggggaaccttggggaaggagaatccaggagaagactggggactgggaaaggcttgataagatagggggcatttgagatgggctggaaaggtacgtaggaatctgaaaggcagcaatggaaaaagaaggacaccctactcactttaatgttgtgtggccatgactctagatcaccacctgctacacagtaccctgtaccatctcggcccctaacgagtgcctctggacagactggctgttggaacgaaagctctatggttaccaggctcagcattatgtctgtatgaagcatgttgacggcacctgcagctggtaccggggccacctgcctctcaggaaggagtttgttgacatcgttcagccctagtagggaccagtgaccatcacatcccttcaagagtcctgaagatcaagccagttctccttccctgcagagctttggccattaccacctgacctcttgctgccagctaataagaagtgccaagtggacagtctggccactgtcaaggcagggaaggggccatgacttttctgccctgccctcagcctgttgcccctgcctcccaaaccccattagtctagccttgtagctgttactgcaagtgtttcttctggcttagtctgttttctaaagccaggactattccctttcctccccaggaatatgtgttttcctttgtcttaatcgatctggtaggggagaaatggcgaatgtcatacacatgagatggtatatccttgcgatgtacagtatcagaaggtggtttgacagcatcataaacaggctgactggcaggaatgaaaacaagaacatactgtggctgtgta

SEQ ID NO: 6294 - DNA, 502 bp, Homo sapiens
cagaggaaacacatctctctagggctactggattagttcacactcgaagccactggtatctggcatggctagaagggaaagctgctagatgaaatctatttatcagagaaaggaaggctagaacatttttcaacagctcaggtcctgttctctacaagcgatactggcacataagccagggaggggagacgaggttggggcagtaaaagctcggaactgggttgttagaaaactggaatcttctgattcttgttctgttaacttcctaggtgtccttgggcaaatgagttttcctctctggatctcattttcttcatatataaaatgagatggttaaatttgatcagttcctcaaactttgtaccataaagaatatctctttattatatttcctcccaaactctgctatcaaactgtagtttaagtgatcatctgttgtggtccttttgtaggtatagatatgattttgttatttttgaaatgctggaaaacactggaattc

SEQ ID NO: 6295 - DNA, 5853 bp, Homo sapiens
gagccctgctggggccgtccagtcccccagacctcacaggctcagtcgcggatctgcagtgtcatgcctgggagccctcggcccgcgccaagctgggtgctgttgctgcggctgctggcgttgctgcggcccccggggctgggtgaggcatgcagctgcgccccggcgcaccctcagcagcacatctgccactcggcacttggtgagtccgaggtccgcgaggtccacagcagggggtggttgtgggggattagtatctggccagcagtacaccaggagtccagaggaaaagggaggagctcaaattcttaccggttgtctcttgctgaggctgatgggtggagaaggaccaggcgccatagcaaccttgcaagcccagaacctgactgattcataaggaaatgaagatttcatcagggacttccatagcgacctccctcactccggccatactgcaattatggagtgtcattacacaaggtgtcaccggagctatctgatgattattctgaactactagactggggacagaaaggggaggggagagggcttgcattgtaactacccgtgtctgtccaggcctataactgaggttgccaccaagcccctatggcaacacacacgttctgtcctttctcttccctctgcctggaatgccctccctcacacccttaaattcctggcagactcctactcatccttcaagggctaacttaggtctctccccttctctgcaggctcccgggctccttggtgccgcctcagcatctctaaccgtcttagcgctcctactatgctgtgctgttgttctttacacgtgtgcactccactagatcaagagctcggcaggatggggaccctgtcttaatcacatctatgggcctagtgcctagtgcaaggccaggcacagaggaagaacatcatcaacagtttttggttattaatgctcaaatggcaagagatgcaatacctcagtgcagggtcagaacatttatgaattcaataaacatttactaatatcaactgtaggcgggatgagaggccttgaccacagcaatagataaacttcacaccgactgccctgaaggggctcctcctcccttctctactctgactcctaccctgtgccccactgcacaaacggctatggagaactagagctctccagactaactggttcaaaaggcagaaacagcttagcggttataggacctaataagcctgaggggtttggaacttccagtgactgcaggggaggtgtttccaggtcccccttctcacacatcacgttgctcacaacccagccacaccaaaaccaagaactgccctatagacttcttcatggaccctggatcatccagacctcaggtgtattgcccccaccagctgctgaaggttccctcttttctcttcctatgcagtgattcgggccaaaatctccagtgagaaggtagttccggccagtgcagaccctgctgacactgaaaaaatgctccggtatgaaatcaaacagataaaggtacatgggggcaggctgggatgtgtagcccctaaggctgatggagaaagtggagtctgtgttctgggagggctggtagctttcaggtggcctggctcagtaatccttgggtctagatactgaagtggaactggatgagatttggaggcagagcccatagaatcccagggatattgccagggagggcctcagcatccatctggtcccacagctgctggtgtatggtgccactacaggtacctactggaataaaccaaggtttaggtgttttttgttgttgttgttttgttttaagagagaaaataacccagtagggacatctgaggacacaaaatcctcaactagacttttgcttacatttttaggctgagaagtgagaggtttttgtctgttaatatatacagtacactcactgacccaatattgcctttttttgtaattgcctgtcagatgttcaaagggtttgagaaagtcaaggatgttcagtatatctatacgccttttgactcttccctctgtggtgtgaaactagaagccaacagccagaagcagtatctcttgactggtaagttaaaagaccaacaactggccttaatataatagattctgccctaggggaggtagtgagaaaggagccagggtcttccttgggcagtaggctgagccaggtggcattttcttgggcataaaacagagctgtgttagtgacagacaacctctgggttaggaggagccttgtaacctccctttaaatgtaagagttcttagtacagtgaccctggccaccgtttcactattttaaggacaggctgctcacccagtgtagggcagctgcttccgtttttcaaatagtttaaattagtataagatttttggcaacttgagtcgaagtctcctctctaaaactgctccttgcaggtcaactctgccttttgcacaggacttaacaggagcttgagtctaacatagttctgtctctgtgaacttgggcccaggcaggattcctccatactgaattggctgggatagaacagttaaagaatcacacaaaaatatgactccataaatgaatgcaacattaaattattttggagttcagagaacggaactatttggtagttgtgaactatcagggaagcttcattgtgtaggtgggatctaaactggcctgaaaacataaaacaatatttagaaagaaagcaagggaaagaaaaagcacagcagtgggggagggaacaggtgaagggattccacgatctatccacacattcagcaatgaatgaccacttagtcactgccatgccttggccaggagagtggagattcagtaacaaggcacagtccttaaaagagttcactgtccagacatggctcttgatgagtcataggcactggaggctacaatgataagggcttcctagctctgaggatgtggaattgtacagaactgaggagctcctggatggaagaggcagaggcaggacacaccactgagccctgcagttcccaggtctagcagaccaggccctttcaaactctattatcgcacctccttcctaagcacctgccctctgtgtgtctagcccgctgctaggcatggaggtacagcaggggaaatgaggaaacatgttccctgccttcagggaggtcaagtctaactgagggtggggagaaatgacaaaaaatagtctaagaaaagttatcaatggtgcccaggtcctacaggagaaggcacaagctcctttgcctggtgttgaaagctctttgtgaccagaacactgctgccctctctagctttgtcaatatcagttcccagcccctcactttcccaagaactgaactcagctacctgtggttgcagaaggtatgctgccaggctgtgtctccctgcctctgcacaggatagtggcaatgacaggaagcccttcccccaacctgtttggtaggcagactcccactcatcccttcaaggcccaatgcaagcacagtcttctctgagacaccttctttgccccacactccttccatagatggaaataattgtatgttcctttgttcttatactgcactttgtatagaaccacacaatagtgtaatttttccctacttatccatctaccctactcatttctaagctccttgggagcagagatcctgtcatttttatatctgtattcctggtactagatcacagcagtcactcagtgagtaaatgattgagcgactgaggttctaaaagaggcatgggctagctaggtggtcagagatggctttgaggtggcactgaaagggtctttgaaaggtgaaaaggaatctacggccataccaccctgaacgcgcccgatctcgtctgaaaggtgaaaaggagcttcataggtaaaaagggggaaatttcctatggggaaggtaaaagactcaccaatctagagcaggagcctggcctgtgcagatactgggaagggctggaaaggggaagggacctattatttattgaatatcttctgtgggaccacaactgtgctgggaactttatagacaatctctcatttaatctgacaactttataattttcatcttccagctgagaggttatacaacttccttaagatcattcagctagtaaatgacagaaaagaaagggggatcccacacagactttgactttaaagaccacattcttctctctgtaccatgctaaacgaaaaggccttcaccagatcccacaactctgcctcgtacaaacataatctgcttatctttttgctagaaagattatagtagttttatttattggtcccttcactgagccccatgccaccactgccaccaaagtcattggggaggctgcaattctgggcttttcaaggacctgggcccctggggctccaggagaagaatcctgatgcttgactctcctccatctccccttgaaggtcaggtcctcagtgatggaaaagtcttcatccatctgtgcaactacatcgagccctgggaggacctgtccttggtgcagagggaaagtctgaatcatcactaccatctgaactgtggctgccaagtaagggaatgtccatttccaaagtctttagggatgggggaagggttctgagccttcattcatgcatgaatttattcacttactagactatacttgagatctgcactgtatgaagttggggatgagaaagcaatacagtctataggccctgatctcaaagtacttacactttggctgggaaggtggccatcacaggaggcagactgagataactgtaacacagctaccctttaaagagagtctattctttgccagccactgtaatagtaaatttactgtaaatgtttaatttagtctccaaaacatatttatgaagaattaagatttccattttaaggtgaagaaatgaaagctctggcaagtgaagtgctcaaggtcagtggtagagtaaggaccctcagagctgtctgactccagagatgccactaagtggcaatattgaatatggggaaccttggggaaggagaatccaggagaagactggggactgggaaaggcttgataagatagggggcatttgagatgggctggaaaggtacgtaggaatctgaaaggcagcaatggaaaaagaaggacaccctactcactttaatgttgtgtggccatgactctagatcaccacctgctacacagtaccctgtaccatctcggcccctaacgagtgcctctggacagactggctgttggaacgaaagctctatggttaccaggctcagcattatgtctgtatgaagcatgttgacggcacctgcagctggtaccggggccacctgcctctcaggaaggagtttgttgacatcgttcagccctagtagggaccagtgaccatcacatcccttcaagagtcctgaagatcaagccagttctccttccctgcagagctttggccattaccacctgacctcttgctgccagctaataagaagtgccaagtggacagtctggccactgtcaaggcagggaaggggccatgacttttctgccctgccctcagcctgttgcccctgcctcccaaaccccattagtctagccttgtagctgttactgcaagtgtttcttctggcttagtctgttttctaaagccaggactattccctttcctccccaggaatatgtgttttcctttgtcttaatcgatctggtaggggagaaatggcgaatgtcatacacatgagatggtatatccttgcgatgtacagtatcagaaggtggtttgacagcatcataaacaggctgactggcaggaatgaaaacaagaacatactgtggctgtgta

SEQ ID NO: 6296 - DNA, 1615 bp, Homo sapiens
cagaggaaacacatctctctagggctactggattagttcacactcgaagccactggtatctggcatggctagaagggaaagctgctagatgaaatctatttatcagagaaaggaaggctagaacatttttcaacagctcaggtcctgttctctacaagcgatactggcacataagccagggaggggagacgaggttggggcagtaaaagctcggaactgggttgttagaaaactggaatcttctgattcttgttctgttaacttcctaggtgtccttgggcaaatgagttttcctctctggatctcattttcttcatatataaaatgagatggttaaatttgatcagttcctcaaactttgtaccataaagaatatctctttattatatttcctcccaaactctgctatcaaactgtagtttaagtgatcatctgttgtggtccttttgtaggtatagatatgattttgttatttttgaaatgctggaaaacactggaattcctaggtccctccctttagtgacaaacaattggtgactctagagctctagggcctcctccaggactgaaaggatgattcatggaccctcaagcccctaagataccattgtcaaaagggactttatagagtctctaggccagccctctgatttgacaaattgagattgaggctggagagcaaaggaaagtgcaggctcccggatcacatcctggagtcagggctgcactgcaagagcactcaggtctcttctccttgctgggtgcattcaccattgtaccctgctgtcctcaccgactttggtccttcaatttgctttaactgtcaagaacgaaccctcagacctttcctgccttctctgattctccacacctgctcatctgacctttacgtcctgcctgcccatctgggcctggctggacttctgctctgcctctggacacctgcctgtgctcctaaggctctccagcatccctagggagttaatgccagctctgccaaacgacctctgtcctgctgcagcccacgctctggcatggcaccaagacatgtggggccctacctttccagcatgtgggggagttacacagacaccacacagatgccaggacagcctgtggcagactcccagagccctgggacagccaacacaataatggcagccagttcccaggctctcgttgggtctcagggagctcaccccaccctcctctccagcagtccctgtctgctcaaggtagtgagcttggcatctaacccatagctccctggaaacttagattaaatcacagccacacagtcaccaattaaacaaatgtaacatctgataagggctgttacctctacacatagacaaaagaatgaatttgggagctgggggtgctgttggcaattaataggaagatatgtccattatagccactcatccaatgaatcaagaaagatttcttggaaaaaaatgggattccagatccatttgagtaatgtgtccctatgcctatcactcctggaaattaaatgatttaatttaactctggtgcacttatctccaaaaacccagaaagactcacggaatttcagatagactggcagcaataaacggtggtgccattcttg

SEQ ID NO: 6297 - DNA, 5853 bp, Homo sapiens
gagccctgctggggccgtccagtcccccagacctcacaggctcagtcgcggatctgcagtgtcatgcctgggagccctcggcccgcgccaagctgggtgctgttgctgcggctgctggcgttgctgcggcccccggggctgggtgaggcatgcagctgcgccccggcgcaccctcagcagcacatctgccactcggcacttggtgagtccgaggtccgcgaggtccacagcagggggtggttgtgggggattagtatctggccagcagtacaccaggagtccagaggaaaagggaggagctcaaattcttaccggttgtctcttgctgaggctgatgggtggagaaggaccaggcgccatagcaaccttgcaagcccagaacctgactgattcataaggaaatgaagatttcatcagggacttccatagcgacctccctcactccggccatactgcaattatggagtgtcattacacaaggtgtcaccggagctatctgatgattattctgaactactagactggggacagaaaggggaggggagagggcttgcattgtaactacccgtgtctgtccaggcctataactgaggttgccaccaagcccctatggcaacacacacgttctgtcctttctcttccctctgcctggaatgccctccctcacacccttaaattcctggcagactcctactcatccttcaagggctaacttaggtctctccccttctctgcaggctcccgggctccttggtgccgcctcagcatctctaaccgtcttagcgctcctactatgctgtgctgttgttctttacacgtgtgcactccactagatcaagagctcggcaggatggggaccctgtcttaatcacatctatgggcctagtgcctagtgcaaggccaggcacagaggaagaacatcatcaacagtttttggttattaatgctcaaatggcaagagatgcaatacctcagtgcagggtcagaacatttatgaattcaataaacatttactaatatcaactgtaggcgggatgagaggccttgaccacagcaatagataaacttcacaccgactgccctgaaggggctcctcctcccttctctactctgactcctaccctgtgccccactgcacaaacggctatggagaactagagctctccagactaactggttcaaaaggcagaaacagcttagcggttataggacctaataagcctgaggggtttggaacttccagtgactgcaggggaggtgtttccaggtcccccttctcacacatcacgttgctcacaacccagccacaccaaaaccaagaactgccctatagacttcttcatggaccctggatcatccagacctcaggtgtattgcccccaccagctgctgaaggttccctcttttctcttcctatgcagtgattcgggccaaaatctccagtgagaaggtagttccggccagtgcagaccctgctgacactgaaaaaatgctccggtatgaaatcaaacagataaaggtacatgggggcaggctgggatgtgtagcccctaaggctgatggagaaagtggagtctgtgttctgggagggctggtagctttcaggtggcctggctcagtaatccttgggtctagatactgaagtggaactggatgagatttggaggcagagcccatagaatcccagggatattgccagggagggcctcagcatccatctggtcccacagctgctggtgtatggtgccactacaggtacctactggaataaaccaaggtttaggtgttttttgttgttgttgttttgttttaagagagaaaataacccagtagggacatctgaggacacaaaatcctcaactagacttttgcttacatttttaggctgagaagtgagaggtttttgtctgttaatatatacagtacactcactgacccaatattgcctttttttgtaattgcctgtcagatgttcaaagggtttgagaaagtcaaggatgttcagtatatctatacgccttttgactcttccctctgtggtgtgaaactagaagccaacagccagaagcagtatctcttgactggtaagttaaaagaccaacaactggccttaatataatagattctgccctaggggaggtagtgagaaaggagccagggtcttccttgggcagtaggctgagccaggtggcattttcttgggcataaaacagagctgtgttagtgacagacaacctctgggttaggaggagccttgtaacctccctttaaatgtaagagttcttagtacagtgaccctggccaccgtttcactattttaaggacaggctgctcacccagtgtagggcagctgcttccgtttttcaaatagtttaaattagtataagatttttggcaacttgagtcgaagtctcctctctaaaactgctccttgcaggtcaactctgccttttgcacaggacttaacaggagcttgagtctaacatagttctgtctctgtgaacttgggcccaggcaggattcctccatactgaattggctgggatagaacagttaaagaatcacacaaaaatatgactccataaatgaatgcaacattaaattattttggagttcagagaacggaactatttggtagttgtgaactatcagggaagcttcattgtgtaggtgggatctaaactggcctgaaaacataaaacaatatttagaaagaaagcaagggaaagaaaaagcacagcagtgggggagggaacaggtgaagggattccacgatctatccacacattcagcaatgaatgaccacttagtcactgccatgccttggccaggagagtggagattcagtaacaaggcacagtccttaaaagagttcactgtccagacatggctcttgatgagtcataggcactggaggctacaatgataagggcttcctagctctgaggatgtggaattgtacagaactgaggagctcctggatggaagaggcagaggcaggacacaccactgagccctgcagttcccaggtctagcagaccaggccctttcaaactctattatcgcacctccttcctaagcacctgccctctgtgtgtctagcccgctgctaggcatggaggtacagcaggggaaatgaggaaacatgttccctgccttcagggaggtcaagtctaactgagggtggggagaaatgacaaaaaatagtctaagaaaagttatcaatggtgcccaggtcctacaggagaaggcacaagctcctttgcctggtgttgaaagctctttgtgaccagaacactgctgccctctctagctttgtcaatatcagttcccagcccctcactttcccaagaactgaactcagctacctgtggttgcagaaggtatgctgccaggctgtgtctccctgcctctgcacaggatagtggcaatgacaggaagcccttcccccaacctgtttggtaggcagactcccactcatcccttcaaggcccaatgcaagcacagtcttctctgagacaccttctttgccccacactccttccatagatggaaataattgtatgttcctttgttcttatactgcactttgtatagaaccacacaatagtgtaatttttccctacttatccatctaccctactcatttctaagctccttgggagcagagatcctgtcatttttatatctgtattcctggtactagatcacagcagtcactcagtgagtaaatgattgagcgactgaggttctaaaagaggcatgggctagctaggtggtcagagatggctttgaggtggcactgaaagggtctttgaaaggtgaaaaggaatctacggccataccaccctgaacgcgcccgatctcgtctgaaaggtgaaaaggagcttcataggtaaaaagggggaaatttcctatggggaaggtaaaagactcaccaatctagagcaggagcctggcctgtgcagatactgggaagggctggaaaggggaagggacctattatttattgaatatcttctgtgggaccacaactgtgctgggaactttatagacaatctctcatttaatctgacaactttataattttcatcttccagctgagaggttatacaacttccttaagatcattcagctagtaaatgacagaaaagaaagggggatcccacacagactttgactttaaagaccacattcttctctctgtaccatgctaaacgaaaaggccttcaccagatcccacaactctgcctcgtacaaacataatctgcttatctttttgctagaaagattatagtagttttatttattggtcccttcactgagccccatgccaccactgccaccaaagtcattggggaggctgcaattctgggcttttcaaggacctgggcccctggggctccaggagaagaatcctgatgcttgactctcctccatctccccttgaaggtcaggtcctcagtgatggaaaagtcttcatccatctgtgcaactacatcgagccctgggaggacctgtccttggtgcagagggaaagtctgaatcatcactaccatctgaactgtggctgccaagtaagggaatgtccatttccaaagtctttagggatgggggaagggttctgagccttcattcatgcatgaatttattcacttactagactatacttgagatctgcactgtatgaagttggggatgagaaagcaatacagtctataggccctgatctcaaagtacttacactttggctgggaaggtggccatcacaggaggcagactgagataactgtaacacagctaccctttaaagagagtctattctttgccagccactgtaatagtaaatttactgtaaatgtttaatttagtctccaaaacatatttatgaagaattaagatttccattttaaggtgaagaaatgaaagctctggcaagtgaagtgctcaaggtcagtggtagagtaaggaccctcagagctgtctgactccagagatgccactaagtggcaatattgaatatggggaaccttggggaaggagaatccaggagaagactggggactgggaaaggcttgataagatagggggcatttgagatgggctggaaaggtacgtaggaatctgaaaggcagcaatggaaaaagaaggacaccctactcactttaatgttgtgtggccatgactctagatcaccacctgctacacagtaccctgtaccatctcggcccctaacgagtgcctctggacagactggctgttggaacgaaagctctatggttaccaggctcagcattatgtctgtatgaagcatgttgacggcacctgcagctggtaccggggccacctgcctctcaggaaggagtttgttgacatcgttcagccctagtagggaccagtgaccatcacatcccttcaagagtcctgaagatcaagccagttctccttccctgcagagctttggccattaccacctgacctcttgctgccagctaataagaagtgccaagtggacagtctggccactgtcaacgcagggaaggggccatgacttttctgccctgccctcagcctgttgcccctgcctcccaaaccccattagtctagccttgtagctgttactgcaagtgtttcttctggcttagtctgttttctaaagccaggactattcccttttctccccaggaatatgtgttttcctttgtcttaatcgatctggtaggggagaaatggcgaatgtcatacacatgagatggtatatccttgcgatgtacagtatcagaaggtggtttgacagcatcataaacaggctgactggcaggaatgaaaacaagaacatactgtggctgtgta

SEQ ID NO: 6298 - DNA, 1941 bp, Homo sapiens
ccaaagtgctgggattacaggcatgagacaccattgcccggcccaggtggaatttttattaatataattagtaccacagttttgctttagtcccaaatttgagtggcctcctcctgcttggaggagggctttctgctcctgtagttcttaccaattaaggaatcaaaatgtgcacataaaaaaatgacttataggcacttacacatacagtattataaatggttcatcaatgttgagattattttgcacaatactacctgtatttctgtttttgtccaacccactatacatgccttaaaggactaaaatcagattggttaaggcaacaacttccccatatttttatttaatttgaataaatgttttcttataaaatatgtttagatttacagaaaagttacagggagttaaggtataccttgcacccagtttcccctatttttttttttttgtaagaaatgggggtctcgtcatgttgccagtgtctgacatttcaatgttaaatttgtcaccgttaaggaaccaatgttggtacattactactaactaaaattcatttatttggattttgttagtttttacctaaggttcttttttggttccaggatcctatccagaatacgacaatacatttagttgacatcttcccttagcctatctgggctgtgatggcatttcagactttccttgtttttgatgactttgatggttttgaggagtattggtcagggattttgtagaatgtccctcagtttgggtttgtctgatgttttcttcatggttagactgggattatgggtttgggggaggagagtcacagagataaagtgccgctctcattgcatcatatcaaggggaaatactatcagtacggcttatcactgatattgttaacctcggtcaccaggctgagctagtgtttgccaggtttctttactgtattgttttcccgtactcgtctttttggaaacaagtcattaattgtagaccacactcagtaggtctgttttcttaaaggggagctgtctataaaattatttggaattcttctgctatggatagtctttttttcttctccgtttatatatttattcaatcatttatttatatatgtatggactcatagatggttattttatacttggggtcataatcctatactactttatttattttgttgctcaaatttttctaccaacaggacatactccattgttttgttttttgagtacttccttactttctggcactagaagaagttccagactcatcttgtatatttcctgccccagccctagaatcagccatttttccaaggatccctggttctattttttggtgaatcatgttagaaaccaagatctggttactcagtgtgctcattgctgttggaatatcatgacttctaggccttttcagtgtatagacctggaaaatatatgtatgtatacacatatataactattatctgtatctatattgaggtaaacatgagttcatactgatgactttgactatcagtactatatagttcattctggctttactctgctatctattacctccctctccaaaagtgagaaatctggctcacgccatctgacatctattaacttatttgttcagtcccatcgtccatgtacagcacttttagaattgttaacctgtatctccatgagaaatgcctttaccaaaaaagaacagtgcttatatacagttctttttgttgttagagtttccagtttcaagtttcccaaagttacttaaatcaaaccttttcccctgacatctgtattttaattttatttttaataaattgatctaaattacatggtaattatatataaagcttataaaaaatttcccttgcccaactaaagatctttagctttagatgtgtttttttttcctcctgacttttgtgaccaaaaaaaaaaaaaa

SEQ ID NO: 6299 - DNA, 501 bp, Homo sapiens
gcatccttgttccaacttctgcgttattaggaactatttccttactttttcgtagttttcctgtcttcggttttatctccttgagattcaccttctcagaattgccagaatggtatgtttgaaacataaacctgaaaattctttactgactccccattgtcaacatgataaggttttagtatgtcattaaaactctccatgacttggcttctacctggttctctaatcttaactctagtaatttctgctttctactttccactccaactctgcagagctactttttgaagatttgctgaatatacgtactatttctggattgttgaccattgcttatgtagtccttctgcctggaatgcctttgtttcctccttcctttttctttttgcctacctaactcctttacaacttttaggactcagctgggcattactttctctagaacgccttctcagatccatactcttgcctggataattgggtccctcccagaataatcta

SEQ ID NO: 6300 - DNA, 603 bp, Homo sapiens
ttatttttttctgccctcaatccttgttgatactgtaggtgtagttcatttatttacacagctgtatagtgttccagtgaatgaatatatacaatttatcatttcttctattgatgagcatttaaattgttttcattttttatctattataaacattgcctcatgaatattcttgtagctcctgaagcaacatgccatagtttctccaggtcatatacctgactgtcaaattgctgggtcctaggatataaatatttttccctttataagatatttataggatattgcaaacaatttctgttttttcatatccttgccagcagttagggttatcaaattctttgatttcttactgatttgtaagtttttttgtttgtttttaggtattttcaggatagttacaaatgttaggaaaacttatttttatttggcttttgaagtttccagatttcttgaacagtgaccaatatggacccaagttactgtaattttgtcctatagtatatattgttgatagtgagctttccaatgtactttctccaagtatgtttagttatgctccttttctgagaccatgaggaagtgtttcagtgtttcagaatt

SEQ ID NO: 6301 - DNA, 2287 bp, Homo sapiens
gtcaccctaacaccagattactttccccaagacatgccaggatcatttcttctagcccagctgtgttcgaactagcccttcaccaagtggttcagtttccttggtggggcctgtatgattgtgaggggctgggggaagtctggaggcgggtgtcagggaagtatgaagcccagttcctgccacaaggttcacacccaatgaatggtcactgttattacacaggatggtaggcttgtggtttgttttttccctctattctttggtcacttttctataagcatattatttttagaatcagaaaaaaaaactcatgaaacaaaagaaatgtgatgagtgatttacagggagcaaagggcagagagagagagacagaaagagagagagagagacagatgctctttagaaaccgtggctctgggccccggaatttaatctgcagttaaggaggctgagagaggcaggtgggtgcacccacaggtctcctaactgagaacttcctgcctttgagcccacctactagtccccaggttacagatctcagggaaaccccagggctcccaccccctccacacacacacccactcccagtcaggcggcctgtgagcctgggttggggctaaccggaacccagccagcctctctcccaccttctaccttctgttctcaatgctgtgcccctgggctggggcagcctgagctaggtgatgtcgagccaggaacaagagccaaggaccacagaacctgcttttggttccacatgtctctgccccatcttcctttttctttttccacctcgtttctttttttttctcttttctttctctctcccttcctttcctttcccttgcctcccccattccccttcccttccttttctttcttccttccttcctttctttttctctttctttctttttctttctttctttctctttctttctttccctctctctccctcccttccttccttcctcccttccttcctctctttctttctttctttctctctttctctctttctttctctctttctctctttctttctttttcttagagaaaggatgtccctctgttgcccaggctgcagtgaagtagcacaaccatggctcactgtaaccttgaactcctgggctcaagcaatcctcctgcctcaacctcctgagttgctgggactacaggtgtgagcaaatgcacccggcacttttctccttttttattttaaatacttttagagtaattcctttacataaattgaacttcataaaaagttagaactttgcacattaaaagacactatcaacagagtgaaaagaccatccaagaatgagatacagtatttgcaaatcatatatccgattggggattaatccaggatatctaaagaactctaaaactcagtaacaacaaaaacccaaacaacccaattcaagaaatgagaaaaggacttgaatagacatttttccaaaaaagatatacaaatgatatacacatgatatacaaaatgatatacaaatgatatacaaaaagatatacacattaaaatatgttcacatcactgatcactagagaaatacaaatcaaaaccacaatgagataccacttcgtactcattagggtagctattatcaaaaaacaagtaacaagtattggtacggatgtggagaaattggtgcccttgtgcattgccggtgggaatgtaaaatgaggcaacctcagtggaaaacggtaggcagtttctcaaaaaattaaacagaataaccatagggtccagcaattccacttccaagtataaacacaaaagaattagaacagggactcaaacagatttttttttccttttcttgcttttctttctttctttcttttttttttttttttttttggagacagagtctcactctgttgcacaggctagagtgcagtggtgcgatcttggctcactacaacctccacctaccaggttcaagcgattctcctgcctcagcctctgggatagctgggactacaggcacactaccaccatacctggctaatttttgtatttttgatagagacagggtttcaccatgttggccaggctggtcttgaactcttggcctcaagtgatctgcccagcccacctcggcctcccaaagtgctggggttacaggtgtgagccaccgcacccagcctcgaacagatatttgtatactcatgttcataacagtattattcacaatagtaaaggtggaaacaacctaaatgttcactgacaaatgaataaataaacaaaatgtgatacaataaa

SEQ ID NO: 6302 - DNA, 2287 bp, Homo sapiens
gtcaccctaacaccagattactttccccaagacatgccaggatcatttcttctagcccagctgtgttcgaactagcccttcaccaagtggttcagtttccttggtggggcctgtatgattgtgaggggctgggggaagtctggaggcgggtgtcagggaagtatgaagcccagttcctgccacaaggttcacacccaatgaatggtcactgttattacacaggatggtaggcttgtggtttgttttttccctctattctttggtcacttttctataagcatattatttttagaatcagaaaaaaaaactcatgaaacaaaagaaatgtgatgagtgatttacagggagcaaagggcagagagagagagacagaaagagagagagagagacagatgctctttagaaaccgtggctctgggccccggaatttaatctgcagttaaggaggctgagagaggcaggtgggtgcacccacaggtctcctaactgagaacttcctgcctttgagcccacctactagtccccaggttacagatctcagggaaaccccagggctcccaccccctccacacacacacccactcccagtcaggcggcctgtgagcctgggttggggctaaccggaacccagccagcctctctcccaccttctaccttctgttctcaatgctgtgcccctgggctggggcagcctgagctaggtgatgtcgagccaggaacaagagccaaggaccacagaacctgcttttggttccacatgtctctgccccatcttcctttttctttttccacctcgtttctttttttttctcttttctttctctctcccttcctttcctttcccttgcctcccccattccccttcccttccttttctttcttccttccttcctttctttttctctttctttctttttctttctttctttctctttctttctttccctctctctccctcccttccttccttcctcccttccttcctctctttctttctttctttctctctttctctctttctttctctctttctctctttctttctttttcttagagaaaggatgtccctctgttgcccaggctgcagtgaagtagcacaaccatggctcactgtaaccttgaactcctgggctcaagcaatcctcctgcctcaacctcctgagttgctgggactacaggtgtgagcaaatgcacccggcacttttctccttttttattttaaatacttttagagtaattcctttacataaattgaacttcataaaaagttagaactttgcacattaaaagacactatcaacagagtgaaaagaccatccaagaatgagatacagtatttgcaaatcatatatccgattggggattaatccaggatatctaaagaactctaaaactcagtaacaacaaaaacccaaacaacccaattcaagaaatgagaaaaggacttgaatagacatttttccaaaaaagatatacaaatgatatacacatgatatacaaaatgatatacaaatgatatacaaaaagatatacacattaaaatatgttcacatcactgatcactagagaaatacaaatcaaaaccacaatgagataccacttcgtactcattagggtagctattatcaaaaaacaagtaacaagtattggtacggatgtggagaaattggtgcccttgtgcattgccggtgggaatgtaaaatgaggcaacctcagtggaaaacggtaggcagtttctcaaaaaattaaacagaataaccatagggtccagcaattccacttccaagtataaacacaaaagaattagaacagggactcaaacagatttttttttccttttcttgcttttctttctttctttctttcttttttttttttttttggagacagagtctcactctgttgcacaggctagagtgcagtggtgcgatcttggctcactacaacctccacctaccaggttcaagcgattctcctgcctcagcctctgggatagctgggactacaggcacactaccaccatacctggctaatttttgtatttttgatagagacagggtttcaccatgttggccaggctggtcttgaactcttggcctcaagtgatctgcccagcccacctcggcctcccaaagtgctggggttacaggtgtgagccaccgcacccagcctcgaacagatatttgtatactcatgttcataacagtattattcacaatagtaaaggtggaaacaacctaaatgttcactgacaaatgaataaataaacaaaatgtgatacaataaa

SEQ ID NO: 6303 - DNA, 101 bp, Homo sapiens
cctgtagtcccagctacttgggaggctgaggcaggagaatcgcttgaacccgggaggtagatgttgcagtgagcctagattgtgccactgcactccagtct

SEQ ID NO: 6304 - DNA, 136 bp, Homo sapiens
tttctttctttttttttttcctttttgtggagaacaaggtctcactatattgcccaagcaggtctcgaactcctgggctcaagctatcctcccgcctctgcctccctaagagctgggattacaggcatgagccacc

SEQ ID NO: 6305 - DNA, 136 bp, Homo sapiens; identical to SEQ ID NO: 6304

SEQ ID NO: 6306 - DNA, 5322 bp, Homo sapiens
cttcatataatttttaatagtagttgaaagttttgatgtttcatgacagcctatcccataaagatcactgaattgacatgctgttggcagtaaattttttaaagtagaataactttctatgactatataagcaaaatatttccataattaatccacatggtaataagagatgggtaaattgaagaaatgtccttgaagttattcttttaacagatgttcttaactattagcttcatgtttttacccacctaaatttccaaataattgaataaaagttaacatatgctttcctccccttaatgggcagagcccataattgatacaaagtttaccacagtagagaaattaccttcagtggtacttttctaatgtttttctttcttctaccctatcactgaccatcctgttcaccaattatttttccttttttttttaatatagagtcctacagaatgcacttttgctttcagatagcagccttcacctcttcttacagagccatctgaattcagaagacattgaggcgtgtgtttctgggcagactaagtactctgtggaagaagcaattcacaagtttgccttaatgaatagacgtttccctgaagaagatgaagaaggaaaaaaagaaaatgatatagattatgattcagaaaggtatttccttgcattttgatttaatgtatatgtatttatataatacatagtatgcacatatgcacgtgtatagatatatatacacacttcacttttttgttgatataatactaagataatgaaaaaattaattgactgagattttattgagctgtgacagctcatcatagtagtcttcacacacacctccacactgaattaatgaatgcagtagaaattcaattatttgcattctgattatgtgactttcatttagtcagacttgaattattcgcgtttaaattatctagctaaaaaaatacccaactgcactccaaatggctaattaaaagtccaaatttcctgtctctctttgtgactggagataattaaagttctcctctgttactcaggctttgagtgtgttgtgaaaaccaatttcctctttttattattttccccctctcttcttttccagttcatcctctgggcttggacacagtagtgatgacagcagttcacatggatgtaaagtaaatacagctccgcaggaatcctgaaaaataattctaatgttactatcttaggaatagcaaattatgtccagtcatagagaagaaagcttcataataatacattcttacctaaagctcactgtcatgatgttaggtatttaaattcttaaagatgttgggttgtttattagtggtatttttatgttgtcttattttaggtaagcttctgtgtaaagctaaaaatcctgtgaatacaatactatcctttacaggcagacattattggtaaacaagatcttgccctccaatgaaatgacttacatgttttaaaaaaccgagttggttttattgaatttaaaaagataggtaactaagtagcatttaaaatcaagatagagcattccttcttgtatcagtggggcagtgttaccataaacacggtgtatatgttgttaaaccctatgaagagtaacagtgtagaccagactgcctctctcagatatgtgcctgatattttgtggatacctcccctgcactggcaaaacactatgcttttgggtgttagactgaaatattttaagagtatttaacctttccagtattctgtttcacgcttagatggaaatgtatcttatgaatagagacatattaaaataatgtttacatcttagaaaaaacatagatagtgctagtaatattacttataactgtaatatatagattcagaaatacattttcattatccaaaatcagcttcaacaaatggtttctggagacaaataatttgttttcattatcattgtataatcaggttaatgatttattttttgactaaatgtgcaatttcttatcactagataactttcagtatcagtggtggttacttattacttaaatcagaggaaggattttataaagattaataaatttaattttaccaataaatattcccataatttagaaaaggatgtcgacttgctaatttcagaaataattattcatttttaaaaagccccttttaaagcatctacttgaagattggtataattttcataaaatgtctttttttttagtgtcccaaagatatcttagataaactattttgaagttcagatttcagatgaggcaacattttcttgagataattacccaagtttcatccatgttgaatggtacaaaatatttctgtgaaactaacaggaagatattttcagataactaggataacttgttgctttgttacccagcctaattgaagagtggcagaggctactacaaaaagcaaccttttcattttcactaagagtttaaaagctattgtattattaaaaagtctttacaatgcttgtttcaaagaaccaacagaaaaaaaagctaagaaaactgagaactaacattaaaaaaattaaatttagaataagaatgatttctttaatttgtcctttttttctttggtctaaaacattattaaatttttgtaaatattttgatttaatgtgtcttagatcctcattattttaatacaggaaaagaaaagatttagtaatttcttaccatgctaatatgtaaagttcatgccatccaggcatttaagagcgatcctcatcccttcagcaatatgtatttgagttcacactatttctgttttacagcagttttgaaaaacacatactatgccaccaattgtcatattatttttagatgatgtaacatagccatcaaaattaatattatgtaatgcctaatacttagtatgtaaatgtcacgagatcatttttacattaaacgtgaaaaaaaatcaactttgccggatcacttattttatacaagagaatatattctgccttagacccaaactcagtgttttttattttttatgaggaaatttggtaaaacatggtttaatattagctatagttgtacatatttgaggcttttagccttggtttagttgtttcaatgtccacacactggcttcttaaaactgatttcttgcagctgagatatttagatgaacttcagttcccagtggttttcttgctttgtctcttatttttctctggcatattttttataaagctttctttaggaaaaagaaaataattactgatgtagctaacttgaatagatgtttatttaacactatttttaatgtgacttaaatgtaaagaattctaatcctggattctttatgattacaatacagcaaaactgcattttccctggctgattcttaaagggtaaactattcacctataaagccaacttacgtgttttgttgtagaactagatttatatataacccaaaggtgtcaacagcactgaacgtcaacaacctgttacttcggcttcttataaagtctcacttagaagaaagttacttaattctagttaaaatttcaagttttaaaaattactagggacaaacaagtatttatttttaagcagatactattccttaagatatgaagtatcttgccagtttttcaaacctagtccacattttattgaataattaaatacaaacaagtgatatgcagtataaagtaaaagaacaaagtttcttttatgacaattaagaagttaaacaacttcatttagcctggccacaataaccgttatatccaacagtaaactggacgttgttttgaatttggtttgtatttgttggatgccttaaggattcattattattgagctactgtgataccaataaggttttcagtatttgagctataaaagacaaccccttttcattagaggccccttaacattttaaacgaaaataacaaagcttattctgtttctaaatagtcttcctcttaatatttaaattacttagctggtatcctgtgaatacaaggcaacatcttttcaatgaaggaaacaatttcagtacaattttgtgtttttgtttggaatatagaccttttcttagtttattatatataaacacattttcaaatacaaaatactgtctgaaattagttactgcaatttgacattcaaagcatagaattttctttgcaaataaaggtcataagaaattaataattttaatagagtggagttcaaaaatttcagaaggatgtaaataagcaacaatttctttaacatttgctatatatacaaaggactttggttctattctttgccatatgcatcttacaaacgagtcaccattgtccctttttagcagacacaattgcgcttcactcctactgcaaacttttctagatcatgagcagtgcattggacactaatttattttagctgcgcaaactctggtagttaatgaccctttctctttctccaaaattccaaagacttcttttcaaaagatatagaggaaaagagaaaaaaaaccattaagctacaatttcctgctgaatttaaactctggtctaaagacactatgtaaatggcttatgctaaagaggaaaataccctttctcccccgacgagaagtgtagattcatccaaccccacaccgcttgtctttgctgctagaggcacagcacgggcataacttgtggttgtgtttttgctagtttcttacctctgggccttctttatagctttgccccccaccccactggcggtggcgctcccgcggctgcaccctcggccgcctgttggttgcggcgcctccgcggcccgcgcgcatcccccgcgctgcgtcccgcacacgcgcgctcccgccgcgtcccgcccgggccgctccgctggcggcggcgactgggctgcaggtagcgagccagccggcctcggtccggtaacccatggcaaccgccctggtaacccatggcaactgcgcggcggaaagaaaaaaaagaaccgtggtggggcggggggcggcgggcggtgaatgggaacaacgaccgcaaagagacagcgatttaccgcgcgggcctgcggctcccggccgcacctgctgcagacggcccgcgaggccccttcccgcgctacggtgacgattctggctgctggggaaaagagcaataagcagaaagccctcgtgcagaggggatccgggcggtgcacttggtgtgggaggctgccttaaacgccgatgaccctcccggcctccgcgtgtcccggcttccagggccccgccaggctggagagcgcgcgtggagagggccttgccgcctgggggttggttgaggggcgg

SEQ ID NO: 6307 - DNA, 6926 bp, Homo sapiens
atggcagtattgagcagaaaaagaaaacgctgggaaataatgagtctaatgtacagtaaaattggaaattgaattatagctcaagaaaaaggacagtagccttgaggtcccgatcaacctggactctgatcacttttgtttgctgtacccatgtgttaagttactagcaagttaataacaacacgtgagcagttcaaggctcagtagaattgcttcagacatgaaataaagctaaaatgaatttgtgtccaatatcattggcattagtgctcattactgttgtggtgtaatgcctcaaaccatctaaaatcaattttaaagattacccattattttataaagaaaataaaacacatttccaacagaaacaaagccacgagtacaatcccatgaacagttccttgtacttatggcaggcaggaaaccgctgacagaggccacaggaaacactctgctcagacttcacagacttcacgatccaagttcgtattaatggattgttgctctataactcttctcttaatctgaagtatttaaaaacaagaatggtgaatatttgtaaatgtagaaaataaatctcaaagagtagtaagagggatttactacttagctacttgtacttggtaaattaatcattatcatgtgacatggtcatcttttgggaggacccagggcggaggacacagagggaaaaagaaggatttagctgctttgcttgaggttttgccttttaaaaagcacaaaggttttacttttccttctaatagaccagtaaagaatattttctcaaactgtaaacctgctgaagcaaaggggacagctagattttggttttaatactgtgcatttttaggcatttttgcctttgttaagaaataattgttttattttgtagaaaaggatttggtattataatgaccttggattttcactaaattgatattaatggccaaaagagatttactttccttattacttgtttaaacaagcagaatataaggtaaggttcatttggtctgaaatacatgatctatttttcacagatcgttatatcggaaaaatcttatgttggacaaaattctacttgggttttagtgtgttagttttgtcccctgtatctggtcttagtgtctcctcttacataattattgaactatcagtagagactaaatgatcatatgtcaacatctttgctaaaagataaaccagtttttatttaaatataaaggtatactttgatttgatttcatattctaagatgtgcatttcagagaaaacacattcactaatatgaatttgagcatctgtagattttgctacaggatagtttttaatcttccatgtagttctgatgccctggttgaaatctgttctgtctttgtaaactttgatcttaaatgtgggaagagcagtatgtattcatcacaaaattatcatattttaattatatatatggtaaagttggctgggatcaattttatttggttgctcattttgacaacacagagattcagtgctcctaaagattttggagaaatttacagttaaccttaagtattaaaaaaagccatctctctcatgagctgtcgtaaacatgcccttaagtatataactgtaaagttttaaaatgtaaaatatgctgagaattgtattttcttcatataatttttaatagtagttgaaagttttgatgtttcatgacagcctatcccataaagatcactgaattgacatgctgttggcagtaaattttttaaagtagaataactttctatgactatataagcaaaatatttccataattaatccacatggtaataagagatgggtaaattgaagaaatgtccttgaagttattcttttaacagatgttcttaactattagcttcatgtttttacccacctaaatttccaaataattgaataaaagttaacatatgctttcctccccttaatgggcagagcccataattgatacaaagtttaccacagtagagaaattaccttcagtggtacttttctaatgtttttctttcttctaccctatcactgaccatcctgttcaccaattatttttccttttttttttaatatagagtcctacagaatgcacttttgctttcagatagcagccttcacctcttcttacagagccatctgaattcagaagacattgaggcgtgtgtttctgggcagactaagtactctgtggaagaagcaattcacaagtttgccttaatgaatagacgtttccctgaagaagatgaagaaggaaaaaaagaaaatgatatagattatgattcagaaaggtatttccttgcattttgatttaatgtatatgtatttatataatacatagtatgcacatatgcacgtgtatagatatatatacacacttcacttttttgttgatataatactaagataatgaaaaaattgactgagattttattgagctgtgacagctcatcatagtagtcttcacacacacctccacactgaattaatgaatgcagtagaaattcaattatttgcattctgattatgtgactttcatttagtcagacttgaattattcgcgtttaaattatctagctaaaaaaatacccaactgcactccaaatggctaattaaaagtccaaatttcctgtctctctttgtgactggagataattaaagttctcctctgttactcaggctttgagtgtgttgtgaaaaccaatttcctctttttattattttccccctctcttcttttccagttcatcctctgggcttggacacagtagtgatgacagcagttcacatggatgtaaagtaaatacagctccgcaggaatcctgaaaaataattctaatgttactatcttaggaatagcaaattatgtccagtcatagagaagaaagcttcataataatacattcttacctaaagctcactgtcatgatgttaggtatttaaattcttaaagatgttgggttgtttattagtggtatttttatgttgtcttattttaggtaagcttctgtgtaaagctaaaaatcctgtgaatacaatactatcctttacaggcagacattattggtaaacaagatcttgccctccaatgaaatgacttacatgttttaaaaaaccgagttggttttattgaatttaaaaagataggtaactaagtagcatttaaaatcaagatagagcattccttcttgtatcagtggggcagtgttaccataaacacggtgtatatgttgttaaaccctatgaagagtaacagtgtagaccagactgcctctctcagatatgtgcctgatattttgtggatacctcccctgcactggcaaaacactatgcttttgggtgttagactgaaatattttaagagtatttaacctttccagtattctgtttcacgcttagatggaaatgtatcttatgaatagagacatattaaaataatgtttacatcttagaaaaaacatagatagtgctagtaatattacttataactgtaatatatagattcagaaatacattttcattatccaaaatcagcttcaacaaatggtttctggagacaaataatttgttttcattatcattgtataatcaggttaatgatttattttttgactaaatgtgcaatttcttatcactagataactttcagtatcagtggtggttacttattacttaaatcagaggaaggattttataaagattaataaatttaattttaccaataaatattcccataatttagaaaaggatgtcgacttgctaatttcagaaataattattcatttttaaaaagccccttttaaagcatctacttgaagattggtataattttcataaaatgtctttttttttagtgtcccaaagatatcttagataaactattttgaagttcagatttcagatgaggcaacattttcttgagataattacccaagtttcatccatgttgaatggtacaaaatatttctgtgaaactaacaggaagatattttcagataactaggataacttgttgctttgttacccagcctaattgaagagtggcagaggctactacaaaaagcaaccttttcattttcactaagagtttaaaagctattgtattattaaaaagtctttacaatgcttgtttcaaagaaccaacagaaaaaaaagctaagaaaactgagaactaacattaaaaaaattaaatttagaataagaatgatttctttaatttgtcctttttttctttggtctaaaacattattaaatttttgtaaatattttgatttaatgtgtcttagatcctcattattttaatacaggaaaagaaaagatttagtaatttcttaccatgctaatatgtaaagttcatgccatccaggcatttaagagcgatcctcatcccttcagcaatatgtatttgagttcacactatttctgttttacagcagttttgaaaaacacatactatgccaccaattgtcatattatttttagatgatgtaacatagccatcaaaattaatattatgtaatgcctaatacttagtatgtaaatgtcacgagatcatttttacattaaacgtgaaaaaaaatcaactttgccggatcacttattttatacaagagaatatattctgccttagacccaaactcagtgttttttattttttatgaggaaatttggtaaaacatggtttaatattagctatagttgtacatatttgaggcttttagccttggtttagttgtttcaatgtccacacactggcttcttaaaactgatttcttgcagctgagatatttagatgaacttcagttcccagtggttttcttgctttgtctcttatttttctctggcatattttttataaagctttctttaggaaaaagaaaataattactgatgtagctaacttgaatagatgtttatttaacactatttttaatgtgacttaaatgtaaagaattctaatcctggattctttatgattacaatacagcaaaactgcattttccctggctgattcttaaagggtaaactattcacctataaagccaacttacgtgttttgttgtagaactagatttatatataacccaaaggtgtcaacagcactgaacgtcaacaacctgttacttcggcttcttataaagtctcacttagaagaaagttacttaattctagttaaaatttcaagttttaaaaattactagggacaaacaagtatttatttttaagcagatactattccttaagatatgaagtatcttgccagtttttcaaacctagtccacattttattgaataattaaatacaaacaagtgatatgcagtataaagtaaaagaacaaagtttcttttatgacaattaagaagttaaacaacttcatttagcctggccacaataaccgttatatccaacagtaaactggacgttgttttgaatttggtttgtatttgttggatgccttaaggattcattattattgagctactgtggtaccaataaggttttcagtatttgagctataaaagacaaccccttttcattagaggccccttaacattttaaacgaaaataacaaagcttattctgtttctaaatagtcttcctcttaatatttaaattacttagctggtatcctgtgaatacaaggcaacatcttttcaatgaaggaaacaatttcagtacaattttgtgtttttgtttggaatatagaccttttcttagtttattatatataaacacattttcaaatacaaaatactgtctgaaattagttactgcaatttgacattcaaagcatagaattttctttgcaaataaaggtcataagaaattaataattttaatagagtggagttcaaaaatttcagaaggatgtaaataagcaacaatttctttaacatttgctatatatacaaaggactttggttctattctttgccatatgcatcttacaaacgagtcaccattgtccctttttagcagacacaattgcgcttcactcctactgcaaacttttctagatcatgagcagtgcattggacactaatttattttagctgcgcaaactctggtagttaatgaccctttctctttctccaaaattccaaagacttcttttcaaaagatatagaggaaaagagaaaaaaaaccattaagctacaatttcctgctgaatttaaactctggtctaaagacactatgtaaatggcttatgctaaagaggaaaataccctttctcccccgacgagaagtgtagattcatccaaccccacaccgcttgtctttgctgctagaggcacagcacgggcataacttgtggttgtgtttttgctagtttcttacctctgggccttctttatagctttgccccccaccccactggcggtgcgctcccgcggctgcaccctcggccgcctgttggttgcgggcctccgggcccaccgcattcccccgcgctgcgtcccgcacacggcgctcccgccggctcccgcccgggccgctccgctggcgcgcgaactgggctgcaggtagcgagccagccggcctcggtcccgtaacccatggcaaccgccctggtaacccatggcaactgcgcggcggaaagaaaaaaaagaaccgtggtggggcggggggcggcgggcggtgaatgggaacaacgaccgcaaagagacagcgatttagccgcgcgggcctgcggtcccggcgcacctgctgcaggagcgccgcgaggccccattcccgcgctacggtgacgattctggctgctggggaaaagagcaataagcagaaagccctcgtgcagaggggatccgggcggtgcacttggtgtgggaggctgccttaaacgctcgatgaccctcccggcctcccgtgtcccggcttccaggcccgccaggctggagagcgcgcg

SEQ ID NO: 6308 - DNA, 6928 bp, Homo sapiens
atggcagtattgagcagaaaaagaaaacgctgggaaataatgagtctaatgtacagtaaaattggaaattgaattatagctcaagaaaaaggacagtagccttgaggtcccgatcaacctggactctgatcacttttgtttgctgtacccatgtgttaagttactagcaagttaataacaacacgtgagcagttcaaggctcagtagaattgcttcagacatgaaataaagctaaaatgaatttgtgtccaatatcattggcattagtgctcattactgttgtggtgtaatgcctcaaaccatctaaaatcaattttaaagattacccattattttataaagaaaataaaacacatttccaacagaaacaaagccacgagtacaatcccatgaacagttccttgtacttatggcaggcaggaaaccgctgacagaggccacaggaaacactctgctcagacttcacagacttcacgatccaagttcgtattaatggattgttgctctataactcttctcttaatctgaagtatttaaaaacaagaatggtgaatatttgtaaatgtagaaaataaatctcaaagagtagtaagagggatttactacttagctacgtgtacttggtaaattaatcattatcatgtgacatggtcatcttttgggaggacccagggcggaggacacagagggaaaaagaaggatttagctgctttgcttgaggttttgccttttaaaaagcacaaaggttttacttttccttctaatagaccagtaaagaatattttctcaaactgtaaacctgctgaagcaaaggggacagctagattttggttttaatactgtgcatttttaggcatttttgcctttgttaagaaataattgttttattttgtagaaaaggatttggtattataatgaccttggattttcactaaattgatattaatggccaaaagagatttactttccttattacttgtttaaacaagcagaatataaggtaaggttcatttggtctgaaatacatgatctatttttcacagatcattatatcggaaaaatcttatgttggacaaaattctacttgggttttagtgtgttagttttgtcccctgtatctggtcttagtgtctcctcttacataattattgaactattagtagagactaaatgatcatatgtcaacatctttgctaaaagataaaccagtttttatttaaatataaaggtatactttgatttgatttcatattctaagatgtgcatttcagagaaaacacattcactaatatgaatttgagcatctgtagattttgctacaggatagtttttaatcttccatgtagttctgatgccctggttgaaatctgttctgtctttgtaaactttgatcttaaatgtgggaagagcagtatgtattcatcacaaaattatcatattttaattatatatatggtaaagttggctgggatcaattttatttggttgctcattttgacaacacagagattcagtgctcctaaagattttggagaaatttacagttaaccttaagtattaaaaaaagccatctctctcatgagctgtcgtaaacatgcccttaagtatataactgtaaagttttaaaatgtaaaatatgctgagaattgtattttcttcatataatttttaatagtagttgaaagttttgatgtttcatgacagcctatcccataaagatcactgaattgacatgctgttggcagtaaattttttaaagtagaataactttctatgactatataagcaaaatatttccataattaatccacatggtaataagagatgggtaaattgaagaaatgtccttgaagttattcttttaacagatgttcttaactattagcttcatgtttttacccacctaaatttccaaataattgaataaaagttaacatatgctttcctccccttaatgggcagagcccataattgatacaaagtttaccacagtagagaaattaccttcagtggtacttttctaatgtttttctttcttctaccctatcactgaccatcctgttcaccaattatttttccttttttttttaatatagagtcctacagaatgcacttttgctttcagatagcagccttcacctcttcttacagagccatctgaattcagaagacattgaggcgtgtgtttctgggcagactaagtactctgtggaagaagcaattcacaagtttgccttaatgaatagacgtttccctgaagaagatgaagaaggaaaaaaagaaaatgatatagattatgattcagaaaggtatttccttgcattttgatttaatgtatatgtatttatataatacatagtatgcacatatgcacgtgtatagatatatatacacacttcacttttttgttgatataatactaagataatgaaaaaattaattgactgagattttattgagctgtgacagctcatcatagtagtcttcacacacacctccacactgaattaatgaatgcagtagaaattcaattatttgcattctgattatgtgactttcatttagtcagacttgaattattcgcgtttaaattatctagctaaaaaaatacccaactgcactccaaatggctaattaaaagtccaaatttcctgtctctctttgtgactggagataattaaagttctcctctgttactcaggctttgagtgtgttgtgaaaaccaatttcctctttttattattttccccctctcttcttttccagttcatcctctgggcttggacacagtagtgatgacagcagttcacatggatgtaaagtaaatacagctccgcaggaatcctgaaaaataattctaatgttactatcttaggaatagcaaattatgtccagtcatagagaagaaagcttcataataatacattcttacctaaagctcactgtcatgatgttaggtatttaaattcttaaagatgttgggttgtttattagtggtatttttatgttgtcttattttaggtaagcttctgtgtaaagctaaaaatcctgtgaatacaatactatcctttacaggcagacattattggtaaacaagatcttgccctccaatgaaatgacttacatgttttaaaaaaccgagttggttttattgaatttaaaaagataggtaactaagtagcatttaaaatcaagatagagcattccttcttgtatcagtggggcagtgttaccataaacacggtgtatatgttgttaaaccctatgaagagtaacagtgtagaccagactgcctctctcagatatgtgcctgatattttgtggatacctcccctgcactggcaaaacactatgcttttgggtgttagactgaaatattttaagagtatttaacctttccagtattctgtttcacgcttagatggaaatgtatcttatgaatagagacatattaaaataatgtttacatcttagaaaaaacatagatagtgctagtaatattacttataactgtaatatatagattcagaaatacattttcattatccaaaatcagcttcaacaaatggtttctggagacaaataatttgttttcattatcattgtataatcaggttaatgatttattttttgactaaatgtgcaatttcttatcactagataactttcagtatcagtggtggttacttattacttaaatcagaggaaggattttataaagattaataaatttaattttaccaataaatattcccataatttagaaaaggatgtcgacttgctaatttcagaaataattattcatttttaaaaagccccttttaaagcatctacttgaagattggtataattttcataaaatgtctttttttttagtgtcccaaagatatcttagataaactattttgaagttcagatttcagatgaggcaacattttcttgagataattacccaagtttcatccatgttgaatggtacaaaatatttctgtgaaactaacaggaagatattttcagataactaggataacttgttgctttgttacccagcctaattgaagagtggcagaggctactacaaaaagcaaccttttcattttcactaagagtttaaaagctattgtattattaaaaagtctttacaatgcttgtttcaaagaaccaacagaaaaaaaagctaagaaaactgagaactaacattaaaaaaattaaatttagaataagaatgatttctttaatttgtcctttttttctttggtctaaaacattattaaatttttgtaaatattttgatttaatgtgtcttagatcctcattattttaatacaggaaaagaaaagatttagtaatttcttaccatgctaatatgtaaagttcatgccatccaggcatttaagagcgatcctcatcccttcagcaatatgtatttgagttcacactatttctgttttacagcagttttgaaaaacacatactatgccaccaattgtcatattatttttagatgatgtaacatagccatcaaaattaatattatgtaatgcctaatacttagtatgtaaatgtcacgagatcatttttacattaaacgtgaaaaaaaatcaactttgccggatcacttattttatacaagagaatatattctgccttagacccaaactcagtgttttttattttttatgaggaaatttggtaaaacatggtttaatattagctatagttgtacatatttgaggcttttagccttggtttagttgtttcaatgtccacacactggcttcttaaaactgatttcttgcagctgagatatttagatgaacttcagttcccagtggttttcttgctttgtctcttatttttctctggcatattttttataaagctttctttaggaaaaagaaaataattactgatgtagctaacttgaatagatgtttatttaacactatttttaatgtgacttaaatgtaaagaattctaatcctggattctttatgattacaatacagcaaaactgcattttccctggctgattcttaaagggtaaactattcacctataaagccaacttacgtgttttgttgtagaactagatttatatataacccaaaggtgtcaacagcactgaacgtcaacaacctgttacttcggcttcttataaagtctcacttagaagaaagttacttaattctagttaaaatttcaagttttaaaaattactagggacaaacaagtatttatttttaagcagatactattccttaagatatgaagtatcttgccagtttttcaaacctagtccacattttattgaataattaaatacaaacaagtgatatgcagtataaagtaaaagaacaaagtttcttttatgacaattaagaagttaaacaacttcatttagcctggccacaataaccgttatatccaacagtaaactggacgttgttttgaatttggtttgtatttgttggatgccttaaggattcattattattgagctactgtggtaccaataaggttttcagtatttgagctataaaagacaaccccttttcattagaggccccttaacattttaaacgaaaataacaaagcttattctgtttctaaatagtcttcctcttaatatttaaattacttagctggtatcctgtgaatacaaggcaacatcttttcaatgaaggaaacaatttcagtacaattttgtgtttttgtttggaatatagaccttttcttagtttattatatataaacacattttcaaatacaaaatactgtctgaaattagttactgcaatttgacattcaaagcatagaattttctttgcaaataaaggtcataagaaattaataattttaatagagtggagttcaaaaatttcagaaggatgtaaataagcaacaatttctttaacatttgctatatatacaaaggactttggttctattctttgccatatgcatcttacaaacgagtcaccattgtccctttttagcagacacaattgcgcttcactcctactgcaaacttttctagatcatgagcagtgcattggacactaatttattttcatgcgcaaactctggtagttaatgaccctttctctttctccaaaattccaaagacttcttttcaaaagatatagaggaaaagagaaaaaaaaccattaagctacaatttcctgctgaatttaaactctggtctaaagacactatgtaaatggcttatgctaaagaggaaaataccctttctcccccgacgagaagtgtagattcatccaaccccacaccgcttgtctttgctgctagaggcacagcacgggcataacttgtggttgtgtttttgctagtttcttacctctgggccttctttatagctttgccccccaccccactggcggtgcgctcccgcggctgcaccctcggccgcctgttggttgcgggcctccgggcccgcgcatcccccgcgctgcgtcccgcacacgcgcgctcccgccggtcccgcccgggccgctccgctggcggcggcgactgggctgcaggtagcgagcagccggcctcggtccggtaacccatggcaaccgccctggtaacccatggcaactgcgcggcggaaagaaaaaaaagaaccgtggtggggcggggggcggcgggcggtgaatgggaacaacgaccgcaaagagacagcgatttacccgcgcgggcgctgcccggcgcacctgctgcagacgcccgcgaggccccttcccgcgctacggtgacgattctggctgctggggaaaagagcaataagcagaaagccctcgtgcagaggggatccgggcggtgcacttggtgtgggaggctgccttaaacgccgatgaccctcaccgcctccggtgtcccggcttccagggccgcgccaggctggagagcgcgcgtggag

SEQ ID NO: 6309 - DNA, 518 bp, Homo sapiens
attgtgagatttttcaaatatattcatttttcttcagtcttaactataatctcccttttgtattcttgcccctgagtaattataaacttaaagtcccttctaatagttatgaaaagaaagttataggctaaaaaatataaactcagtaagtctctaactatgaaaaatggaattcctactaatttttaggtttgaatgggattttcaatttaggtttgaatagatttgttcatgactgggagccgcttcccttctttactgaattcatcccattaatacaactacatttaccctacagtttagactttagtatcatggttttgtatttcttcaaatattaaggaatattaaagattttttacaaaaggctagtgttgaaccatgacagctagttttacacacacacgatttttatgtctttgtgttcaatagagggcaccacagcatagatcatgaatgtcttcaatgaagatttgtaggttttattttttcttatagtaagagctaaacaggctgag

SEQ ID NO: 6310 - DNA, 518 bp, Homo sapiens; identical to SEQ ID NO: 6309

SEQ ID NO: 6311 - DNA, 2635 bp, Homo sapiens
accctctgaggtagcattaatgaactggaaccctctgccaggtcctctcctccccatgacttccctgagagatgtctgtagctgatttcctgccagcatgtgaatggggatgggtacgtctgttctaggaagagcacaatgtcttacccatttttagaagataggaatttgctggacacttggacaccagagctggaggcacttggtaaacctcagactttccatgatcccttgtgttctggaggccaggaaagaacagagcaaagaggtcagggccttggccgttattggagattgactctaggacttctcaccacccctccccctcctctaatccatctaggttaatacttgacatttggaattatgaagttgtgtgccccatgatggggagtggactttgagatgagacactggcctgcattataagggacctgtcatttccactggattttagtttgtgtggcttaaagagaatgcctttccagttaggtatgctcgtggctttgaatataaatgggaacagtctaacgctagctattttgctcctttccttctgattcccagctggtggaaatcggtgctgcgtactcagcaaccttacatagggcaggtatggtctcatgagctgggagcaagacaggttttctttcttgaaatgaggtccccccacttccctttgtctttgctgctttgctgctttctttccattgtctttgctgctttccttcctttgatctgtagacactcagagaactgcctggccagaccctatagaggtacaattaggtcactctagggcatctgaccatgggtggcagtttccacaaaattcacttgttctgtgggttgaaggaaatatcaaaccagctggcaagttctaggcctcttgtcttcttggtatcttctagtcaaatttacagtatatcccttctgatttaatatttgcaggaaactgatgcatggagatgctgacatcccacgtgttaattctggggcaccctgatcctattctctaggatggcattgccctttctgagccatcaatccaagtcctttccccgtttttctatgtggttggtatataattcagtgagacactctttcttgctcctgtacttgaatgtaggagtgtattgcagtggccctgaagatcccagtagagtctggggagggttgattaggacagagtgatttccaccctgcccctcctcaagcagaggagctttcttcaacctttttctctttgaagaaattgagactcagggaagaagtattgtcgcagatgtgatgcggtgagtcactggtttttaaacctctgttttggcgatgggctgggtagggatgagttaaggtttattcccctaaatctgtattacactctaagtcaacattgtgtccttaggctgggcgcagtggctcacgcctgtaattccagccctttgggaggctgaggcgggtggatcacaaggtcaggagatcaagaccatcctggctaacacggtgaaaccccatctctgctaaaaacacacacacacacaaaattagccgggtgtggtggcaggtgcctgtagtcccagctactcgggaggctgaggcaggagaatggcgtgaacccgggaggcagagcttgcagtgagctgagatcacgccaccgcactccagcctgggcaacagagcgagactccgtctcaaaaaaaaacaaaacaaaaaaacaaaaaaaaccattgtgtccttaaattgaatatccttgatagaaaagggtagggccttagcgtactggctctatggaatacgtactctctgtctttcagtagaattcagcagtcattgttcacctgctttttgccagatgttgagctaattgctattggagtaggatggtaaagattggtcttggtatgcttggttgagaaggcacaactttttacacatgtgggcctgcaaatatctatgcagatttttttgagactttaaaaagcatgtttaaaagattatttcttctaatagagactccaaaagtactcaattactgtcttatcctctgggatcctagttcctattacttgtgcttgatttccctctgctgattagataagttaccttgaaagaggcaaagaaagccaaatgggaattgacttgtttttcttcctgtcattaaaaaaaaatggaaataatttcaaatttatagaagttatacaaataaaattatacaaagaatatttgtaatcctttttatccagaacctcctattgttcgtgttcattttaccccatttgctttatcatttgcacattctctctccatgtatcaatacataattgttttctgaatcattaagaggagagataattggcccaggcacggaggctcacacctgtgacctgagtactttgggaggctgaggcaggaggattgcttgagcccaggagttcaagaccagcctgggcaacagagtgagatcctgcctctaccaaaaaaaaaaaaaaaaaattagtcagacatggtggcatgccgctagctactttggaggctgaagtgggaggttgagactgcagtgagctgtaattgtgcacctgcgctctagcctgggttacagagggagacccttgctcaaaaaaaaaaaaaaaaaaaa

SEQ ID NO: 6312 - DNA, 2636 bp, Homo sapiens
accctctgaggtagcattaatgaactggaaccctctgccaggtcctctcctccccatgacttccctgagagatgtctgtagctgatttcctgccagcatgtgaatggggatgggtacgtctgttctaggaagagcacaatgtcttacccatttttagaagataggaatttgctggacacttggacaccagagctggaggcacttggtaaacctcagactttccatgatcccttgtgttctggaggccaggaaagaacagagcaaagaggtcagggccttggccgttattggagattgactctaggacttctcaccacccctccccctcctctaatccatctaggttaatacttgacatttggaattatgaagttgtgtgccccatgatggggagtggactttgagatgagacactggcctgcattataagggacctgtcatttccactggattttagtttgtgtggcttaaagagaatgcctttccagttaggtatgctcgtggctttgaatataaatgggaacagtctaacgctagctattttgctcctttccttctgattcccagctggtggaaatcggtgctgcgtactcagcaaccttacatagggcaggtatggtctcatgagctgggagcaagacaggttttctttcttgaaatgaggtccccccacttgcctttgtctttgctgctttgctgctttctttccattgtctttgctgctttccttcctttgatctgtagacactcagagaactgcctggccagaccctatagaggtacaattaggtcactctagggcatctgaccatgggtggcagtttccacaaaattcacttgttctgtgggttgaaggaaatatcaaaccagctggcaagttctaggcctcttgtcttcttggtatcttctagtcaaatttacagtatatcccttctgatttaatatttgcaggaaactgatgcatggagatgctgacatcccacgtgttaattctggggcaccctgatcctattctctaggatggcattgcccctttctgagccatcaatccaagtcctttccccgtttttctatgtggttggtatataattcagtgagacactctttcttgctcctgtacttgaatgtaggagtgtattgcagtggccctgaagatcccagtagagtctggggagggttgattaggacagagtgatttccaccctgcccctcctcaagcagaggagctttcttcaacctttttctctttgaagaaattgagactcagggaagaagtattgtcgcagatgtgatgcggtgagtcactggtttttaaacctctgttttggcgatgggctgggtagggatgagttaaggtttattcccctaaatctgtattacactctaagtcaacattgtgtccttaggctgggcgcagtggctcacgcctgtaattccagccctttgggaggctgaggcgggtggatcacaaggtcaggagatcaagaccatcctggctaacacggtgaaaccccatctctgctaaaaacacacacacacacaaaattagccgggtgtggtggcaggtgcctgtagtcccagctactcgggaggctgaggcaggagaatggcgtgaacccgggaggcagagcttgcagtgagctgagatcacgccaccgcactccagcctgggcaacagagcgagactccgtctcaaaaaaaaacaaaacaaaaaaacaaaaaaaaccattgtgtccttaaattgaatatccttgatagaaaagggtagggccttagcgtactggctctatggaatacgtactctctgtctttcagtagaattcagcagtcattgttcacctgctttttgccagatgttgagctaattgctattggagtaggatggtaaagattggtcttggtatgcttggttgagaaggcacaactttttacacatgtgggcctgcaaatatctatgcagatttttttgagactttaaaaagcatgtttaaaagattatttcttctaatagagactccaaaagtactcaattactgtcttatcctctgggatcctagttcctattacttgtgcttgatttccctctgctgattagataagttaccttgaaagaggcaaagaaagccaaatgggaattgacttgtttttcttcctgtcattaaaaaaaaatggaaataatttcaaatttatagaagttatacaaataaaattatacaaagaatatttgtaatcctttttatccagaacctcctattgttcgtgttcattttaccccatttgctttatcatttgcacattctctctccatgtatcaatacataattgttttctgaatcattaagaggagagataattggcccaggcacggaggctcacacctgtgacctgagtactttgggaggctgaggcaggaggattgcttgagcccaggagttcaagaccagcctgggcaacagagtgagatcctgcctctaccaaaaaaaaaaaaaaaaaattagtcagacatggtggcatgccgctagctactttggaggctgaagtgggaggttgagactgcagtgagctgtaattgtgcacctgcgctctagcctgggttacagagggagacccttgctcaaaaaaaaaaaaaaaaaaaa

SEQ ID NO: 6313 - DNA, 5894 bp, Homo sapiens
ggcagcactgccaggggaagagggtgatccgacccggggaaggtcgctgggcagggcgagttgggaaagcggcagcccccgccgcccccgcagccccttctcctcctttctcccacgtcctatctgcctctcgctggaggccaggccgtgcagcatcgaagacaggaggaactggagcctcattggccggcccggggcgccggcctcgggcttaaataggagctccgggctctggctgggacccgaccgctgccggccgcgctcccgctgctcctgccgggtgagtactgcgtgcccccgggacacccagagagggcccgggcctcctgcactttccccgcggcccagaaccttgtggcacctccagagggacccccaggactggctgcgaccgagctttaagggtctagtcccgggggcagccagtcggccaaggccccgggtccctgcgacggcgaaggcatcccggaggccgcacccagaccggcccggcaagctgcagggactcggactgaaaacctgcccgttacccctggtcgctcgcaggcgcacgggcgatctaaccccgcgccgtccattccgctgatgggggtctcggaagcaccgcaggagagctttgcggagcagggagggggtcgcgggtgctcggggccgtcctcagagcccaaagtgccgcagccctctcggctttccaccccgaggctgccacgacggtgccagcgcgcggctgctcccctctgtgctcccaggtgatggaaaaccccagcccggccgccgccctgggcaaggccctctgcgctctcctcctggccactctcggcgccgccggccagcctcttgggggagagtccatctgttccgccagagccctggccaaatacagcatcaccttcacgggcaagtggagccagacggccttccccaagcagtaccccctgttccgcccccctgcgcagtggtcttcgctgctgggtaagtacagccccctcctcgcctcctgctccaccaggagggctgcggcgccggagccccccgcacagctgcacggcggcgcttcccagtctggggcgtgctgacgtcgggagactctaacaccagaatgtttgccgagcgcctgcggtgtgcggttccggggatgcggtgggggcagggggcgctcacggggagggcgcaggtgggtcgcggcaggggcagccacagggtgtcacggtccgacgtgactgggggccatggttccctgcgggcggcggggagggatttcctggggcgccccctggaatccaagcccgaccgcagtgtctgaccatggtccgcggcgcggccgggtggtcctgcaggggccgcgcatagctccgactacagcatgtggaggaagaaccagtacgtcagtaacgggctgcgcgactttgcggagcgcggcgaggcctgggcgctgatgaaggagatcgaggcggcgggggaggcgctgcagagcgtgcacgcggtgttttcggcgcccgccgtccccagcggcaccgggcagacgtcggcggagctggaggtgcagcgcaggcactcgctggtgagcgcggggccggccgggggcggggtccggggggccggggccaggcgcgctgagccgctgtcgccgcaggtctcgtttgtggtgcgcatcgtgcccagccccgactggttcgtgggcgtggacagcctggacctgtgcgacggggaccgttggcgggaacaggcggcgctggacctgtacccctacgacgccgggacggacagcggcttcaccttctcctcccccaacttcgccaccatcccgcaggacacggtgaccgaggtgagtgggcaccccgcgtgcgcaagggccgctatggcccccgcggtggggacggggctggggcctggctgcaccctcgcctcccagcccaggacagccgcttgcggcttttgtgtggaagaggctctgcttctagcgccagcagtgagcaagggggtgcagccctcccatactctcccaacccggggtcacagcaccgcagggaggacagcgggacgcgcgtcccgaggaggctgccccttcctggcctcggtttccagcccgtgttccgtgggatggctgagaggagtacatgggaccctgtccccaacagtggtgcagagggcacgctggacgctgggcagtggccccagtgaggccatacgcataccagaaggtgggcttctcggaccccaggccaacctcctcttcttcctccccagataacgtcctcctctcccagccacccggccaactccttctactacccgcggctgaaggccctgcctcccatcgccagggtgacactggtgcggctgcgacagagccccagggccttcatccctcccgccccagtcctgcccagcagggacaatgagattgtagacagcgcctcaggtaacggacatacaggtcacatgggacacacagcagccccgaaccctgccacagggcgaccaccaaacccgaacctaaggctctgagaaattccaagtagggattcgtagtgcgtactgcaagatggtgcctagaagatttaggattctgttgattcacacactgaagatgtgactcttgcacattatttgcagttgaaagcatcttacagggccacagcccagaggaaagaatgaaaggaggctccagacagtacctgagagactctgtcctgtcagacacgcacccacaggtgacctgtgtgtcacagctgacaaggaagcttgctaggatggccctgtgtggccaccgggtgacagctatgctgcagggcacctgtgggggtctcgggacccagccaccacacagctcggggctctgctcacaggcgccttggcctggggcggggcaggtgctgatgagcattctcctagctcttccaggcacctgctggacagggcaggctgggaacgctggggccgagtggcagttccctccctactcagctgggtggcagccactggcctcacggagcgcctgtggtctggagcgcattgctgggtcgtgggtcagggcctgttggctctgggtctctgggtctcacctgatatgggtgtgggacagtcagtgtaggccccagacaacagcggacttcagactttcccgaggaggaactggagcccaccaacctggccatgggccccgtcgtcctccaccctccatgttgctggctggagttgaggcaggtacggggccgccccacacctgccccccaagccatgtggtagggacagatgtcgtcttgaggagcagcagtaattacaagcttactgtcagccgtccctggaagcaagggccaggtcaggtcagacaggaggccgcctggctggcgggaaccactccccagacagagactgtgcccagtcctgggtccctcctcatttgggatgaactgggcctccctgtgccagcctcggtgctgcccctgcccagtgcaggcttgggctcctcactcatttgtccacgcggatgccccattccaagcagatgtccccgagccacttacccaacaggcagacgtgccagcactgttcgtggtgtgcaactggtctggcgggaagagcccctcgtgggcagagggtccagagaggtgcggtttgccccacatttgggggcactgggccacagtgggcaggggagcacatggccagtgccctgggctaggagagggataaagtcagctgtggccaagcagaagcagtattgcaggggaagggtggggagagactgtgctatgagctctgagcaggaggcaggacatggagagaagggtgggagacggacagagccagctgtgccagccgagggaccagagtgggcagtggggacggagcacagaccaccgcccacaagggtctctcctgtgacttctggcttcccgagggcagaggctgggatgggcatgtggcggctggcacccaggaggctccgccaggtccacgccaagccagcctggctcagctctggcttcctgctcacacgctggatgcctgtccccaggcctcctgacagggctctgcagcattggagaggcttgtggtggggccctcgctgtagaacaggcactgccagtgctcactgactcctcattgcagccagggcaggggcgctcccaccacctcggtttcagtcaggaagctggggggtgctgggatctgccagcagctctgtgtgctccccaggtgggctgcccggggccctggctctctggcttctacaccagtgcccctgcgaagcctcagcgcccaaggtctttgcaagccctgttcctgcatctctggagagggctgctccaggtgtgggcctggccagggcttccagaccagtccaggcactgcacctgcacattgacccccttctccactctctctcatccttcagtagccacaaagctggcagcagggtactcgcagatttgtgaggagagccgagcccttgctgactgtcctcccgtgcacggcagagtgaggcggggctcctggcctccttaggggctgcccgctctgggccacacagccagagaaacactgtccatctggctggcttggcctgtggggtgcaaaagaggtgttttcactttgctttggaaacatggaaattaccaagtgacttaaccataacaccaaatgatgatttttaaatttatgaaaattatggaaccagatgggacacagggaaacgagaacgatactgaaaaggtctgagtcctgtggggggtccaggtcccgcaagacagctaatcaggtgcccctgtctgttattcgggtaaatgtagcagctgggtccaggctcgggcagagcagctttctacagcaggggtgtccgccctctcccggggttcccacggggttcccaggggccccttactctgccacgatgtgggagttccaccaccacagggacttgagcggcagctccggctcttacgtagaaacgcgcaactccagtccctaggttgtgtccgaggttgctatggtgccatcccatcttgccgctcactctgcgactgtgcggagaaacgcaagtgcccccgaagggtgggcgtggcctctgatgaatgcacacgttggtgggaggtggcttccgtttgtacgaagcgcctcttcacgcgagcgttcacctcggtctcccctttgcttggtccagttccagaaacgccgctggactgcgaggtctccctgtggtcgtcctggggactgtgcggaggccactgtgggaggctcgggaccaagagcaggactcgctacgtccgggtccagcccgccaacaacgggagcccctgccccgagctcgaagaagaggctgagtgcgtccctgataactgcgtctaagaccagagccccgcagcccctggggccccccggagccatggggtgtcgggggctcctgtgcaggctcatgctgcaggcggccgagggcacagggggtttcgcgctgctcctgaccgcggtgaggccgcgccgaccatctctgcactgaagggccctctggtggccggcacgggcattgggaaacagcctcctcctttcccaaccttgcttcttaggggcccccgtgtcccgtctgctctcagcctcctcctcctgcaggataaagtcatccccaaggctccagctactctaaattatgtctccttataagttattgctgctccaggagattgtccttcatcgtccaggggcctggctcccacgtggttgcagatacctcagacctggtgctctaggctgtgctgagcccactctcccgagggcgcatccaagcgggggccacttgagaagtgaataaatggggcggtttcggaagcgtcagtgtttccatgttatggatctctctgcgtttgaataaagactatctctgttgctcacaaatg

SEQ ID NO: 6314 - DNA, 307 bp, Homo sapiens
agcccattgcatgagggcaccttttgctcccatgctctgatgggcacacggcggctttcgagggctgcaggccagagcaggcacctgacaaggctggtaacatacgcagccaaggctggattttcttcatagacttcaaccaacagcacatctcagcagatgaagtgctggagccgatatgggaatccagcttccactaagccggacaatacaaagattcgcaccaacgtagaaccacgccacttttctcaggcgggtttttcatttttaaaagtatgattgcttttcataaaacattatgctattt

SEQ ID NO: 6315 - DNA, 17094 bp, Homo sapiens
cagacgcccagcggcagcaggatgagtgcggaggcaagcgcccggcctctgcgggtgggctcccgtgtagaggtgattggaaaaggccaccgaggcactgtggcctatgttggagccacactgtttgccactggcaaatgggtaggcgtgattctggatgaagcaaagggcaaaaatgatggaactgttcaaggcaggaagtacttcacttgtgatgaagggcatggcatctttgtgcgccagtcccaggtattcacgcccttcttttgtgtctgtgcatgtgtgcacatgtctgtcgcatgtgcagctgatgtgttggtacttcgttttcctgagcatgggcataagcctctggttgggagagtggaaggtagtgggggagggaagattgaagatgcatccttagggaagctgccctgtactcttggtttgcttggagcctggggaggggcccatattacagccgtccttgatctggctatattgaaactattgatctggctatattgaatctggcctcagatccaggtatttgaagatggagcagatactacttccccagagacacctgattcttctgcttcaaaagtcctcaaaagaggtaacaaccacccacttaaagttgcctccccatagccaggaggagtccccaggacttctcctcataacatggggccacagtagatcctaagatttttttccgtcactaccatattcccttattatatctccccctacctctctatacaagtacacactttgtttctgtttgctttctacagagggaactgatacaactgcaaagactagcaaactggtgagtgatttgggggtgggaatggggaataataaagggaggggaaggagaaagaggagggatacccagtgctaggcaggtagaagtagtaggtgagtctgatttgccttctagtctctccaacttccctaagaaggaggctttctggggattaattgctgtgttagagttacagtaaagatggtagaagggaaaaactcataggctccagaagttcagggtcaaatgagattgagctgagggtgataggaaggacaggtctggccctagtagtgtagccaacttcctaccttttggtacccaaagatgccaacatctaaagggtctgagggtaaggttaaggtagaagatagaggaagaagcaatctcctattcacaagtgaatggcaaggagccgggccctctgcctcctgttttaagctggatgcagagagtgcttcctagttcttctctgctactctgtgcaggatgtgtgtgaggtggggctgcagactctgcagcttctctgggccaaggtgtgaacatcctggaagctgatctttgaggggctactcatctcaccctgactcccccctacccgcgtctaacctgtgtaagcccgagttggtcttaacacctatgcccaggacatctgttctctaactctgccctttcctactcctcatgcagcggggactgaagcctaagaaggtggtgtgtttactatttgtgcctgggtggatgggggccatgagccccttccccagctgtcctgcatgtccctgggctgctgcatgcatgtgtgtgtgaccttgggctgggatggccagaggaaatggtggccttggctttcagagttcctttgaagggtgcaagaacatcaggctcagtgtccatacccaggtagcactcattagggatgattctctctgccccaggactccaagtcaaagattccccaatcaaaaactataagcatttgactgtaaatagcagcagtgtgaaatagatcatttactgggttacagtgtgttctcacttagcccgagcttggacgactgtggaaggatagactgggggaatggggctgaggaaggtaccaagtgagggggttttgcaggaagatgggaggtcagggaacagagcctaggaagaacagtcccaagttggaaaacctaagagccttcatgtgcctgcctgtggatgggcacagccataaatatccccacaccccacaactctgccccatcagtctgtccctgtctccttcctctggtggtgtgcctgaggcctacctcctaccccttgcagcctttcatcaaccatcattggagtggggctcaatcatgtcacgtcccctccccttcccaccatagactctttaaactcttagatcactgccatgaccacttcctcaaaccagcccctgccttgggcctctgcccaagctgtttttgacctgcatgtgcctgtctggcctgtatgtactgtgctgtatgtacaattctgtgatttccttgtcgtcagcctatctcaggccattctgacattgcatggagagctgctggattggggctgtgggagggaagaggaaaacatctccttttccagggggaaaccagctcctggttggtgatgggtcctttggagtcttgccatggtagagaccacatgctggtacttgctttggtagggaatggggatataaggaaaataatgctgtgaaggatcctgggcccatttcagagtcatagaaacttggctttgtcctttgattattgtctcctggttggggcttccatttcacctcaggccttgaatagagaagagcatgaaactatggtctgatatttatggagttctggccccagcctggtctgaccctgggctggggcctgagcaatgcccaaatccaggggctttggcagctgcctggggaaatgtgaaaaagcccagcctaggccacccatgctgcccttctgcactcacgttggaaagtgtcaatcagacagttgagtgcccccaccccggagcaccccagtcttcctctccagtagttatttttcaaagcagagggcccctgctctcacccatgtggatcagggagctggttccagagcaaaagaatatgctttgaaggggaaggcagaagaaaactcagatgtctctgcaaagtgcctagttctttttggaaaccctttagagacaggctttaacctgtctacaaccaggggatggttggagaggagcccaacagtcattagagctgctgctacccagatgcgtgttccgcagggtttcgtagtcactgtgtgtgctcctcagagctgaagcctgttgctggaggggcactctagatgtgtgtgccagatgagagactgtaagggtgttgccaggttgtataagagacagaagtggagttaatggggctgtgggtaggtgggtggcgggggcagaatgtgagtatgatgagagagactgctggagcagagaggccatgtgtccctccccagtgatgccctggccccatagaatgccatttctgggatagcccctggcccagttttttggagcacgctcttgggggtgggcaagggagggaagagaggagccaaaacctgttctttggagaaagaagcaggacaagctctgcgcatgactgtcatgaggaggaggagccagcaaagccctagatggttgctaggtgactgaggagcagtggctccacccccatggagcagaggagggtgggtgcatgacgtcaggtggagctggtgctgcggccactgaggctgccatcagcctaagctggtgaactgggccaggcaccgctccggtgcctgccggagcctggcgatccagctgcacgtctgcgggggcctctgtgtcagagcggcggccgtttgcaggctgggaagctgccgcaccgggaggctgagactgcattgttgggatttgatgcactaatctcctgtctccgccgcctttccctctgttcggtctcttgccctccctcccttcgtctgtccttcctccgtgtgtttgtctatcctcctctgtccctcctctttcctctccttgctttctttggttttctgcaatgatgagacaggcaccgacagcccgaaaggtactcttgcttgctctcgtcctgctgctgggttgccagggcaatggtggcagcaggctgctggggtgggggtgggggctgattgacttcatctgtctacctggtcggggaggcgggtgaggacgaaggtgggttagggagaggtgtgtgtcaccactatgccccacaccctgggcatttgcttactgccttgcctgcttttggctctgcctgtgttccaggccttaacacccagtggcctcacaggcttgggcttcaggcagcctctaccgcataccggatctgggagggtttcctgtggtagaacctagggaagcaggcccaggtatctcagtgcctctagcaggcctgcctgcctcacccaacctttgctagaatacctcttggttgttctcccagtatcccccaatccccaggatttgtatcagggcactttaccagggtgggatggggaacctagaatagtctttgacccacagctgtggaagcttagcccagggtagaagaggtgggaattggcctcagtgtatgctggaaatagggcccaagccaaatcttgtcttggctagagcagtgagatactgggtagcaagaacactatttggaaattggagttaattgtccacttaccattttgcagtaacctgaaggggctgtagtttctctgtgctgctgcccacccccacctcctttcctacagctgggtggggttactttgctgagctctgggcttctgctaatgcaatattcatggtcctgacacctgagccctcttccctagtgatcgggactgctgcaggatctggttctggggaagggggttgggggagggaggacagcagcattgttctaccctagggacctgatctcccatttctgggcttagattacgctcgtcacatggggtttctagggagttctgtgtagagtctagcacttgaaggaagaggctgacctgggaaagtccttgggagtggtggctgggcggggcctctggctctggactggagttggagagatcgttagcaggaggactggtctcatgggaccttctcactagctgcttccttgttctatggctcagcctagagatggacttctgggatttctggggtgtctgaaggggtgaggcctgcaaggattggacaaaagtgggagcaggaaccaaggggaacaggaattctgggttcctgaagtaggaatacagtgattcactgaagggagaaggggatgggatgggggggagggtggctaactgtagccccattcctgttatttcttctgctctcattgctgtcccttttgctctctgtctttctgccattgtcctttctttcctgactacttctcttctggctcctgttgcctgtccagaccacaactcggcgacccaaggtgagaaaacaggcccctgtgtgagccactgctgagtgtacacacacgtttcaggcatgtggatgtatgagggcacgtgtatgagcaagtgaaagttcgtcatagtgtatcctgggttctcttcagaggaaagggtgggggttcgcagtgctggcaggcacctcctggggaaaatggcttttggcttttaggaggttgtctaagccagtagcttgaatgcaaaagagaaatgaatggggttgtggtggttaatcaaagcaggctttcttgaacaagggaattttgaccagttttgatgggagggattggaagaaagatgaacttggccatgtaaaatgtcaggggataaggaggtgagtgtgtctgtgacaggccttgggtggggatgtctgaggattgcacatgatctctgagtgtcagcccactgggagaccttggggctcagcactttgagcacattggcaggcctgtctgctccagggcttgaacttcaggtcagctcctctgcccaccttctcccctgccccacaggggcatggatagtgttgccagatcgggggagatgacgaagagttgtttcaagggggagtctaggggtacaactttcaccttggcccttttacctgcagggtcctctgaaatagactgagagagggagattcagcttgactcccaaagagggcttagcaggggtagagagcctggcacccccacttttggcccaaccttctgtggaaattagattgtactttttccgtctaggggtggagggcatagacctggagcaaggatgggactgagagtataatggagttgctagaatgatcacaagtgggtcatagatgggggttctagggaataacggattctgctcttaagggtagtgccagagctaggaggaatgtggagtcagtgccaagcgaggagccttataatcttatgtctttctcttatcttttcctccctctctcctctgcctccatcctccccctgtcctttgtcactatctctctctgcctctctgtatcattttccttgtccccttcattcttcttttctcactgtgctttgatactctctttctgctttttcccttttctgtctccttcccttgccatattctcatattctgtttctgttcctcttactacccctatcctctgctttctttctggtctgcctctaccctttctgaatagcccacgcgcccagccagtactggggtggctggggccagtagctccctgggcccctctggctcagcgtcagcaggtgagctgagcagcagtgagcccagcaccccggctcagactccgctggcagcacccatcatccccacgccggtcctcacctctcctggagcagtccccccgcttccttccccatccaaggtaaggcctggggtaggggtaaaggagaatcaagacacccagaggcttgtggctacccgctgtgtcttgaaaatttcctggggttggcaaagacctagaacttggatcagaaagggtgaggacatagcctatggatatcttgctactgactgagccatcctttcctttcttgcccttatgccatactttccccatatatactgtgctacggtttcctctcagatgttcttatgccactgactgttggccaccctggggctgggtgatgtttgcacactttcttgtgttctttgcgccagctcagtgttggtggagaggaggagtgggctgtgcacagaccgtgaggcctctcctttgcaggaggaggagggactaagggctcaggtgcgggacctggaggagaaactagagaccctgagactgaaacgggcagaagacaaagcaaagctaaaagagctggagaaacacaaaatccagctggagcaggtgcaggaatggaagagcaaaatgcaggagcagcaggccgacctgcagcggcgcctcaaggaggcgagaaaggtttgactctggatgaagggggtggctggggcagcctgagacctaaggaagcatgctggaaactagactggagctggagcctggaacatactgtgagaaaggcctggggcatctctgtgctggtaccccctcccacctccacttcttcctcaggaagccaaggaggcgctggaggcaaaggaacgctatatggaggagatggctgatactgctgatgccattgagatggccactttggacaaggagatggctgaagagcgggctgagtccctgcagcaggaggtggaggcactgaaggagcgggtggacgagctcactactgacttagagatcctcaaggctgagattgaagagaagggtaaggggcccacagctgctgggggccaaacggtcaggtgagaaccatgcctgaaagtgttaatgatcttctccaggctcagatggcgctgcatccagttatcagctcaagcagcttgaggagcagaatgcccgcctgaaggatgccctggtgaggtagggtcttcagtgcttgcctctgatgcttactcttgtgtctccaaatgtgttagagcacccatcgccagagactctgacacgtgctttcctccttctgccttcctcacatccctgcaggatgcgggatctttcttcctcagagaagcaggagcatgtgaagctccagaagctcatggaaaagaagaaccaagagctggaagttgtgaggcaacagcgggagcgtctgcaggaggagctaagccaggcagagagcaccattgatgagctcaaggagcaggtctggggagcccagcccctcacccagaatcccccacctgactctcctatcagttgatgcctcctctttctaggtaccttccagcagcccttctccctatcctccccgtaacacaggtggatgctgctctgggtgctgaggagatggtggagatgctgacagatcggaacctgaatctggaagagaaagtgcgcgagttgagggagactgtgggagacttggtaagagaagagcagacccctgacatctgacttggacctgctgagaaaaagattgacatgtgacccttggcctttgagcagggtgtgcggtgagggacccagcctgggcttgctaccctgaccctgccttttttttttttttttttttctgagatggaatctcgctctgttgccaggctggagcgcagtggcgcaataatctcggctcactgcaacctccgcctcccaggttcaagcgattctcctgcctcagcctcccgagtagctggtactacaggcatgcgccaccatacccagctaatttttgtatttttagtagagatggggtttcaccatgttggccagcatgatctcgatctcgacctcatgatccgcctgctttgacctcccaaagtgctgggattacaggtgtgaaccaccgccgctggccgaccctgcctttctttagcccaaactatggtgtggtgtcctaggaagcgatgaatgagatgaacgatgagctgcaggagaatgcacgtgagacagaactggagctgcgggagcagctggacatggcaggcgcgcgggttcgtgaggcccagaagcgtgtggaggcagcccaggagacggttgcagactaccagcagaccatcaagaagtaccgccagctgaccgcccatctacaggtacatgcccactgtttgctctctgcccaccatcaccccagggcttccttatgacccagctgtgcttcactgtctctcctcctaggatgtgaatcgggaactgacaaaccagcaggaagcatctgtggagaggcaacagcagccacctccagagacctttgacttcaaaatcaagtttgctgagactaaggcccatgccaaggtcaggaaagtgtgtgggtctgagggagccctgcctgggatgaactggtatggggtctgggcttcagattcctgggggaaggggtgctttgtgtggtggtttggaagactctggcctgggcttgccctagaagcaagggatctactggagcaaggcatgggaattttggggctctttcagctctggctaagagtcctcctccctgttcacctcacaggcaattgagatggaattgaggcagatggaggtggcccaggccaatcgacacatgtccctgctgacagccttcatgcctgacagcttccttcggccaggtggggaccatgactgcgttctggtgctgttgctcatgcctcgtctcatttgcaaggtatggccaatcaatcacatgttccacagaaatctagtgaacttgccatgaaccaggcattgaagatgctgagtgaagacaacagagtctctgcccacaaagagtttatggtatagtggaggaacacagcaaagtcaccgattaatatatattacaaatggtgtgttttcaaggagagataggttctgtgagagagcacaattagagatttgatttagaggtgagcagggtgtgactgagggaataacattgtctgagggccaggaggtgcctaggggttaaccttggggatgatgggcaggatagcattctaggtggagagatagcaggagtggcagctttaagtcaggaaagaccttgattccaccggtcccactaccctttcattttcacatcctgactcctcacaacctccagtaatcacatcactaccctttccccatgcaagattccccacccaggtaagagctatttctgctttctctcccatgtgtgtccatgctccccacatagttaagctctgagtactatattcctgagtctctgttctccatcctctgctctgaggcccaggttcctggtgctttttcccacaggcagagctgatccggaagcaggcccaggagaagtttgaactaagtgagaactgttcagagcggcctgggctgcgaggagctgctggggagcaactcagctttgctgctggactggtgtactcgctgagcctgctgcaggccacgctacaccgctatgagcagtaagtgactcctgactccctcaccccagggtgggggtccaggattggccagaactgagattgcctggcagactctagcctcacagtgcccttctctggtctctagtgccctctctcagtgcagtgtggatgtgtataagaaagtgggcagcctgtaccctgagatgagtgcccatgagcgctccttggatttcctcattgaactgctgcacaaggatcagctggatgagactgtcaatgtggagcctctcaccaaggccatcaagtactatcaggtgtggggcaagaatttgggcttggggcaggaggcagggaagctttcacttgatgggggctcttactaatatattcaaggttgtatgtcccatgcttgctgcttgaggcctggtttgctcttagatgaactctccatatgatgcagctgcttgagggctttggattctcttgtacctccagagacccatgatgaccagggctcaaactacagtttgggaagaactccccacccgctccagggcctaaaagttgtctgtctgttatctctcctcagcatctgtacagcatccaccttgccgaacagcctgaggactgtactatgcagctggctgaccacattaaggtgaagtatctgggccagtgattgagcccccgtggagatcagaaatggagggcatcaggtcaagagatcaggcacccaagaagtgtcacataagactagggcagagttaccaaagccatatcagggaaactagaggacctacttatgtatgggggtcagcagaggatggggacttcttagagatgttgataaggcagaagggctcctgctgggggctgatgattgcatgcttctatcctcacagttcacgcagagtgctctggactgcatgagtgtggaggtaggacggctgcgtgccttcttgcaggtgagaacacatctagatctgtgtgagctcctcttctttcttagtcctcacttccttactccgagccttaatgctaacttggttctccatccattttctttttcctgagtagggtgggcaggaggctacagatattgccctcctgctccgggatctggaaacttcatgcagtgacatccgccagttctgcaagaagatccgaaggcgaatgccagggacagatgctcctgggatcccagctgcactggcctttggaccacaggtttaaggctgcaactggggaagggaaggaaactgagtagaaacatgaagggtatagcacttgaagatctggatctggttaggggacaaaaatggttttggggtagctggaaactgtggtgctgaacccagggttgactcctgactctggcctggcacacaggtatctgacacgctcctagactgcaggaaacacttgacgtgggtcgtggctgtgctgcaggaggtggcagctgctgctgcccagctcattgccccactggcagagaatgaggggctacttgtggctgctctggaggaactggctttcaaagcaagcgagcaggtgggcctggatggctgggtagaaggtgtggggagagttagtgaccagtgtggggcttttacttctgcccttggctcctgcagatctatgggaccccctccagcagcccctatgagtgtctgcgccagtcatgcaacatcctcatcagtaccatgaacaagctggccacagccatgcaggagggggagtatgatgcagagcggccccccagcaaggtaggtggagatttccttggagaagttgcagaggcctgtaggagtaagacttgcagagctactgctagttgtgggaggacggggagacaggaggaaggcatctggagagcaccatcctgcctagaaggcagggttttccctgtaactggatctctctgtaaggagcacagtgatgatctcttctctccaccctcactttctcaccccctaccgaccattccttagcctccaccggttgaactgcgggctgctgcccttcgtgcagagatcacagatgctgaaggcctgggtttgaagctcgaagatcgagagacagttattaaggagttgaagaagtcactcaagattaaggtgagggtagtgtaggctcaggatctgggggccaggaaattggtaggactcaggaaagcagtgagtgttggggatcgggaccaagacggcttgggagttaaggggagaagtggggcctgcaatcaatgggagctgtggtgagccctcagggaacctactatctcatggtctagcccccagtttccagggactgtggggaggatgtcagggatctagaagttctgtccttgtccagggagaggagctaagtgaggccaatgtgcggctgagcctcctggagaagaagttggacagtgctgccaaggatgcagatgagcgcatcgagaaagtccagactcggctggaggagacccaggcactgctgcgaaagaaggagaagtcaggcactttccctggggccttgcttcctctaatcctcccactgctggagctctctgcctcctaacccatacccctactcaggttctcttatagtgagactccccattttctttacccactgccaaccccattgcatcaccccagcctaagcctgtgctgctctgccctggcttctcactggcagggctattccaaggacctctcaggactgaatagtcaaggagtgctttagagaagggacactgccaaagcccagattctctttcacagagagtttgaggagacaatggatgcactccaggctgacatcgaccagctggaggcagagaaggcagaactaaagcagcgtctgaacagccagtccaaacgcacgattgagggactccggggccctcctccttcaggcattgctactctggtctctggcattgctggtggtgagtactgtggaataggcagcactagcacagaggagattgtcttctctcctgtccttggcctcattttgacctctgccccaccccccttacccccgggtattcagccaggaacatgcttacacagtttcactctgtgccagttttcaccaagttttcccttccgctgaagatgtgtgctgagtttctctgggcaaaggagggcattactaaattgttaatgaggctcagaataatgatgacagttggtctctagtagatgtcctttctggctctgtaatctgacctttctgcccagccctatatcccagagggttgtcagccagcagcaggctgggctgactctcctggggcatccagccctgcccgatacctgctcttgattgcttctctgcttggacactgtgttttctcactgagttcatgtggcttcattttatgatgtggtcatatcttccactgctgaattatcccagtttcacttggggcttgtgttttgacctttgtctagtcactcagtatagtcagggctcctcacctagagtttttctggttaccagttctagcctccccagttacctgactcaggaggtggctgctgctgtctttgttctcctctgccctatagtttgttttgtttactctccagtttctcacttaaccttctcacctccagaagacaggctttttgccctggaattaaacccttagggcctccagactttcccagctgctcctgagtcttgtcagctgacctcacctacatagagtctttgacaaagtctctgttactgacaccccttgatcttgggaggtgaccaagtaccttcttgactttaggctcttgtggtacagacagctctgtgttctttggagagagtttccaggattactactttgtgttgtttttagcactcttgaaacaaacattagcactctttaaacaaacatagttctgaatttatgaaacttcccaccaaaaaagaaggtcttttgcctcagagcaatggggaatccttaggagcaagggagtgtgtttgcatccccaacttaagctttgctgctggtgagcactaagggtgcagacatattggggtctctggagcattctccgtgcccttcttggagatggcatctgagacagggaggcaggaacagcctcatgttccaagtactttgtacagtgcacactctctttgccactgttcttcacacattgtaccctgtcttgtggcctcactcctgtttggtgtctttctttaacacttatctgctcgtccccaaagataggtggcagagagtcttgttagagaaagtatgatgattaggaaaagggttttcctgcaggttgtgtccaggattcctctggtgtgtccccgtaacccccaaatcacctaactcctctctcctcttttcctgctcccccatgggctatcccgagcacagaagaacagcagcgaggtagagacccactctggccgggggttaccaggctggtgggagttggagctaagggagcagggtggagggggaagccaggactggagatgggtgatggggggatgaggaaaggggaagagtaggaatggagcccaattttcaaccctttccacttggggctgatgagattttttatggtccccacaggagccatccctgggcaggctccagggtctgtgccaggcccagggctggtgaaggactcaccactgctgcttcagcagatctctgccatgaggctgcacatctcccagctccagcatgagaacagcatcctcaaggtgagggagccacggggaggactgggatgggagatggagcatatttgccccattgatgatagatgacaggggcctcctagcacctcttaccactatccttcttttttcatccacagggagcccagatgaaggcatccttggcatccctgccccctctgcatgttgcaaagctatcccatgagggccctggcagtgagttaccagctggagcgctgtatcgtaagaccagccagctgctggagacattgaatcaattgagcacacacacgcacgtagtagacatcactcgcaccagccctggtatgtacctgccaacccccaagatgaataaaactgccccctccacttggcccagggatttagcccctgctcaggtggttcccccaccacagaagctcttcccagcagtgttctttggcttcactgttcagtttgtttgattcacccactctctctcaagtacttgttctgttagagagtcttatacctgcacccctaacccttaatccagtagaactgcctgcctgcgccttggtgggcctcaccagctttctctccccacagctgccaagagcccgtcggcccaacttatggagcaagtggctcagcttaagtccctgagtgacaccgtcgagaagctcaaggtcagctcagtttgccaggcagagctcacttcacagcataaactggtggagccaggcacttgtggagttcctctgagcccagccctgtgctagacagcaattggggaggagatggaagggaaggcagggttcttgccttggaagctcactgtctcagtgcaaacagaagacagattctcataacaaaatggataagctagggtaatctttagagtgactggttcaggctttagcttccatcagcgctgagatcattgtggggtagaacggttgggcatggcttcccaagagcggtagaatgtgagttgggccttacaggatgaggacttgcaaagtaaggaggagtgctggtgtggggatggggttggagatgagagcaaaagtatgttgatatagaggactaagtccctgcccccctggtattagtgtctctgtgaaaccacgtggtcttgtgctagcctgtgggggtcccataaatgaacccttgtcttcctctccccttccctaggatgaggtcctcaaggagacagtatctcagcgccctggagccacagtacccactgactttgccaccttcccttcatcagccttcctcagggtgagggggagcatggggtggaggatgggacagtgtggagagctcaggcgggcccccctctcctccagaattggaggaggcctttggagtctcaggtctaacaactgcataccttgggttatctggccaaattttacttacaagtaactcagaagtgcttacagtgctttgaaattccaatattttagcacctaaacaccttccgtgacttttgacaccaggagggcctcaaaactcccttgtcagattatgtatccccattcttatttgaaaaatgtggtcacaatagcccaggatctcagaagccctagtcacccaggagctgccttggtctcagtgctcagggaccccttcagtggcccacagctcaagtgagcccctgacctggagtctttttctcctcatcaaccaccaggccaaggaggagcagcaggatgacacagtctacatgggcaaagtgaccttctcatgtgcggctggttttggacagcgacaccggctggtgctgacccaggagcagctgcaccagcttcacagtcgcctcatctcctaagcactcctttcccctgctgtccccttcgaccctcagccctctggtgccgctctgcccgatgcacagccacctcagccagcccccaggtagaaacgtgggttaagctcttcctgccccgttcagcttcactcccaccctttcagcgtcctgccccttcaccttgacccgggttcccccactcccattccctggcctctgccataatttgttgttcaactgctccctccttcctgaggggcctcagggcttgtggggggtaggctgagaccccaccaccaaaggttaagtgaggtccccttgattgaggacttcaccccttgattaaagcaacttctgcttcagtg

SEQ ID NO: 6316 - DNA, 191 bp, Homo sapiens
tgtgtctctgggttcaggaatcctcaggcagcagaggggacttgctcctcagcccccatcactgcccccacccctacccgtgtaggccaccgagtgaggcccatggactggggagggctgtgcctgacgactcctgtgtccctctatgagggcccagcgccctgaccctcctgcctaggtttctacctttt

SEQ ID NO: 6317 - DNA, 521 bp, Homo sapiens
agttactctaaccaaggaggaaagggctagacttaggactaggtacctaagttcatttatggagtcaggagggctgggagggtgtagcctctgccaaccctgcctctgcttcctgtagcttccactgctctttagtccaatttttggagctggagtaatgatatgatcaccaccccagccaattttctgatgtactggccagtcttcccataagacctggggtctctcagagggaatatttactaaataagggaaaactaaagtggcatactagtaaaggataggaggtacaaaagctactcccaaaccccaccataaattagtatcacctggggagtttcttttaaaatgtaacagatttctggtcttgacccagacctactgaaaatacttgcagagttgggactcattaggctggtaaacagcaccccagcattgtagatattagccccagtttagattagttggctagctcctttatattctctttttttccctcttggggagagaagtccagttca

SEQ ID NO: 6318 - DNA, 23083 bp, Homo sapiens
ttctggtggtgatagttacctttggcataattctccctctgtgtctcttgaagaacttaggtaaggacagattttgcttttatcatattctgcagtgcccaagtgaatcagaaactgaataaaaatggacagtgttgccctctgcttcccctctgcatgcactcaaagattaagtacatgataaattgcaagtattaatcggtcccaactttaatatgggataaaaataacagtcagtatgtgacctcctaaacaatccctctactgagctgtggaggggagaagggaggtcctggggccaggacagacagggctattttcagtagtacaacttatatgctactctaagaaaagtccagaaaatgcaattctcttcatacgaagtcttaaataccctcattatttagataaatacattttcaaatctaatatggagacagaaagctgcctagatttatacccacaagtattataaatttagagagtctgaccagcctcaattatttctcttcgaagtgggagagagaaatcaaaagtcagaaatggcggataatctccaagtcatatccatttggctttgatctactacttgtttttatgcttgtatttggagacaaggatgcctgatgttaagggaatttcatacattgaataatgtgaccagactgccatctagtcaaaaacctataaaatgtatttactttaattctgggctaattcaaacagaagtttggataaaagctctccaaacaataattatgagccttagttttttgttttgttttggatacaaaacaaaacagctctgtagttgttctgtgaggtttataaatagatttttttaactacttaattttctggtttctgcctctgtgttttctgtacctatagaggtagctcttttcagttaagtagagaaaagctcttcccctgggttgaaaataatgcagtcccgagaggctacttaactctacctttctggaggtcatggtagcaattggagatctcccaggcattctaaggggagctactaaagagccccagatactcaatttaccactagaaattcgcttcatctactctctgtcatctggggagaaaagtattataactgacattcagtatgcacacaataagtgcataataaagagctattgaggggatcaaggagtaaatgggtttgcccataggactccatcagggtccaccaacacagacttacagcaaaaattggaaggctcttttctgctggattctgggaatctgtgttctctagtgtgccagggagagttggaatcaaaacacgtaatataatgtttctattcagagccccatttttttgccaaataaagtagcactgtcaaataataaatcttgtattcacttgggcatgtatgtttattattggatctctaaaatatgcttcaaataatgcactgaaataagtgaggtgatgaattttgaaataataacagtttatgatgggtagctccaaaatttttaaaaatggaaaaaaatgaaataatttattttttacttttttttaaagggtatcttggctatactagtggattttccttgagctgtatggtttttttcctaattgtggtaagtgctgattgcaatggttggtttggttttgtgatagtacaatggcatgtaataattattcattggctttactaaagtccatattgcttctactatacttcttaataccaggttatttacaagaaatttcaaattccctgcattgttccagagctaaattcaacaataagtgctaattcaacaaatgctgacacgtgtacgccaaaatatgttaccttcaattcaaaggtaagtttcctgatcctttgcagatgaaacaagcatttttattaaggacattctatttctcatgcttgtaattgcactggtttgaatgtattagttctcaaaagaacacatgataccattgcttccagattacacatctatgtagagatccttgagaaatatacaaatattatattttacactctctcttaccattaagcattctctgtgaaaatcccattctggataattgtctcagctttttctgtgtagagtgctaggtgatacttcaaaaacagactaacaacatccttagctcccttcttctggcgatgacagaaaggaatactgcagacttcctcaggttgcacagttgaaatatagatgccaccacaaactggcacttaaaaaactctcatactattaaaatattgttgatacaatgggaaacagaggattatggagtcagtcaggcttggatttgaatcctcaggcaagtcacccaaccccttgagtaaaaataagtattctattctgtatcttacaaggttttgttagaatgtgcctggcatagtgcatcagcagagttagggcataagataggttagttttcacttctttttgcataggaagttagattgagtgtgagagtttcaaagagccttatctaagaaaactaaatagatcgcgatctttctccttctctctgattgtaaggatatagccaaagtagtgcaatatggaacagattttcttttcagagggtatcttttaagtccgattccatgcacctgatgtagagcgaagagcagtaaactagaggtgggagtgctgggccagtcgcctgacctgttggagggagccaggagaacagccacagtctgcctactgcttgggattgctgtggggacccagcgagctatcctaggaagagtgccatgtaactggctcatgctgtataaacagggggtgttgtatacctggagtatataaaatacaccataggtgagccaaatccgaagtccctctgtgacaagtggctaatggctcgagctagacaagctgtcttagaaaagctgcttctactttagagatcaaaacctccctaataaccgaataatccagggattctgaagagctgtcagataaaaagacagctcagaaatactggagctatgtcctttttatggtaaaagtgtttttcctaatgtctattcttttctctcaaatagaccgtgtatgctttacccaccattgcatttgcatttgtttgccacccgtcagtcctgccaatttacagtgagcttaaagagtaagaaatttgtttaattttttatcttaatcgttttacatcccctcattaataggcaagtatgcaattaaaataaacggacttgtctaatgaacgtcagcggattcatcacccagcttcaacatttactcacattgtgccattcttaaacaagcattgtattttaagaaacaagaaagcaagaaaaatcagaaacttgcagtattttggggggccataaacataaaaagtagccaaccatgtgggctttttcattaatttggtttttcaaatattgtatcaccgaggaaagtttaagtatttgtgttgctttccattacgtatgcgtattttgcaagtgggtgataatcttcagatttatctgtaaactgctaaatacatcgtctctgatttgcctgtgggtttgggtgaaaaggctagtaaatcagacaataagaaatcaatattaagaccacaaactaggaaaagagaatattgctgttcatttttaactattaagaaaattctatggatttattgatttatttttgattgctggttttgagaaaattaaggcctgcttataaacttcttcatgtctctttttagcctatggttatcaaacataaacaaaaatagtcacaatagcgtatcttaaaaacttagaaaagatcgacaatatcagtatttatttccagtttgaaacaaagttgatgtcatttagcattgaatccactcatatatctttggcgtcttttaatagttcagcttttagttttagtttttaattttctcaagcgtatacttctcaatttttctttatttatttttttttttttgagacagagtctccctctgtcacccaggctgtagtgctatggtgtgatctcagctcactgcagtctcaacttcccagggtcaagcaatcctcccacctcagcctctcaggtagctggaactacaggcacatgccccatgcccagctaacttttgtattttctgtagacacagagtttcaccatgttgcccaggctggtcttgaactcctgagctcaggtgatctgcctgcctcagcctcccaaagtgctgggattataggcgtgagccaccgcgcggggcctacttctccgtttttcttgttttccatacttctatggcatcctagattccttgacataaccaaatgttatgactatctgtggtctgttatttattgaatacaagtgttgcagattaattgtttgggcagttaaagaaacttagagggtcatcccaaccccagagtgaacttgacctgagagatggagcccttcatcattccagctgtgatctcttgggcacttgctgcgctggagacctacagacttccaggtgcatccctgaggccacccaatgggaaaatcagaacctgaaacagcagctttagagacagaacacctgaggtcaagttccagctctgccactaatctctggagctaggagaacagcattgatttttttctgccttttttcctttgcccagctagtgtggagataatatcaagcacaaatattaaaaaaatgctgtctgcccttccgatgagaactcgatattcttttaaaagaatggggaagaacgctaacgggagtgtagttccacagatctcaccctcaataccaattcagtataagagaggttattttcaactggcataactgccaggggtaatttcagctgttcagatcttccctaacctgacagaagcaaagttaaattagtattcttcaatgttaacactggtgcttaaattcagtcatatgatttttaatttttaacatttatttgtttttagccgatcacagaaaaaaatgcagatggtttcaaacatctcctttttcgccatgtttgttatgtacttcttgactgccatttttggctacttgacattctatggtaagtaatttctactggtacataaatataaatatttgtaaacaaattagtaaaaattagtgttgaaataacttttaacatgaaaggcaaagaaagcaacaaagctatccattggtttttctagttttttcttcgacttaaagcaatggtgatcttttcatgttcatgcagactgccgaataaaataattactcaaacaatatttataatttttttctcctaacagtgtccttaatagaaattgcattttagaagcatgctacctttactgaggaaggtttaaaactacatcagagaaggctttcctaattgacaccgcaaattgggtcagattccattaatagaatggagagacagagacagatgctgaaagtgagaaagagcagagtgctacactcatgacactctgagttaattaaaaatgaaacttctaattgttcactggaagtcgaagccttgcaaagatccaaaggaatgatagaaaattttaaaaaatgaaatctgaaaaagggaacaagttttcatatgtaacttttactgaccctgaatgaacagtttaccggcgtttactgcttcttcatcctctcctattcaaattatcctgaagcttgatttaatatctttcattatctttataattggggacctaatttaaatatatatatgtgtatatatatgtgtgtctatatatatgtgtatatatatgtgtgtgtatatatatatatatgtatgtatttcacaatcttctctactaaataataattctttgggactttttttcataaacacaaatgtctcaaaattaaacacatttaaaaagtattaattcagcctggagaaaaaggctactctgattatacagatattattattgttttcactagcaatagagaatggcattgtctaatgaattcataaataccacatttaatttttacataaaaatggtgttgctaaggtgcatacagagttgtacagggagagagaggcggagaacttaatgttagttgaagtctcactgttgtcttgttgaagctataatttttctttgtagatgcattatttttcacatagaatagaacaccaaacacttttattactcttggattaaagaaaaaggattagctattttttaagtggttagttattttgaattaaggaaattagaactagtgagattggtattataacttatggttcttttttggaaactgagaccaagctaagctctatggtacagattagcatttgaattccatgctgaggaccttgagactggtgcagtgagaggcccttgcaggagacaggaggggaaattacctcttgtcaaaagagtgagcagttccatactctatgtgactgccattctagctttgttagtctttgaaataacactttctgaagttctggattgagaaaaagttcaaagtagtacataaggccaggtacggtggcttgcacctgtgatcccagcattttgggaggccaaggtaggtggatagcttgagcccaggagttcgagaccagcctgggcaacataatgagacccccatctctacaaaaaaaaaaaaaatacaaaaattagccaagcatggtggcacatgcctgtagtcccagctactcaggaggctgaggcaggaggattgcttgtgcccatgaagcagaggttgcagtgagccaaaatggcactatggcaaccatattccagcctgggtgatagagcaaaaccctgtctcaacacacacacacacacacacacacacacacacacacacacacacacacacacaaagtagtacataaactaatttttttttttttacaagaacaacatacatgaaagagtggaattatttcctgatggtgaaatttcaactagtgtctctgctgcttggccacttgaagttgacttaacaagagaagagtttgaaacaagctccaaggtggcttgtagctctccccaccccaccccctccctgagcaagcctgtggcagtttggtgtggtttgaagagtggagggaaagtctagattaagagcagcttcgcgtttcaactgtatgtttcattctcgagcccagtgtactcctaggtttaatttagtctaaattaagcattcccactccatgtagcttcttccagtgattactttaaatttctttgctaagtcgcgtatgcacagtggagcatgtcttacatagagatttttctttccaacctgattgttttaatagacatttcgaaacattgcttttcttgccctttagtttacagattctttgtttttcagaaaaactgtcattcagctatatactttgtctccttttaaaaccctcttgcttttccctcattttagacaacgtgcagtccgacctccttcacaaatatcagagtaaagatgacattctcatcctgacagtgcggctggctgtcattgttgctgtgatcctcacagtgccggtgttatttttcacggtgagtaagggcctctgtgcaatatgagaaaagctgaggtctcggctttccttctgcctgcaggagcccgttgcagagaaagcctgccccaggtaactttcctgggttattgaatctgcatctgggaaagatcccaagactcggttcaggctctttgaaaagcaagtggcattcagtgcgtcagggagcctctgatgcagtgaatctccattctaattaatctgaccctgttctttccaaagaaatgacaatagaatgttcaaatctcagtagacatgaagagagaatataaaaagaacagaaatgaacattcaagtcttagataaaccaaagacagaaattacaccccccaacaagaaaactctactactcataaataaaaatactttccctcttaagtcaagcccccgtacttccaaaactgttaagctatctataaattcactaggcattacaaaacatttcatgaattcctgtgcaccaataaatcagttactctgcagagaaatgtcaatgttggcatgctgtaggcacttacagaatctttgttttcttttcttgcaggttcgttcatctttatttgaactggctaagaaaacaaagtttaatttatgtcgtcataccgtggttacctgcatactcttggttgttatcaacttgttggtgatcttcataccctccatgaaggatatttttggagtcgtaggtatggcttcatgactttgtgcttgtcattctacagtagctgtttgcagggaaattttcacaatagcaatgctaaactttctcttttgtcttattttacaggagttacatctgctaacatgcttattttcattcttccttcatctctttatttaaaaatcacagaccaggatggagataaaggaactcaaagaatttgggtatgtctcttgccagccactctaacttttctgattagttttccatttaaatttacaaaataaatagtccacctctctatcaagactactttcagttgccttgaaaggaggcagaagccctgtagctttgctacttgggagatatttaaaatatcatatcagaatcttctcccatccctccaaatatcttttctggttttactctttttttttgagatggagtctcactctgtcgcccaggctggagtgcagtggccagatctcagctcactgtaagctccgcctcccgggttcatgccattcttctgcctcagagagtagctgggactacaggcgcccgccaccatgcctggctaattttttttcttttttcttttttcttttttgtatttttagtagagacggggtttcaccatgttagccaggatggtctgtatctcctgacctcatgatccgtctgcctcggcctcccacagtgctgggattacaggcatgagccatcgcgcccggccctctggttttactgttattgtgcctcagcttttgttctgatccagggcatggccagtcagaagaatggacattcatcctcctgtgtctctataggacagtgtctagtcttcagcaagagaggaagtgacgagggactcacagatgttatgcagtccactgtttccatatgatttctagtcatgtaactcctccctacagcccagggaacatgcaatgccttaattaaaatgtctgagttagcttaaatagtcttttttattatttgacagatatgctttggaacaacagacctggattcaaaaactacctttctatattgggattcttgtttccaggtctggtgaagttcaagggcatcttgaacgtggtgcacttggagacagtgagggaagcaggggtgaagtggctgctacctgagtcccttctggagctccattttgcttggtcttggagaaggcttctcagctgccctcccagctagtgtaagcactgcaattgtacctgttacctgagtcaacagatccagatgagaggtgtaggcaggagggtcatctctgtgcatttaggaaaagcagcactgatgctagtagagcatccagttccccaacatgatcacccctgaagccttaattcccaaatccttccaagccttatctgtaggggcttaatgaggacagagaggaagaaacagtcactctggcacaacaggacaatatattcagattaaatctgaaaatggtggaggcctgctgcccatgaattctgagcctctccaaccctggtcccataatgaaactagtagtagggtcttccaaatggcattagacaagggttccatctgtgtaaggaccactgggagttagactggacccaggatggtatgccatgtgcagccatgtcaacccccaatttgctcctctccttccttagctctttctcttcctccagtttccagtccagccctgttggctctcagaatgcatcatccttctccctgcagcgctctcactgaacatgctcaagcgcaaggaacttataatcttgtgttctctggattctggatttagtaatctgtattagtctgttctcacactgctaataaagaaatacctgaggttgcttccaagatagccaaataggaacagctctggtctgcagctcccagcaagatcgatgtagaagatgggtgatttctgcatttccaactgaggtacctggttcatctcactgggactggttggacagtgggtgcagcccatggaaggtgagctgaagcaaggtggggcgtcacctcacccaggaagcacaaggggtcaggggatttacctttcccagccaagggaagccatgacagactgtaactggagaaacggtacactcctgaccaaatactgcacttttcccacagtcttagcaactggcagaccaggtaataccctcccgtgcctggctcagtgggttccatgccaacggagccttgctcactgctagcgcaacagtctaagatcgacctgcgacgctgcagcttgatgcagggagaggcatccaacattgctgaggcttgagtagctcacagtgtaagcaaagaggcccggaagcacaagttgggcagagctcatcgctgctcagcagggcctactgcctctatagattccacctctggaggcagggcatggcagaaaaaaacgcagcagacagcttttgcagacttaaacgtccctgtctgatggctctaaagagagcaatggttctctcagcatggcattcgagctccaagaacagacagactgcctccccaagcaggtccctgacccccatgtagctggactgggaaacacctccccatcaggggctgagagatacctcaaacacgtgggtgcccctctgggacgaagcttccagaggaaggatcaggcagcaatatttgctattctgcagcctttgctggtgatacccaggcaaacagattctggagtggacctccagcaaactccaacaaacctgcagctgaggggtctgactgtgggaaggaaaactaacaaagagaaagcaatagcatcaacatcaacaaaaaggacatccacaccaaatccccatctataggtcaccaacatcaaagaccaaaggtagataaaaccacaaagatggggagagaaaccagagcagaaaagctgaaaattccaaaaaacaagcacctcttctcctccaaaggatcgcagctccttgccagcaagggaacaaaactagacggagaatgagtttgacaagttgacagaagtaggcttcagaaggttggtaataacaaacttctctgagctaaaggagcatcttctaacccatcgcaaagaggctaaaaactgtggaaaaaaaaaaggttagatgaatggctaactagaataaccagtgtagagaagacctcaaatgacctgatgaagctgaaacccacagcacaagaacttcgagactcatgcacaagcttcaatagccgattcgatcaagtggaagaaaggatatcagtgattgaagatcaaattaatgaaataaagtgagaagaatacagaaaaaagagtgaaaagaaatgaacaaagcctccaagaaatatgggactatgtgaaaagaccaaatatacgtttgactggtgttcctgaaagtgagggggagaatggatccaagttagaaaacactcttcaggatactatcgaggagaacttccccaatctagcaaggcagcccaacattcaaattcaggaaatacagagaacaccacaaagatactccaagaagagcaaccccaagacacataattgtcagattcaccaaggttgaaatggaggaaacaatgttaagggcagccagaaagagaggttgggttacctacaaaaggaagcctgtcagactaacagccgatctctctgcagaaaccctacaagccagaagggagtgggggccaatattcaacattatgaaagaaaagaattttcaacccggaatctcctatccagccaaactaagcttcataagtgaaggagaaataaaatcctttacagacaagcaaatgctgagagattttgtcaccaccaggctcgccttacaaaagctcctgaaggaagcactaaacatggaaaggaccaaccagtaccagccactgcaaaaacatgccaaatggtaaagaccagtgactctatgaaaaaactgcatcaattaacgagcaaaataaccagctaacatcataatgacaggatcaaattcaaacataacaatattaacctcaaatgtaaatgggctaaatgccccaattaaaagacagagaaaggcaaatttgataaacagttgagaaccatcagtgtgctgtattgaggagacccatctcatttgcaaagatgcacataggctcaaaataaaaggatggaggaagatctaccaagcaaatggaaagcaaaaaaaaaagcaggacttgccatcctagtctctgataaaccagactttaaaccaacaaagatcaaaagagataaagagggccactacatagtggtaaagggatcaattcaccaagaagacctaactattctaaatatatatgcacccaatacaggagcacccagatccataaagcaagtccttagagacctacgaagagacttagactcccacacaataataatgggagattttaacaccccactgtcaatattagacagatcaacgagacagaaggttatcaaggatatccaggacttgaactcagctctgcaccaagcggacctcatagacatctacagaactcttcaccacaaatcaagacaatatgcattcttctcagcaccacattgcacttattctaaaattggccacataattggtagtaaaacactcctccgcaaatgtaaaagaacagaaatcacagcaaactgtctcttagacacagtgcaatcaaattagaactcaggattatgaaactcactcaaaaccacacaactacatggaaactgaaaaacctgctcctgaatgactactgggtaaataacaaaatgaaggcacaaataaagatgttctttgaaaccaatgagaaccaagacgcaatgtaccagaatctctgggacacatttaaagcagtgtgtacagggaaatttatagcactaaatgccttcaagagaaagcaaggaagatctaaaatcgacacccctacatcacaattaaaagaactagagaagcgaaagcaaacaaattcaaaagctagcagaaggtaagaaataactaagatcggagcagaattgaaggagatagagatacaaaaacccttcaaaaaatcaatgaatccaggagctggttttttgaaaggatcaacaaaattgatagaccactagcaagactaacaaagaagaaaagagagaagaatcaaatagatgcaataaaaaatgataaaggggatatcaccaccgatcccacagaaatacaaactaccatcagagaatactataaacacctctacacaaataaactagaaaatctagaagaaatgtataaattcctgggcacataaaccctcccaagactaaaccaggaagaagctgaatctctgaatagatcaatatcaggttctgaaattgaggcaataaataatagcctaccaaccaaaaaaaagtccaggaccagaaggaatcagagccaaattctaccagaggtacaaagaggagctggtaccattcctcctgaaactatttcaatcagtagaaaagagggaatcctccctaactcattttatgaggctagctcatcctgttatcaaagcctggtggagacacaacaaaaaaagagaattttaggccaatatccctgaggaacattgatttgaaaatcctcagtaaaatactggcaaaccaaatccagcagcacatcaaaaagcttatccactatgatcaagtcagcttcatccctgggatgcaaggctgcttcaacatatgcaaatcaataaatgtaatccatcacataaacagaaccaatgacaaaaaccacatgattatctcaatagatgcagaaaaggcctttgacaaaattcaacagtgcttcatgctaaaaactctcaataaactaggtattgatggaacatatctcaaaataataaagagctatttatgacaaacccacagccaatatcatactgaatgggcaaaaactgaaagcattccctttgaaaactggcacaagacaaggatgccctctttcaccactcctattcaacatagtgttggaagttctggctagggcaatcaggcacaagaaagaatgaaaatggtattcaattaggagaggaggaagtcaaattgtctctgtttgcagatgatccctgattgtatatttagaaaaccccattgtctcagcccaaaatctccttaagctgataaggaacttcagcaaagtctcaggatacaaaatcaatgtgcaaaaatcacaaccattcctatacaccaataatagacaaacagccgatcatgagtgaaatcccattcacatttactctgaagagaataaaatacctaggaagccgacttacaagggatgtgaaggacctcttcaaggagaactacaaaccactgctcaacgaaataaaagaggacagaaacaaatggaagaacattccacgctcatggataggaagaattaatatcatgaaaatggccatactgcccaaggtaatttatagattcaatgctatccccatcaatctaccactgactttcttcacataattggaaaaaactactttaaaattcatatggaaccaaaaaagagctcacatagtcaagacaatcctatgcaaaaagaacaagctggaggcatcatgctacctgacttcaaactgtactacaaggctacagtaacgaaaacagcatggtactggtaccaaaacagataatatggaccaatggaacagaacagaggcctcagaattaacaccacacatctacaaccatctgatctttgacaaacctgacaaaaacaagaaatggggaaaggattccctatttaataaatggtgctgagaaaactggctagccatatgtagaaagctgaaactgaatcccttccttacaccatatacaaaaattaactcaagatgggttaaagacttaaaggtaagacctaacaccataacaaccctagaagaaaacctaggcaataccattcaggacatagatatgggcaaagacttcatgattaaaacacaaaaagcaatggcaacaaaagccaaaatagacaaatgggatctaattcaactaaagagcttctgcacagcaaaagaaactaccatcagagtgaataggcaacctacagaatgggagaaaatctttgcagtctacccatctgacaaagggctaatatccagaatctactaagaactcaaacaaatttacaagaaaaaagcaaccccatcaaaaagtgggcaaaggatatgaacagacacttctcaaaagaagacatttatgcagtcaacagacacatgaaaaaatgctcatcatcactggtcatcagagaaatgcaaatcaaaaccacaatgagataccatctcacaccagttaaaatggcgatcattaaaaagtcagaagacaacagacgctggagaggatgtggagaaataggaacacttttacactgttggtgggagtgtaaattagttcaaccattgtggaagacagtgtggcgattcctcaaggatccagaactagaaataccatttgacccagcaatcccattactgggtatatacccaaaggattataaatcatgctactataaagacacatgcacatgtatgtttattgtggcactattcacaatagtgaagacttggaaccccaaatgtccatcaatgatagactggattaagaaaatgtggcacatgtacaccatggaatcgtatgcagccataaaagaaggatcagttcatgtcctttgcagggacatggatgaagctagaaaccatcattttaagcaaactatcacaaggacaaaaaaccaaacactgcatgttttcactcataggtgggagttgaacaatgagaacacatggacacaggacagagaatatcacacaccagggcctgtcgtggggtggggggcccggggagggatagcattacgagaaatacctaatataaattacaagttgatgggtgcagcaaaccaacatggcacatgtatacctatgtaacaaacctacacattgtgcacatgtaccctagaacttaaagtataataataaaaaaaaatacctgagacagggtaatttataaaggaaagaggtttaattgactcacaattccacatgactggggaggcctcacaatcatagcggagggcaaacaaggagcaaagtcacgtcttacatggtggcaggcagagcgcatgtgcagggtaactcccctttataaaaccaccagatctcatgagatttattcactatcacaagcacagcatgggaaagacccgcccccaggattcaattacctcctaccaggtaactcccatgacacgtgggaattatgggagctaaaattcaagatgagatttgggtagggacacagccaaaccatatcatcatctgtccacctatggccttcatcagcccttcaggtaacttagtttttgacacctgtttcctatttcacttaatcaaatctattttgcttttgtatgttttttttccactttttcaaacagaaatgtttgcttgccagtgataagctaagttggtaggtaatgaataacaaaatgacctggatattttctaaggcctttattcccccttggttgtaatcttagtttgagagaagccataaggatacccagttatttgtagaatggatacatacacttgaggtgaccatgaagtcaaagaatgggacatagaggactactctgcttagctagttttttttttttcctattttcccatccttgcagaatcagattcataaaattttagaaagattctcacagttcagccatggttgtgacaaactctgaataccagaggacacaaagggagaggaaaaactgttctattttttttccccaggtacatgtggaaaaattttgctgcactgaaaataacccttgcctttctcttgctccaggctgcccttttcttgggcctgggggtgttgttctccttggtcagcattcccttggtcatctatgactgggcctgctcatcgagtagtgacgaaggccactgaaacccgccgagaaaaagaaacatccctgttgtctgctcagtcaagtccccacacatcagcaatctctcaccacttcttttgcaagtttacagaagcaaacagaaatgtacaggatacttaaaatggaataactttttggttgcaaaacagagacatggttctataatgcttcatgtccctccaagatttgagatcaatttagggattgtgaaatttttttttcaaatttcatacaatcatatttcccagtacttttcacaatcattttttacccatctaactctatgttttgtggcttcccggtctcttagaactttgaaaacatgatatacaataatgtttatttattatacatccagattctgaaataattttcctactgatgttcagctcacactatctgtacctttttagaagagaaaagaatcttgaattgtatatatttattttgctttacagaaaaaaatggtttcgtaaataatttgcctattttggttaacatagcacatggagataatcatctgaaagttatagggcactgccactgctgaatcagagcatgcccaatatttgaggtggctctgatttcctggcagctgaactcgggtagtccagtggcctagctggtaccacatctattcccatccagagacattctctggcaagtgttctcagctgaaaagtggttggggatgattcttaccttggtaattaaatgaagctacacatttgggtaatctagcaaatgaagtattttttccctcttggcaacttgtgtcagagttactctggtctgagtcaactttcgctggggaaaacctatggaacctactgcaaaaagattgtccaaaatgcctaagaaaatactcctctgatgcatttagccttcaaccctacctgtcttgctgaagggagaaaaatgttttagtacattataggcccagcagcttttattcatgtccaccagctagttgcacagagaatcatgtgtacctaactaaggatgatctaggataagtaactcctgttttatattgagtattttagggaagtctttaaaagacttgttttatatctataaatctaggttattacaaatacaagaattttgtaccttaaataagcctcatttctatttcttcttcattaattctccatctagtcttgtgaaaaaaaaaaaaaaaaaaccctcagagatagtctttgtgaagagcttctgacagaatcactgagtaccttccttcccccagatgaggaagacaagggggtctcagtgtctgtgctgtctcctcttctcttccccaaccaaggactgtgccattactgcccgtctcaactgtccatgcaggaggacagagttgcctggtactcttacccttgtccctctcctaaagggagcacaaggaaactgaagagactgaaaaagaagagagtttgtagctgaaaaagaatagggatagcaaggaaacccagaactgcattcccctaagtggggccatcccatgtgattgaattgtccatagcttgcctatggtgagaaatgtgcatgctccgtgagctggtctcttgaaacaggacttatgcttcctctatattctggttaaattttccaaacacataagttcactgagcacagatttcttatccagagacaagtagaatctaaccgcagactgttggcagagtttccaggcacttagccatgttcccttcctgactcaaatccccaaaggccttcactctcactgagaatcacactactgtcccatagataaggcaggcattgaagcacctgtcgtgatcctctaggggggagaatgaaaggttatttcctgcattgcatcatcatagcttttaatataatgctacagaatcatatccacattaggttagagttcagatatttggatatgaatacctaacctagccatatccatggccatctctgttcttttcagcaatgttttccatattatattagcaatgacagaaacagaacaagccaagatccagtcagttcttgggagcttgtctagagcaccaagtaatgaaatagccaggtagtgggatgactgtacctttaaaaatacataatttagtttgcaagctatattatgctactttctattttccttgttactttatagcaattcattttaccctcacaaagtcaatttagaaccttatcattaactgggatgtgtagtgatatttttgggcctctgggtttcatgtgtcaatacaaggaatatttatttaaaatagatttatttagaggaggcacagtgttgttgatctgtgtgacaccacccatatttttaaaaacctttgtatgtttctctaaatttgttgttgactgaatataatagaccctaccataattcgtcaaatatcactgattagttacatcctttgtgtgagattagctgtaaagtatactgctcttattcttattcagaatagttaattggtagccaaaaatacatgtatcacagatgttaggtcgaatttaaacagcacagtcaagtgctatggaagtttttctgctaaattagtagattaaagaatactataccctaggcatggggagcagcacgttttcctttggtaggtaggatctctatactagtgaacagtgccagttccacactttggacttagaactgttctctagttattgtaacacagaatactgtcaatccctaatttacttaatgttacttattggaagtggggctgatgaaatacgcacaggagggaaatctactgtgtttaggcacaggcagccccagtgtataaggagatcatattccaaaaggttgtcagttggttgtttgcaacctggaatgtattttcctttagagaccaggttatccatggtggttaggcccctagagcagctggaaaagatgatcaaaccaataggttagctgacatcgaataatgtaataggtttgctaaagaatctaaccatcaaatataatattgtttccagggagggtgtttgttcagagttgcctgttagtagaatctggactgtccatcccagccacatcccacctactggacagtaggggtagagatgccaccagactacaggtgaccagattggcctgaaacatggtgtccagtaaaaacggggaggaataagtccatgactgctggagagcttggtggtaggaggagggtgaaggagggtgagggggcctctcatgggtcagaaacctccagggacatccctcagctggtaactctgctgttgtccggagggttcaggcttggtgtgccttcttctgtttgtctgacttttggctcctatggttcatctcctgccctgcccaccacagaaaaggatgctgctgcatagcttctccaatgtaccagtcattgaggccagcgcgcagcacttttaatgtttttagtgctagtaactgtgttttaactctccaggaataagctgggaggttagaaaacaagaaaaaagggggaaaaaaaaacctctccacccactttccttttttacagttacagaccctgttgagaaaaagaagcacccagatgggtgatggtgatagggcttgtggtggacacagggttgtggtaagattcctcagtgcttcggcgagcacctaagactattaccctggaactgactgctttctagagcttgattcatgcctctaagccagtggtctcaaagtgtggcccctagaccagtagcatcagcatcatcggggacctcattagaatgcagattctcagccccctcccagacatggtgaagtcagaagctctcagggagggactcagcaaatgatttaaagcgcatcaagtttgagaaccaccctaagccaatgagtctcccttttacttcccattagtcctccctcaccagatgattcctaggactcatggtgcaacatacaggagccaggctttagggaggggaggaaaggagcctggcggcaggggtctctgcaatggcaagaaagtgagtgaatccagcgctgccacctggttatccccttctcgttgaaaatagcagcgcaggtgcaaattcctaaacacaggctgcctgcactcggtgttacctcgggctgaggcatgataatattttattttttaaagctgtgaggaaatgaaagtgaggctttggttggggcgaggcagttgtgaaagaaattaaaataaaagaccctttgtaaatgcagacttagaagaaatactgaatttgtgtcagaagttctccagtgtttgtgttaatcgtgtggtgataatcctgtcctccttttaaagcgaattctctactgaaaggtctgctctgcttaaggagctacaaactgctctcaaaagaatgaaatactgagttccaattcagtgaggcacagtgttggactatggcacatttagttggagtcggggggaggtcaggaatatgatcagataatggattttataccttagagcaaaatctattagtctctctcagtttatcaatttaaatggctttaggcttatagggggtgtaaactttaagaatataattctcccattcaagtttacagcaaacatctagccaccttcaaaacaaagaatatacagaccatcatttagcaatactaatacatgattttccttggggatggcaggtttgagaatcctttagcaacaggacatacttcccctaaattacagtgaattatttataacgagataaagctttcaggtacaagctgaaggtggggtgtctaacaactaaaaactatcactaaatctcaaagagaaagttcttgcaaaatatgtaaagttcacaaggtgcagacattttccttctttaggcttttatctaaggaagggctatgaaactgggcccatctgtatacaggctcaaatttacgtttttaaaggaagaatctatgcagctgaggcttattgcaggaaatacttcatttgtatgtaaatattattgtaaataaataggaggctgtatatttttgaagttgttgatctgcactgaaatagaagtctctaggatctgcatataaacaataaatgtttcctagaaattagtggttttgtttgggaattagaaaaatttacattctctcccaggtaacatagttctctcaatgtaaacttggaacctgaaaccctacttaatttagagaaagaaatgtctgagaaatagttcccttgatttcttatgctggcattaagatcaattatttaacagatagtcctctgagatacaagtaaggaatatttagacacaaatccttgtcctatagaaacagatatacccaaatgacaaattgtttcttcataatgatcttccatttttaacactgataccactacacagtacatatgaaaacagaagctggggagaagaatgtttttttcacaattgaattgctgcatttctcaaactttgggatctatgaaagcggggagagggaacctgaatattaattatgagcacaaatttgaaggaaagaaaacaaagaaccattatctaatcaagctttgaaagtcctgcatgtttgccttttattttagtgttgacgccaacatagactgtctaaggtatttttttccccaaacacttgaatcttggtcgttggtatgtaatccactctctagagtccagtgtactttagacttcatctgagtccaatacatgtaccacactactgttttattaatgtaaaaaccttgtaaatgaatttcagatgggtgatttaagtgagtcacaagtcacaaaactttgctattcatagttaatcaaatagaactgggttttttttttcagagtgtggtgtaaataaagaaatataagaagttctgttctataactgctctgttaacatagtttttaaacattaaaaaatgtgaactaaaagtatttaaaaa

SEQ ID NO: 6319 - DNA, 385 bp, Homo sapiens
acatgagccaacctcattaaagatgtagataaccctggaaaatgttgtagctacatttggcacaattgtgttttgactccctcttgtttaacagttcttgtcagtcttagtttctctgttttctttcaagggagaatcgtagaagccagagtctctagtgttctcaggattcaaggtcaaatccaagggatcagggagagagaaatgtctacctgtagtgacttgtttctcactgatactagcccagcaaaacaaaaaggagctttctctttaaataattgataggacaagttgtaatctgacagaatgaaatgtgtgcattcagctttgaaaccatgtaaataattcaaaagaatgccacatttagccaatgggaaaaaaaaaa

SEQ ID NO: 6320 - DNA, 640 bp, Homo sapiens; identical to SEQ ID NO: 6036

SEQ ID NO: 6321 - DNA, 606 bp, Homo sapiens; identical to SEQ ID NO: 6037

SEQ ID NO: 6322 - DNA, 628 bp, Homo sapiens; identical to SEQ ID NO: 6038

SEQ ID NO: 6323 - DNA, 640 bp, Homo sapiens; identical to SEQ ID NO: 6036

SEQ ID NO: 6324 - DNA, 513 bp, Homo sapiens; identical to SEQ ID NO: 6040

SEQ ID NO: 6325 - DNA, 612 bp, Homo sapiens; identical to SEQ ID NO: 6041

SEQ ID NO: 6326 - DNA, 462 bp, Homo sapiens
caacgtcaaagggcgaaaaaccgtctatcagggcgatggcccactacgtgaaccatcaccctaatcaagttttttggggtcgaggtgccgtaaagcactaaatcggaaccctaaagggagcccccgatttagagcttgacggggaaagccggcgaacgtggcgagaaaggaagggaagaaagcgaaaggagcgggcgctagggcgctggcaagtgtagcggtcacgctgcgcgtaaccaccacacccgccgcgcttaatgcgccgctacagggcgcgtccattcgccattcaggctgcgcaactgttgggaagggcgatcggtgcgggcctcttcgmtattacgccagctggcgaaagggggatgtgctgcaaggcgattaagttgggtaacgccagggttttcccagtcacgacgttgtaaaacgacggccagtgaattgtaatacgactcactatagggc

SEQ ID NO: 6327 - DNA, 640 bp, Homo sapiens; identical to SEQ ID NO: 6036

SEQ ID NO: 6328 - DNA, 640 bp, Homo sapiens; identical to SEQ ID NO: 6036

SEQ ID NO: 6329 - DNA, 654 bp, Homo sapiens; identical to SEQ ID NO: 6044

SEQ ID NO: 6330 - DNA, 414 bp, Homo sapiens
tgaaccatcaccctaatcaagttttttggggtggaggtgccgtaaagcactaaatcggaaccctaaagggagcccccgatttagagcttgacggggaaagccggcgaacgtggcgagaaaggaagggaagaaagcgaaaggagcgggcgctagggcgctggcaagtgtagcggtcacgctgcgggtaaccaccaccaccgccgcgcttaatgcgccgctacagggcgcgtccattcgccattcaggctgcgcaactgttgggaagggcgatcggtgcgggcctyttcgctattacgccagctggcgaaagggggatgtgctgcaaggcgattaagttgggtaacgccagggttttcccagtcacgacgttgtaaaacgacggccagtgaattgtaatacgactcactatagggc

SEQ ID NO: 6331 - DNA, 647 bp, Homo sapiens; identical to SEQ ID NO: 6045
  SITE (29): n equals a,t,g, or c

SEQ ID NO: 6332 - DNA, 640 bp, Homo sapiens; identical to SEQ ID NO: 6046

SEQ ID NO: 6333 - DNA, 640 bp, Homo sapiens; identical to SEQ ID NO: 6047

SEQ ID NO: 6334 - DNA, 571 bp, Homo sapiens; identical to SEQ ID NO: 6048

SEQ ID NO: 6335 - DNA, 640 bp, Homo sapiens; identical to SEQ ID NO: 6036

SEQ ID NO: 6336 - DNA, 639 bp, Homo sapiens; identical to SEQ ID NO: 6050
  SITE (88): n equals a,t,g, or c

SEQ ID NO: 6337 - DNA, 397 bp, Homo sapiens
atcaagttttttggggtcgaggtgccgtgaagcattaaatcggaaccctaaagggagcccccgatttagagcttgacggggaaagccggcgaacgtggcgagaaaggaagggaagaaagcgaaaggagcggacgttagggcgctggcaagtgtagcggtccgtgcgcgtaaccaccacacacgctgcgcttaatgcgccgctacagggcgcgtccattcgccattcgaggtgcgcaactgttgggaagggcgatcggtgcgggcctcttcgctattacgccagctggcgaaagggggatgtgctgcaaggcgattaagttgggtaacgccagggttttcccagtcacgacgttgtaaaacgacggccagtgaattgtaatacgactcactatagggc

SEQ ID NO: 6338 - DNA, 648 bp, Homo sapiens; identical to SEQ ID NO: 6051

SEQ ID NO: 6339 - DNA, 434 bp, Homo sapiens
gggcgatggccccactaccgtgaaccatcaccctaatcaagttttttggggtcgaggtgccgtaaagcactaaatcggaaccctaaagggagcccccgatttagagcttgacggggaaagccggcgaacgtggcgagaaaggaagggaagaaagcgaaaggagcgggcgctagggcgctggcaagtgtagcggtcacgctgcgcgtaaccaccacacccgccgcgcttaatgcgccgctacagggcgcgtccattcgccattcaggctgcgcaactgttgggaagggcgatcggtgcgggcctcttcgctattacgccagctggcgaaagggggatgtgctgcaaggcgattaagttgggtaacgccagggttttcccagtcacgacgttgtaaaacgacggccagtgaattgtaatacgactcactatagggc

SEQ ID NO: 6340 - DNA, 624 bp, Homo sapiens; identical to SEQ ID NO: 6052

SEQ ID NO: 6341 - DNA, 509 bp, Homo sapiens; identical to SEQ ID NO: 6053

SEQ ID NO: 6342 - DNA, 654 bp, Homo sapiens; identical to SEQ ID NO: 6054

SEQ ID NO: 6343 - DNA, 546 bp, Homo sapiens; identical to SEQ ID NO: 6055
  SITE (20): n equals a,t,g, or c

SEQ ID NO: 6344 - DNA, 654 bp, Homo sapiens; identical to SEQ ID NO: 6044

SEQ ID NO: 6345 - DNA, 1564 bp, Homo sapiens
ttgctgatggagacggtgggctccgacatccgcagctgccccctctgccagctgggtttccctgtcgggtacccggatgatgccctcatcaaacacattgactcccacctggagaacagcaagatctagggcaccagccccacccactggctgtttctccgtcctctcctatcacccccaaacactcactttgaatgctgcatgaatctcgtggggggtccctgcccttgcgacccccagatacctccacttgctaccgagtcaacgtgtgtgccatcttccctggtccaggcaccactcagctctggctcttcctgggaggtcagccgaggctccccccatgctcctggtttctgcttaggaggtggggacttgggctgggatggggacggcatacccctcccaggcctctccctctgcctttctgttcttaatcagggttggatccaagaaggtgtccagtgcttgggcctggggtggggggaaggtgttagaggactccaggagctcctgcacccctccccaaatgtccatctttctcagacggggctctgtctggggagcacccacaggctgcctttggggtcccagagcctgctctgtgcactgaccccagttcctccatcctgtggccagcctagggctcatggcatgggcccccactgggggagggaggcatcttgtttcttgtggttccctgcaggccagtcctgtcctcctttccctgttctgcccactctggggaatagggaggggaggagaggagaggagagggaggatcctggaggactgggaagatctagcctaaagaggcttctctgagggccagggccctacagcatgcccctacggccaggggactgtctgccagcctcccaggcccatgccctcctggtgcccctggcactgaggcacagatcgtcaaggcaggtaccccctcaacccttcttccactggagcccctgacaccacaggtgccctggagcccttgtgtgactcagcctctgttagctgggtgggtgtcatcagcccctgcctcccaggccagaacctgagaacgggcccagggtgctgtggagatcaacttcaaaagagctaaccccttcccacactccacccacccacctacatttcctctgtgaaatctacctcagagttgtaccctcagaaggacgggtaagcaggaggccagggggtccccagggctgaggtggggagccttctacggcgaaagcctgccaccccacaatgaatccaccctgctccactgcgcgcctctcccaggtctcagctctgggtggggagcagtggccgctaccgacagcgcatgtcccgctcttatccaactcttccaggccccacctccctgcacccctcccctctatagagcaggggagtgaaggggtatgtcaggcggggaaggggccaaggacacgtcattgtaccctgagcgtccccagggagtggaaatggggaagggggcctggagaggggaggcaggggcccctgtgctctctgaacaagttgaaagtccaaataaaacttacctgttccatctgtgctc

SEQ ID NO: 6346 - DNA, 1670 bp, Homo sapiens
ggaaatcttttacagtctttatatgtaagatccaggcgggggcagggggaatggcttggtctgttatctgccagggtttaattttgagacatggccgtttcacaactgcagggtgcgggaagattagatgacctgaatgctggtggtaagtaaagcctcacacttcacattattccttaattgtctgtttttaaaaatttgtcttaaaaaaatattaaggtggcaacatattcaggtggcaacagagggtggggtgaccagtgacaaactgacttccatgtctctggctaatcttgatttctggagccaggctccagactaagtctggacaatcaattaattagcctttctatatgtattgcctgatgaatgatttcaatgctggacattgaacaatggtctgttgcaacagggtgaggccattgtctctggcaggtggggagatgggggctcttgttagctccatttgattacaagagccttgaatcaccaaaacataaagatgtactcgaatagaagagtccgttgtctgactggtaaatttaaggatgtgtttgaccctcgtgcattaaaacagacaattggccgggtgcggtggctcacgcctgtaatcccagcactttgggaggctgaggcaggcagatcacaaagtcaggagatccagaccatcctggctaacacggtgaaaccccatctctactaaaaatacaaaaaattagccaggcgtggtggcgggcgcctgtagtcccagccactcgggaggctgggacaggagaatggcgtgaactcgggaagcggagtttgcaatgagccgagttggcgccactgcactccaatctgggcaacagagcgagactctgtctcaaagaaacaaacaaacaaacaaacaaaaccagacaattgaggcggccagctgcatttcataattcctcccataagcttcctcctatttgccacttgtttagcaatggaaatggagaacgaagatggcctcaaagtgactacatcaccagtgttacaaaaatgggccagaatttaaggcaagaattatatgtttcttaatagagggatgtttctctgtgtgtggctacttgtattcctgtggatttttaccagattataagagctgctaatttctgatcagaacagagaccaaaaattggagatatggatgtggggatgattcttttgggtaccgatagactgcaggaatcgcagggcttcctttaaatccattacagcttataggctagtggatgaataagataagtggagattttctcttgaaatatttccttctatgaagaaaaggccttgaaatgtgcatcctctttgggttgactaatttctatgcctttacagctttaagctgacattataagattattctagtttggatcttgtaagataattaacaaaatggaaataaaatgttttgtttttaaaaatgctaataaattatttattttcctttgtcttagttagttttaatacatattcagtgcttaaagaacaccagtgcaggaaaactcaaactaaatggcatcatcccccatctctataattctatatgcagtagccattcatgcgaagttagaaattagaatttatagcactaagcattctaagaaaaattaagccagtacgtttatctcttgaaaaaaaaaaaa

SEQ ID NO: 6347 - DNA, 266 bp, Homo sapiens
tcacgcctgtaatcccagcactttgggaggccgaggcaggtgaatcacaaggtcaggagttcgagaccagcctggccaacatggcgaaacctcgtctctactaaaaacacaaaaaattagctgggtgtggtggcaggtgcctgtaatcccagctacttgggaagctgaggcaggagaatctcttgaacctgggagggggaggttgcagtgagctgagatctcaccactgcattccagcctgggtgacagtgcaagactccgtctca

SEQ ID NO: 6348 - DNA, 15789 bp, Homo sapiens
gcagaatgcaaggggcggcctcgctcccctggccaccgcgggggtcgcggcctcccattacatagcgcgtgtctcgagccctggcctgctctcggcaccgccacaacgggcgtaatatggccgctggtgccgggacctgccgggcgcgcggagggtcgggccgaggtccgggatccggaactgctcccggcattcctcgcgagtgtatggcgtgggctcccttccccctctgtgggtcccgcgaggagactctcgggctttgaggtgagacctgaagttccgctggccggtagtgtagcaggaaagggcaggtcctcccgggtcgtgagccagtagcctcctggggtggcaaggtgtagagaggggggcgttgaaaggacacccgctacccggcctgctttctaggggtctctttggattgaggacatcagcagcagtggaagggattttactggagacctgtcactgtcagagccttaaaatatcaccgacggggccttaatgtcaccgaggtagagagaaaaggcagtagccctagagactattgcgacacagtgtgcccctcataagtttttccagggaggggttctgtactgagttgacgccccaggagctgagcaccaggctttgcatccttgggaactcagcaaacgtttgttcagccaattgcaggtagcatggcccagggcttgattgaggtggagcgaaagttccttccagggcctggcacagaggagcggctgcaggagttggggggcaccctggagtaccgggtcaccttccgagacacctactatgacacccctgagctgagcctcatgcaggctgaccactggctgcgacgacgagaggatagtggatgggagctcaaatgtcctggagcagcaggtgtcttaggaccccacacggagtataaggaactcacagcggaacctacaattgtggcccaactctgtaaggtgctgcgggctgacggcctgggggctggagatgtggctgctgtgctgggcccactggggctgcaggaagtagctagttttgtgactaagcggagtgcctggaagctggtgctcttgggagctgatgaagaggagccacagctcagggtggacttggatacagccgactttggctacgctgtgggtgaggtagaggccctggtgcatgaggaggctgaagtaccaactgccctagagaagatccacaggctcagcagcatgcttggtgagggagacaggcccttttgtgcttttcctgctccccacttttctcttttggaggcacctgctggaccatgcagtgggggagggcctccggattaaaaattttttttttaatagagacaaggttttgccgtgttgcccaggctggtctggaactcctggactcaagcaatttgcctgcctcggccttccaaagtgctgggattacaggtgtgagcctctgtgcctggcctggattatttttgtaatgggaattgttttagcaattttctaagtttgcttacagttctgtgaaatctcgttttctctttaacagtagctaatttggatctagtccttccacgtgtctaattccagccaacctgcctcatttagttctcatacctatagccagatctccttcagtttcatttctcagttccctgctttgactcttccttcccccaatctcttttttttcttcttcttcagtcaccactcctccacaaggagtaaaaagtaagcctttttacaaaagctgccctctgggaggctcagacccaggatcttcagatcatgagactgatgcactgcccactacactgagagtccaaccagtcttgtccttttgttttacaattacctagatccttttaatttgtccttttggctttttgtaaaggacaataacattatagttatgtgagacagtggggcatgatttggcagatttgttcctaagcataattcccttgtagacagttcatccacactaggaattgtgcatcccatggggccttacagccctgcagtgctgtttgagccccctcagcaaacatacactgagttccttgctatgtgcccagcatgctgccaggcactaacaacaagacactggcaacaggcagttccattctcacctcaccatgtagaggcgagaattctatgtgaatcccaccccatggctatagcttccctcctcttctttctatagctcttggtttctatgtgtacatctctgcatgtgcttcattactaagctaatgagctttggcctggtctagggctttaatcttgattgcggaacagggtaataactgaaatgagctgacgctgaggcatccttcgtttatcttggtgcctgggtgcctcttcgccatttctccttgctggaggagagaggctgaggtgtggcttctagtcccactcttgcctgaagttgctcttttaggtcccacttccacaggcaggcagggagtggactagtgtgttacagaagctgggtgggtgacattcagaaccccagtgtggctttggaaacatccacggagtcctggctaggtgggcagggagcagagtccaagtgcttgtggctctgtccatttctctcctcattgtccttttacctgtaggtgtgcctgcacaggagacagcaccagccaagctgattgtgtatctacagcgtttccggcctcaagactatcagcgcctgctagaagtgaacagctccagagagaggccacaggagactgaagatcctgaccactgcctgggctaggggtgtcacttcctagaaggggaagggaactctgggtctaacggagtccactcctgggcccactgtgcctctcccctcagtgtcccttctgacagtgactcctctctctccagcgctgcctgtttcttccccctcctctaagctactcttccttgagccctccctggctgcttcctctcgctcatccgtcagatgcaatctgtgggccgcccctctcccctggccgctaagcagcctccattgatttccgctcgtgtttataggatttccacttagccgtgatcagtagttaagcacaggaaaatcccttgccaccccccctcccttggtcgatgccattgattctgccagcggctcctaaaccgccttacagctgagttagaagatgaggagaggcagcagggatttccctgccttgggatgtgggaaacagaagaaaagttgaggaaatggttgggaatcgctgttagaactctagaaattctaatctgactttgccactgtgcccagctctggcccagagggtagagtgcctcctgtggaagtttaggggcaaatttgttccctgacctggagagggttagaaagaaccaacagctgccccctccccgcccccgtgttgagacaggttctcaaggctcaggggaagatgcatacctcctatgtaagaatgctcttcccttgctgttattcatacacactttccacttcaaatatacccaaatatggctttcctcacttctcaggctttattgggctttatttgtgggagaagggggctggtccccagtttttgcagtgcaaagccagagcgccacctgctggtagccctcaggtgtaggttcgaagctgctggggccccctggggtttgggacacaggagaatttcaggctgtgagtggagacagttactgccacgattccacaggcaagttgttcacctcaaagatctcctgcaccgactggtgaaagtggtcgtaggtgaggcgcagctttagccgcaggggggcctaggaataggagagcagggaccagggttagcacccacggcttcttctatccctgggtcttgtcttgggggaactcctgaagctcaccttgttaggattgaggattctgaagagctgggtgataggaaggccaccccgagctggaactgtgttcccactgggggcctgcagctgcagctggagactctgaacacaggagtttaacagagcacagtatggcagtaggtagggctcaggcagcccctctatactcagtggctccacacccttttcctgtaactccccaagtgctgatctccagatgactcaatcccatctcacactgtctcccacccacctcctccacttagtggccttttctcctggagtccccaggccacctctgaactctgatctttacaaaccttgggcacagcagcctggcagatgaaatgggtgacatcaccctctgagaagttggtggcagtgatggtgattaacagcaaagcagggttttcagggggtcgaatgaaagacagattcagctgtactccctcacgctcaaacactttgagatctgggatgggagctggagtagggagacagaagcagctcagtgtgcaggtttgagagaacatgtttgttcattcattcaacaaaaattgagtaaacacctactggccctgcactactcgaaaggctagtaacaaagtagacatgtagatgaggatggagcttactgtctaatgggggagagaaacaataaaaaaaggccgggcgtgagccagtaatcccagcactttgggaggctgaggtgggtggatcacctgaggcccggacttgggaggctgagacacaagaacagcttgaacccgggaggcagaggttgcagtgagccgagatcacgccactgcactccagcctgggtgacagagcaagacgctgtctcaaaaaaaaaaaaaaaaaaaaaaaaaaaaaggcaagataattacagaccataatagatgctatgaaggaagtaagtcatgccagaataactggggagaactgacttaaataggagtggtaggggaaggcatctgacattttagctgaagcctgaagagtgagaatgagctggtcatttgatgtgctggggaaagaacattccatgtaaaaaagaacatgaaatgccaagggtgggagggtgtgaggagctgagaagggggcagtgagtgggtagtgggaaagtggtataagaagggttggggaggaagcagggccctgtaggccagggaaagaagtctggaacaaagggaagacagatgaccatgattgacttcattcttttacctcctgagatggcgatgggatgggggacacacaggaagaagcagggtccatgagcctcagcccttggcttaggaggaggagcagtacatttccacctaccttctctaagacatcttccctttgcttaggcttacctgggggtggaggtacacagggaaggtcaagcaggtgtaccagggcacctcctggggaggggtccagatggggaggatgctggacatccccagaagccccatccaggagatctagcagatccaggagctgtgaggcctggcagaagggacagaaggggcagggctgggtatgaagctcagcccgtcttcctaccccagagtttctagccttctcacctggggctctgtgggcactggggctgcttctgaaagctgggctgcttctttgctttcctttgcttcctcatcagcctgagggccatctcgctccacaagaggcattttttccaggatggcagccctgagaggatggaatgcaagtgtgcctctgtgtggtctctgggcctttcacaagaggcatctaggatgaggactaggaatatggagccctgggcacatggtggctcagaagtacccttctgatttcctaaaatgacatgttgttgctgattttcagatgaacaaggagggttggaagccagcttagcttcaattaacagtgggtgggaagctctcaccgtggatatggaagaacacaggtgaggatgaggcccttgtacctagaaaagggcatttgggagagggcaggggtttgggtcccatgctgcagcacagtgctggacacacctcatgtggtcgtatttccggaagagtgtgtcatactccacagcccgctgctgcagctccacgtccaagcagctcccgtagatggacaccacctggcggatgcggctgggccagtgtagtatgtaagtggctatggcagtgtgccactgcaggatgtggcaagaaggaaaggcccacggagcagggaaatacccagatttggctcaaaaacaagaacctaagggctagggggtagggagggctgggcatgtatgcctggaaagaaactcaaaaatgggtggacccagtgacaggccatctctcaaggggctgggaccccttcttacttgttgtccccacagaggcgagtgctgagcttcatgagggctgtgagggcatatcctcgagtggctggcagggacatgtgggactgcagcaccttttccagcaatgccagcacttcctcttcgtccaccttcagacatggatacagttagtggccctggtgcaagtcctgtccccctgacaagtccctcctcagtgtacccccaatgaggtctcacctgaaggggctcaatctcctcgcagttccctgccagcaggaggtccccatactccccaatgcaccaggctgccacctgcaccagtggttgctacatgggataagaaactgctgggctggccaggcatggtggctcaagcctgtaatcccagcgcattgggaggctgaggcgggaggattgcttgagaccaggagttcaagaccagcctgggcaacaaagcgagaccccccccatctctattttaaaaaaaaaaagagagagagagaaagaaagaaacactgctgggccagtgtctgaggtcccctcctcacttccagacctggcaatatccctttaggcagtgcagagatggtggggggttggaggagtggggaaagggaagtttgttacctggctcccactgccctctggtggccaagcatcagaactacatggcctaaccaaacaggatggaaatgtgagagggtccctcccttgtggaaggggtggatgatgctttctgcccaccctatttaattaagatggaaaagggggctatagatactggctggcatctgttaattcattcagcattcaaggtaataataaaacctcataaacacaagagctttaatctcaaggcagctctaagaggcagtcagggtacatggagcataagggaagttagtcatctgtagttacataaccaggaggtaccagagtcaggacaaaagcccagatgttcttaaaaacagggctctgtgctcagatgtcttctgcactgtgtaagcagctgtgaccttgagagaaaaattggaatctagtagggaggaggtggcccaggatgggcaagggagtggttgggcagccctgggcctaggtaggtgggaatggtacctgggaaatgtcttctgccagggcattgtagaggcggcgcacagagtaggcatgtagctcctgggcccccccaatcagctgggtcaggttggccactgcatcatcccgcacatgggtgcccgcctggaaggtgtgggcatggccaagtcagtgtggtgaatcttgaccacttctgcccagctctctgactggcccctgcctcaccgttgtcagcacatgcaggatggtgtctatgtgccagcgtttggttggagcaaacctaggggatatatggctcatcagtcctggtactgacgctccccagattctaccctcttcgactcctgggcacctcacctctctgcagccagcaggatgcctgaggcacagtcagcccgtaggtcaggagggcaggactccagaaaggcctgcagctcttgcatcatggctcgcacattggagctatttaccagagccaggcttagttccagggctctcctggcaggagaaagaggtttccatgcaggtagcccaggtcatcctggtccatgcctcaggccctctgcttccccagggacctgtcccccttagtccccttactccagctgctctaaactggctcgagtcttggccacagggcactgggaacctctgccctgccctcctgtcccctctatcactgctcaccggctgagggaggcatcagtttcccgtagacattccaccacagtgggccgatgccgctgcacagcactgtgatcagactgcaccagtcgaagcagtgatgtcagggctacatacctggtcaggatgggggaggttctatcataccatggccatcagcccccactccccgtcctgtcctgggtatagggataagataagagagaaatggatcaggaggctctggaggaaggagggcagagggccaggggatcagtggcacagcctaggtagacagttgggactattacctaatgttcctgtcactgttgagtaggaagcgaccaagaatgttgacagctagaacctatgagaggcagaagttggggtcagtcggaaaggagcaacctgctcagccattgaggactgggaacacattggcgcaagatgatggggctaggagggagaaaccagcaagcaggacctgtgtgggtgaggtggtgggcggggccgtagtgggagaggcataaggggtgatacccgtaggccagctgcagagcggatatccatgatggtgagtactgtctcaaacaggaccgcatttccggcatttcggctggtgtccgtgttagtggccacctgagtggatgagagaggagatgtatctgctcaaggccctcctcaggtctcctttttttgatacagggtctcactctgtcgcccaaagctcactgcagccttgacctcccaggctctgatgatcctcctgcctcagcctcctgagtggctgggactacaggcacatgccaacaagcccaggtaatcctcaggattcttgaaggactccaacatgttatctgtccatccttcaaccatccaacaaagttccctgaggctctactatgtgccagggccagcctgggcactggggcaatagcactaagacagactgtgtcccttcttcatggagttcactgtctagaggagatggagaggcaattacacggccactgcacagtgacgagtcatgtgaggggcacccagggctgatggggtctccaagcaacacagctaaccagtgccctcccaggccccacctgggccagcaagtcattcatggtctcactgctctcctcgtggttccggcccaggatccgaagcagacgaagtatctggacctgaggttgggttgaaaatggaaagttggaggggttcataggataaggagtcgtggggctgaggagaaaactccaacatgtgagggtctggctcgctccctagagccttcccccacctcctcacctccacaggtcccttggtcctaggaggggaacagaggtgtgtgaggccaggggagtttaggacaggcttaaaaaaaaaattgttaacaaactgtattttcctgacttttaggcattccctctcccctcacaggtcctgggatgacccgagcaatcctgtgcctgctactctgctgcccaggacactgagagaaccagtgttctctgggaggaaaccactggtcatggtcttactgctatgccctctctgatccagggatacagcagtgaaaggtcaccccacctgcaggaaggggtcgctgactccagatatgctgtgttctgtggagtatcccattgtcaccagagtccggaggatgtgtaccagctggggtaccacctggagggagggcacaactttgggcattcgttctaatcctctccagctaaagccccattccttccccactgaccctgtcttccaggcccagggcctgccccttcaccagcccacctttcggaagtgcctgagggctgcagggcttcgttcgcagagctccgtgatcagcgtgatggtgcccagcaggatgcctggggtcagcgtcggggaagtgaatggtgggggccaggggcaagagagtctattgcgtgtgtgcctgtgtgtgtgcactacccttctcctgtgagctggggttcccatccgattttcaattcttctgtccatagacctgaagcaaaggatggggggccccacagccttaccatggtgacgctcatgaagcagttgggcacagggtgggaggaagacactggagagttcagggaccttccggatcatgtgcactgcagtcagaatagcctgcagaggtcaggggcctcagacaggggtcagaggagatggacccctgcatctactactatatagcacgcagcaggcagtgtgcaggagcacgtgccaggagtcccgccatctcaccttcttgcgcacgtagggactgggctgcaggagcagtttctccacctctggggccaggtctcggcacatctcagcagagcccatggtgctcaaagtgcacaaggccaggccttgtactggctgaatcccctggctcaggtcactgcagggtttgggaggacggtcagtcaaacctctgagaaaatcagtccttttcaatacccacaacaggcagtcccctgggatttccaaggtccctactctcccatctccctgattccaagtgattgccagaaccctctcacttcttgatgctgttggtaatgagcaggtgggcatcgtgcctctcatccaatagaagcatggcccccaggtagcccaccctcttgtctgtgaatctggaggaggcgatcagtttcaggcactccatctatagtgaagggggcagaccaggaagaggcaggggtgaaaccatagacactcacatccctgttccatcttcctctttaaaaccagattaacctgtggggcatcatatctcatcactctcccttcaacaagaggagaagcttaggaaattcaggcgttagtgggtaggaggaactaggagttgaggaggatgggagcggagaggaggagatgcctgccctaaaggaggctggccagagaatgaagggttcaggccagctgatgaccagtaggggtagcaatggggaaagaggtttgcagtgcaggctgtgaagactctgaaattgtagaatttaaaaaaccagggcataaacaggtgagagagtctgggactctgccccactagccttcatcaagctcaggagggaggtattcctggccagtacctgtccaaagtgggcggggtagcccaacatgtggacgtagagcagtttggccagctgccggtgcctgtgcactgggtccccgtcgcggaaggaggcccggatgtgggcacactccttttggatcacctcccgctcctgggcctgagtcttggccccgcgaatctcttcgatgaggtcctgaagcttcagcgaaggcaccaccatcctgactggcagagtccgggagtggagaaacactctctggtcgggcgtgcctgggctttcggcccaggcccgtcctgtgtcaagaccctaagagcccgggtcccacaggtaccctaaaattgcgcccgcattttacctttcccgaagtgggtctccaaattccgcgcccaccccaccgcccgagaagcccactacgcatgcgtccgcaccccaccggcgccccttcctattgagcatgcgcgggagccccacctatttctctctaccgtttcctccccctacctggtaccccatccctagctcagccattgcttttttttccacgaccctccgctgtttcttccgcgagcttcctcccccgatttccatctcaggcagcggcagcggcagcgacagcctgcctaccccaggactccagcctcacctggcttctgcctcaactccgctcctctgccccccagcgcttcctggtacggggccgagcaggggttggtgctccgtgcggtccttccctctccccgcctccaccacgggaccccgccctcctgggccgactgcagagccttcctgaatcctctgacctcgggcctcaggctttagcggagagacagcatgataggcctggagttcttcaagaggcctcctcgcacatccttaccacccggagagcctcagtttggatttgaagccatcgcaccccaaaggagatgacaatccccccccttttttgaacttttttattaatatattttttttgttaaatttctttgtatttttttcctgcaagacttggtgttggcggcactgttgtagtttaacttcaatcccaaattccatgaaatagaaatcagaagtaaaggttgagaggggaggaaggagggaggcaagccaaggaataaacaagagtttgactagaaaaaaagaagagggtatgtgtggtgggcattcctgggcaaggccattccttgagggagggggttggcaggcagcttgcctctgcctcatgcaggggagggaggaaagatcccctggggaccctgcagtcccctcttcctagggcttcctgctcccaggggaaaaactaataccagagagggatcagccacaacctcaaacagggctctccacccacctgtcacccgggtttgactcccacctctgccctgcctgggaagcatgtgagatcagctatctttgatcccctccttctgttgttttcccatttcacaagattctgatgtaaagggggaagggatataacccattttgggactactaaacttgtcacagcttctgcttccatgtgagctcctgttatcttgtctggtcctatcccccagaagtgcctcctcccaccacaactcccagagttgggatgtgggggccttgctcaagtgcctctaaccctctgcagtagaaatgtcttcttcaggccccttaggaatttaatcaaaggccacaagtgagtccagaccaaccaaataaactattatgggggagacagaagggtgggagaagtcagtggcaaagtctgggcagggtggacttgactgcattggatattctctgttcctttacacgttgctcttggcatggcatgccaccagagggggctggaggaggggctggccgatgaggagaaaaagagggaaatgctggggagttactctacttttcacttcccttctctccttcagggaaggatggaattgggcagtaacccagctcagtgcttggaggtaagataatagcctccaagattagaggtggaggatgcacctcctgcagctttttcactaggcctcagagggacagcaggccccttaggctagggagccacagcagctcagccagtgccttgcccgacattcaatcactccttcttcattttcttcctcctctccattcagcttccaggagtctccttaggacaccaaacccccacccgcagcgaagttgaggtctaaagaaaaggtgggagggcgtggagcaatggtctgacttagatttgtgtgtctcagagaagacagcaactctgagagagaaaagcccttcatatgtaaacaatctagagaaagaaggggttgggatggggaagggagtgaggaatacagagacagatccagaagaaatgagataatctgaaagaagacagggaaagaaaaagcgagagaaaaaaacaaaggagcacagaaaagaaaggaagaagagaaagaaagataggagaaaacacagccaggaagaggagaagagaaaaaaggcaggtcaaaggggtgaagaggcacgcaaccaaagccagaaccaggccaggaagtagcctcaggtgaggagctgggagaacaggaatgccaggctgaggtccaggagggccacggctcccaccaccagggggttggcagctccctagagagacagagggggaagcagactcagtccccgaggacagggcccaccttcctgccctgactgaggtggcagagctgaagggtctcaggcacctccctgcacagcctggagcagggggatcgccaacatttgttttggattgcaaaaccccctcttctcccaggcagggccccacctttcctctgacaccttcaatgcagggacagcccttccacctcctccctctagtcccctcccatcagcatatcatgtgtcccaggcaggaggtgcctggccttagtagcagacattggcagcagcagccagtactgcagtaaggcagagggatgaaggggtgaggatgtggttgctaggaaacagaaggcctagagcccaatcagagtagagggttctgggcaaactccgcctctcccggttttctgccttcttctctatttcaacttcttcccgggagagggagggagagtcagggtagggagggaacaatcttttccttttttatttctgggcaccaaagagagaaagtgcggaggtgggggtgggggtggagtaggaaactgagagctggaaatgatatggaaggagaacgggggaaaaatgttctggctctcccattaattattagtttacaaccctgggcaagttacttttttttttttttttttttttgagacagagtctcgctctgtcacccaggctagagtgcagtggcgcgatctcagctcactgcaggctccgcctcccgggttcacgccattctcctgcctcagcctcccaagtagctgggactacaggcgcccgccaccacgcccggctaaattttttttgtatttttagtagagacggggtttcactgtattagccaggatggtctcgatctcctgacctcgtgatccgcccacttcggcctcccaaagtgttgggattacaggcgtgagccaccgcgcccggcctgggcaagttactttaagtgctctgggcctcagttcccccatctgtcaaatgagggagttgggcttgcaggtgtgtaaggttccttccagctcgaacgccctctatttttttgaggtgggatgtggtccaagactggccaggcagaggaagccgagtgagataaaaagcccccccggtgatcagacagttctggaaagggtgggaggcaaggctttgggagaagagggcacacagcagggacagaggatctcaccggctgggcaggcctctcggttgcagcgggctccccgagctcttctgtcaggcacccagcatcaggacccctcgaggacgagcccctcaggaccagcatggcgatgggctcaggctccgtgcctgctggggccctcagcgggggcaggggctcttcatcctccccctcctcctctcgaagacttcctgaactgtcgctgcagcctccgaggagtggggaaccgtctctgggccctggcccttgcatcccagcctcatcctcagcctcatagccagctagttcctctgcctgtgcgcctgcccccccccactcctcaggccaagctttggggctggagaagggaccctggtcccctccaggaggcagtgggctccggcaggcagggggtcgccagggttggcgggaggaggcaggactgctgggcagttcaggggatccctctgagggggtcagtccgttctcatataccccagggctgtcctcatccaggggctccgtgtcggaaccttctgagtcctgcctgggtctgcggcctgggtagggatagctgagaatcagaggggcctaactggccttgggctggagtggctgcagctttattcctgactgggcacttcccaggactttggaattcccaggctcatagcctctcaccgccagaccccaaaccccccattatcctactgcatacattcccaagtcccactccccagactaccaggtctggcccccaccctgtgttccttgcaccctcattccttgttttttcccatccccacttcccttgcagggcttctcatctgtttccccacacctgagcctctctagctccctaggggcctcactgccctccccccagctgtccatgcctcacctggggcctctagcatgggctgcaggtcctgggctatcagtttggccattcgagctgcctccacggcc

SEQ ID NO: 6349 - DNA, 6752 bp, Homo sapiens
ccacctgggccagcaagtcattcatggtctcactgctctcctcgtggttccggcccaggatccgaagcagacgaagtatctggacctgaggttgggttgaaaatggaaagttggaggggttcataggataaggagtcgtggggctgaggagaaaactccaacatgtgagggtctggctcgctccctagagccttcccccacctcctcacctccacaggtcccttggtcctaggaggggaacagaggtgtgtgaggccaggggagtttaggacaggcttaaaaaaaaaattgttaacaaactgtattttcctgacttttaggcattccctctcccctcacaggtcctgggatgacccgagcaatcctgtgcctgctactctgctgcccaggacactgagagaaccagtgttctctgggaggaaaccactggtcatggtcttactgctatgccctctctgatccagggatacagcagtgaaaggtcaccccacctgcaggaaggggtcgctgactccagatatgctgtgttctgtggagtatcccattgtcaccagagtccggaggatgtgtaccagctggggtaccacctggagggagggcacaactttgggcattcgttctaatcctctccagctaaagccccattccttccccactgaccctgtcttccaggcccagggcctgccccttcaccagcccacctttcggaagtgcctgagggctgcagggcttcgttcgcagagctccgtgatcagcgtgatggtgcccagcaggatgcctggggtcagcgtcggggaagtgaatggtgggggccaggggcaagagagtctattgcgtgtgtgcctgtgtgtgtgcactacccttctcctgtgagctggggttcccatccgattttcaattcttctgtccatagacctgaagcaaaggatggggggccccacagccttaccatggtgacgctcatgaagcagttgggcacagggtgggaggaagacactggagagttcagggaccttccggatcatgtgcactgcagtcagaatagcctgcagaggtcaggggcctcagacaggggtcagaggagatggacccctgcatctactactatatagcacgcagcaggcagtgtgcaggagcacgtgccaggagtcccgccatctcaccttcttgcgcacgtagggactgggctgcaggagcagtttctccacctctggggccaggtctcggcacatctcagcagagcccatggtgctcaaagtgcacaaggccaggccttgtactggctgaatcccctggctcaggtcactgcagggtttgggaggacggtcagtcaaacctctgagaaaatcagtccttttcaatacccacaacaggcagtcccctgggatttccaaggtccctactctcccatctccctgattccaagtgattgccagaaccctctcacttcttgatgctgttggtaatgagcaggtgggcatcgtgcctctcatccaatagaagcatggcccccaggtagcccaccctcttgtctgtgaatctggaggaggcgatcagtttcaggcactccatctatagtgaagggggcagaccaggaagaggcaggggtgaaaccatagacactcacatccctgttccatcttcctctttaaaaccagattaacctgtggggcatcatatctcatcactctcccttcaacaagaggagaagcttaggaaattcaggcgttagtgggtaggaggaactaggagttgaggaggatgggagcggagaggaggagatgcctgccctaaaggaggctggccagagaatgaagggttcaggccagctgatgaccagtaggggtagcaatggggaaagaggtttgcagtgcaggctgtgaagactctgaaattgtagaatttaaaaaaccagggcataaacaggtgagagagtctgggactctgccccactagccttcatcaagctcaggagggaggtattcctggccagtacctgtccaaagtgggcggggtagcccaacatgtggacgtagagcagtttggccagctgccggtgcctgtgcactgggtccccgtcgcggaaggaggcccggatgtgggcacactccttttggatcacctcccgctcctgggcctgagtcttggccccgcgaatctcttcgatgaggtcctgaagcttcagcgaaggcaccaccatcctgactggcagagtccgggagtggagaaacactctctggtcgggcgtgctgggctttcggcccaggcccgtcctgtgtcaagaccctaagagcccgggtcccacaggtaccctaaaattgcgcccgcattttacctttcccgaagtgggtctccaaattccgcgcccaccccaccgcccgagaagcccactacgcatgcgtccgcaccccaccggcgccccttcctattgagcatgcgcgggagcccccacctatttctctctaccgtttcctccccctacctggtaccccatccctagctcagccattgcttttttttccacgaccctccgctgtttcttccgcgagcttcctcccccgatttccatctcaggcagcggcagcggcagcgacagcctgcctaccccaggactccagcctcacctggcttctgcctcaactccgctcctctgccccccagcgcttcctggtacggggccgagcaggggttggtgctccgtgcggtccttccctctccccgcctccaccacgggaccccgccctcctgggccgactgcagagccttcctgaatcctctgacctcgggcctcaggctttagcggagagacagcatgataggcctggagttcttcaagaggcctcctcgcacatccttaccacccggagagcctcagtttggatttgaagccatcgcaccccaaaggagatgacaatccccccccttttttgaacttttttattaatatattttttttgttaaatttctttgtatttttttcctgcaagacttggtgttggcggcactgttgtagtttaacttcaatcccaaattccatgaaatagaaatcagaagtaaaggttgagaggggaggaaggagggaggcaagccaaggaataaacaagagtttgactagaaaaaaagaagagggtatgtgtggtgggcattcctgggcaaggccattccttgagggagggggttggcaggcagcttgcctctgcctcatgcaggggagggaggaaagatcccctgggaccctgcagtcccctcttcctagggcttcctgctcccaggggaaaaactaataccagagagggatcagccacaacctcaaacagggctctccacccacctgtcacccgggtttgactcccacctctgccctgcctgggaagcatgtgagatcagctatctttgatcccctccttctgttgttttcccatttcacaagattctgatgtaaagggggaagggatataacccattttgggactactaaacttgtcacagcttctgcttccatgtgagctcctgttatcttgtctggtcctatcccccagaagtgcctcctcccaccacaactcccagagttgggatgtgggggccttgctcaagtgcctctaaccctctgcagtagaaatgtcttcttcaggccccttaggaatttaatcaaaggccacaagtgagtccagaccaaccaaataaactattatgggggagacagaagggtgggagaagtcagtggcaaagtctgggcagggtggacttgactgcattggatattctctgttcctttacacgttgctcttggcatggcatgccaccagagggggctggaggaggggctggccgatgaggagaaaaagagggaaatgctggggagttactctacttttcacttcccttctctccttcagggaaggatggaattgggcagtaacccagctcagtgcttggaggtaagataatagcctccaagattagaggtggaggatgcacctcctgcagctttttcactaggcctcagagggacagcaggccccttaggctagggagccacagcagctcagccagtgccttgcccgacattcaatcactccttcttcattttcttcctcctctccattcagcttccaggagtctccttaggacaccaaacccccacccgcagcgaagttgaggtctaaagaaaaggtgggagggcgtggagcaatggtctgacttagatttgtgtgtctcagagaagacagcaactctgagagagaaaagcccttcatatgtaaacaatctagagaaagaaggggttgggatggggaagggagtgaggaatacagagacagatccagaagaaatgagataatctgaaagaagacagggaaagaaaaagcgagagaaaaaaacaaaggagcacagaaaagaaaggaagaagagaaagaaagataggagaaaacacagccaggaagaggagaagagaaaaaaggcaggtcaaaggggtgaagaggcacgcaaccaaagccagaaccaggccaggaagtagcctcaggtgaggagctgggagaacaggaatgccaggctgaggtccaggagggccacggctcccaccaccagggggttggcagctccctagagagacagagggggaagcagactcagtccccgaggacagggcccaccttcctgccctgactgaggtggcagagctgaagggtctcaggcacctccctgcacagcctggagcagggggatcgccaacatttgttttggattgcaaaaccccctcttctcccagcagggccccacctttcctctgacaccttcaatgcagggacagcccttccacctcctccctctagtcccctcccatcagcatatcatgtgtcccaggcaggaggtaccttgccttaatagcagacattggcagcagcagccagtactgcaataaggcagagggatgaaggggtgaggatgtggttgctaggaaacagaaggcctagagcccaatcagagtagagggttctgggcaaactccgcctctcccggttttctgccttcttctctatttcaacttcttcccgggagagggagggagagtcagggtagggagggaacaatcttttccttttttatttctgggcaccaaagagagaaagtgcggaggtgggggtgggggtggagtaggaaactgagagctggaaatgatatggaaggagaacgggggaaaaatgttctggctctcccattaattattagtttacaaccctgggcaagttacttttttttttttttttttttttgagacagagtctcgctctgtcacccaggctagagtgcagtggcgcgatctcagctcactgcaggctccgcctcccgggttcacgccattctcctgcctcagcctcccaagtagctgggactacaggcgcccgccaccacgcccggctaaattttttttgtatttttagtagagacggggtttcactgtattagccaggatggtctcgatctcctgacctcgtgatccgcccacttcggcctcccaaagtgttgggattacaggcgtgagccaccgcgcccggcctgggcaagttactttaagtgctctgggcctcagttcccccatctgtcaaatgagggagttgggcttgcaggtgtgtaaggttccttccagctcgaacgccctctatttttttgaggtgggatgtggtccaagactggccaggcagaggaagccgagtgagataaaaagccccccggtgatcagacagttctggaaagggtgggaggcaaggctttgggagaagagggcacacagcagggacagaggatctcaccggctgagcaggcctctcggttgcagcgggctccccgagctcttctgtcaggcacccagcatcaggacccctcgaggacgagcccctcaggaccagcatggcgatgggctcaggctccgtgcctgctggggcactcagcgggggcaggggctcttcatcctccccctcctcctctcgaagacttcctgaactgtcgctgcagcctccgaggagtggggaaccgtctctgggccctggcccttgcatcccagcctcatcctcagcctcatagccagctagttcctctgcctgtgcgcctgcccccccccactcctcaggccaagctttggggctggagaacggaccctggtcccctccaggaggcagtgggctccggcaggcagggggtcgccagggttggcgggaggaggcaggactgctgggcagttcaggggatccctctgagggggtcagtccgttctcatataccccagggctgtcctcatccaggggctccgtgtcggaaccttctgagtcctgcctgggtctgcggcctgggtagggatagctgagaatcagaggggcctaactggccttgggctggagtggctgcagctttattcctgactgggcacttcccaggactttggaattcccaggctcatagcctctcaccgccagaccccaaaccccccattatcctactgcatacattcccaagtcccactccccagactaccaggtctggcccccaccctgtgttccttgcaccctcattccttgttttttcccatccccacttcccttgcagggcttctcatctgtttccccacacctgagcctctctagctccctaggggcctcactgccctccccccagctgtccatgcctcacctggggcctctagcatgggctgcaggtcctgggctatcagtttggccattcgagctgcctccacggcc

SEQ ID NO: 6350 - DNA, 410 bp, Homo sapiens
ttttttttttgtagaaacagggtcttcctatgttgcccaggctggtctcaaactcctggcctcaaatgatcctcctgcctcgacctcccaaagtgctaggattacaagtgtgagtcaacacacctggccaaaatgccatgtctttaaaccagtgtccttctccctataatacctctcactggtcatgtatttccagaaacatactggtgagagggcaggtgttgagaacatggcacttctcacccatcataggaaggagtccaggagttaagagccacggttcctcagggagcttcctcacatggaaggtcagacatatagttagagtctccagataaccatagtcctcagagggagtaagaaggaatcatctctattaatattttgtctcccaaagcattcaaagggcc

SEQ ID NO: 6351 - DNA, 1373 bp, Homo sapiens
ccctttgcaaaattaactctatttaaaatgaagattttagtcctttgaaatctctgcttcacaggagcattctctacagagggcctcccaagctctatgttcccattccttcaaggtaggatctcaacatgggagtggcccagcctgagggggagacacagaggctcaagcaactccagtgcaacagaaaggaacagtcagttttggattttggttgggtggaatatccaccgtataaactcccttggattcttccttcctcttgcttccagggggcagacagcatatgctttgctctctgattacacttagaagtctctttctggagtcagtgcagttggccagcaaaggatgttctgagcaaaccttttcagggttaccctacagcacagaatttattcattaaagaattttaccactacaatataaatgggaaataagaagatatactgctaaaatgagacataaaattgggtatataaattgctattttctgattaaatctggggagtacagtcactggggatggagtcaaattccttcaatacatttccttatgttttgacgagacagggtcattttgacctttcaaatgcgttaatcaaattccaggtgtctgtggttgacacatgggatagaaaaagtaagaagaaaataaacaattttatgctttaaatctgtgggagatgagtaaacaatgtgagtacatgaataaaattcctgtttaggtccaaaacatcccacataaacagattatttttataaaatggttttggtaaatgttatatattcaaactatttaaattgattcagtgtaaaaatgaaagtacctcatggagtaaaactttatgttaactcaatgtatgtctattttcatttatatcacaatttattattaatatctattaaggtatatatagtgccatctgtatttgagataattcattcaccctcagtttaaatatactgtcactagcaggcttcagataacataagagattaggcaaaatgcaaagcagggaatataacagaatggacactttatgttatattctgttactaaaagatgcagagaggctgggcatggtggctcacacctgttatccaagcactctgggaggccaaggtggcagatcacatgaggttgagagttcaagaccagcctggccaacgtggtggaaacccatctccactataaatacaaaaattaggagggcatggtggtgggcgcctataatccaagctactcgggaagctgaggcgggagaatcacttgaacccaggaggtggaggttgtggtgagccgagattgcctcactgccctccagcctgggcgacagagagagactccacctcaaaaaaaaaaaaaaaaa

SEQ ID NO: 6352 - DNA, 4145 bp, Homo sapiens
cgtcgttaatgattacatgttggcacaaggataccttgctagattagatccacagcacattaaagactgtttgctttctcactccccttctttccaattaagttggtgaaaaatgtaactttagtgttttacaggacagggtaaaggtgtttcatctaggtgatgtctatattataaaaataaaataaaatatataaatatgtaacacaaacccagtgcctattgttaaataaaatatacaataaaagcagaccttttaggaagattgattttaaaatatgctattatgatttaattataaaacacttgaaaacaatcttgagattaagatgaaataaccagatttctcagccaataaaaaggtaagtgtgtagcattctgtaactggatacactgacaaaaatgaagattacaattttatatcaagttgctcacttagaaattcatcagggagttctgaaacattctctcctagtatagtactttaatataaaaatattgccttttttttaattagatccatcggattgcacagtactgtttcaaaactctattaaagttgactttagtgattacagacagaaaattcctgggaagtcaaataatctcttctagtaacataaaaaatccattatcaatttacaatggaatttctgtgtaaattactttgcataaggaagtatatattttaaaaaatcatctgttatgcaacaacgcatataggggttatgagtatgtgtatgtgcatatgtgaacaaacatgctgacatacacacagaggatctgcacatttctggaaattatttttaaattaataaaagagaatgaaatcacaggagtgtgtagcaggataacagtcttttttttttaatgacaggataaaaaataaatgcccattggaatagaatattcaaacagtcccagaaactatacaatgtaacttgttagatccagcaagtaagatgtcatgtcaatgatctgatcaagaatacctgccctggtcactctgcggatgtttctgtccacttgttcacattgaggaccaagatatccttttttacagaggcacttgttcggtctaacacagacacctccatgacgacatgctggctcacattttgctgggagagaaaaagagcaagaacatcacactctcattctgtatgtcagaaacaggactgagcatgagaccaacaaatatttgctgaataagggaagcgagggaaaaaaggagggagatagttacaaaatgatctgaaagataaatatgcaagtaggaaacaggcttttacacccatagttatttggagacctgaactcagcagagaatgagagacatttctagagaagcagagatcatgagaaacaattgcaaccctttgcaaaattaactctatttaaaatgaagattttagtcctttgaaatctctgcttcacaggagcattctctacagagggcctcccaagctctatgttcccattccttcaaggtaggatctcaacatgggagtggcccagcctgagggggagacacagaggctcaagcaactccagtgcaacagaaaggaacagtcagttttggattttggttgggtggaatatccaccatataaactcccttggattcttccttcctcttgcttccagggggcagacagcatatgctttgctctctgattacacttagaagtctctttctggagtcagtgcagttggccagcaaaggatgttctgagcaaaccttttcagggttaccctacagcacagaatttattcattaaagaattttaccactacaatataaatgggaaataagaagatatactgctaaaatgagacataaaattgggtatataaattgctattttctgattaaatctggggagtacagtcactggggatggagtcaaattccttcaatacatttccttatgttttgacgagacagggtcattttgacctttcaaatgcgttaatcaaattccaggtgtctgtggttgacacatgggatagaaaaagtaagaagaaaataaacaattttatgctttaaatctgtgggagatgagtaaacaatgtgagtacatgaataaaattcctgtttaggtccaaaacatcccacataaacagattatttttataaaatggttttggtaaatgttatatattcaaactatttaaattgattcagtgtaaaaatgaaagtacctcatggagtaaaactttatgttaactcaatgtatgtctattttcatttatatcacaatttattattaatatctattaaggtatatatagtgccatctgtatttgagataattcattcaccctcagtttaaatatactgtcactagcaggcttcagataacataagagattaggcaaaatgcaaagcagggaatataacagaatggacactttatgttatattctgttactaaaagatgcagagaggctgggcatggtggctcacacctgttatccaagcactctgggaggccaaggtggcagatcacatgaggttgagagttcaagaccagcctggccaacgtggtggaaacccatctccactataaatacaaaaattaggagggcatggtggtgggcgcctataatccaagctactcgggaagctgaggcgggagaatcacttgaacccaggaggtggaggttgtggtgagccgagattgcctcactgccctccagcctgggcgacagagagagactccacctcaaaaaaaaaaaaaaaaagatgcagaaaaagtagatattgttaggcagcaaaggaagcagagagataataaattagcaggaatttgaatatcattacatttgaatactgattctcatatttttggtcaaccaacaaaaagacagagaagatgggtaaataacatgtaagcatttgttttaaataatgtaattacttaatttctgttgagttttaattttgataactccttcctagatacataaccatagtattaatcacacacataatgttattaatgctgaagcaatgtaagtttaaaatatatcctctatatgtggttttaaatgttggtttttttgttaggcaatataaaaatagacaagttatagttataattttttgaaatacatcttgaggacaaacaaaaagatagcatttatgaataaataatattaaatgttaatttgaggttttaattttcattggcaataagtattttaatatttgaaatagccgagatcaaaatcatttctaagtgatggtatatgctggttgttgattatgcattttcaacatacacattttaaactctaggtttctaaatttatctaattttctgacttcacaccaagtagaacttaagcatcattgcacataattgaggaactatcaagttataggctagaacaaccctggaataaatctcctttgctctctctgagcagatgcacacctagttgatggttcacaggggagtggcaaaaagcatgaaaaaaaatctcataatatgtctctagataattgcattttcccgttttatttaataacacccactgaaaagccctgtttttagtctgctgtggtaggaaagcaagcagtaaagccagggagggcatttacagggtgtctggaaaatgctagcgcttggagaggggctttgcaaacactaagtcattggctagtgtgaaatttcagaacccaggaccaagaggcctaaagagatgatctagttgtgctatttgcattttttactttttgaaaggactcagtcatttaaaggttttgtatatttataattaacttacataagtgaattgtttacattaagaaaatgaacaagattttacttacaagctcataaacagatgagcattaatagtattgtaaatggctaaatacttttgaacactatattattgtagaagaaacaatcaatgttgagttcttgagtacctaaggattggctcatccccagtccttttcaggtgaaaacagaaatactaaccagttctgcagaagtccccctcccagcctggactgcagcagcactttcccgtgggggtgcagtagccgtttcgacagagcctggagcactctgaagtcagtgtctgtgcaggttgtaccgtggctctgcattcctcaggcattaaaggtc

SEQ ID NO: 6353 - DNA, 1115 bp, Homo sapiens
cgtcgttaatgattacatgttggcacaaggataccttgctagattagatccacagcacattaaagactgtttgctttctcactccccttctttccaattaagttggtgaaaaatgtaactttagtgttttacaggacagggtaaaggtgtttcatctaggtgatgtctatattataaaaataaaataaaatatataaatatgtaacacaaacccagtgcctattgttaaataaaatatacaataaaagcagaccttttaggaagattgattttaaaatatgctattatgatttaattataaaacacttgaaaacaatcttgagattaagatgaaataaccagatttctcagccaataaaaaggtaagtgtgtagcattctgtaactggatacactgacaaaaatgaagattacaattttatatcaagttgctcacttagaaattcatcagggagttctgaaacattctctcctagtatagtactttaatataaaaatattgccttttttttaattagatccatcggattgcacagtactgtttcaaaactctattaaagttgactttagtgattacagacagaaaattcctgggaagtcaaataatctcttctagtaacataaaaaatccattatcaatttacaatggaatttctgtgtaaattactttgcataaggaagtatatattttaaaaaatcatctgttatgcaacaacgcatataggggttatgagtatgtgtatgtgcatatgtgaacaaacatgctgacatacacacagaggatctgcacatttctggaaattatttttaaattaataaaagagaatgaaatcacaggagtgtgtagcaggataacagtcttttttttttaatgacaggataaaaaataaatgcccattggaatagaatattcaaacagtcccagaaactatacaatgtaacttgttagatccagcaagtaagatgtcatgtcaatgatctgatcaagaatacctgccctggtcactctgcggatgtttctgtccacttgttcacattgaggaccaagatatccttttttacagaggcacttgttcggtctaacacagacacctccatgacgacatgctggctcac

SEQ ID NO: 6354 - DNA, 232 bp, Homo sapiens
cagaagatttttatggttcttactgtttttaaaataagatgtcatttgagctgggtcaggctggagtcatggtcacaactgctcattacctaatcttcagggaaaaaaatatccagtggcactttcctatcagtcgctgttacctgtgccacagtgtggtgagaagtttcttttcagttaaggaatgtaaacaaatgttttcattgacagtcaaatcaacagcattaggacg

SEQ ID NO: 6355 - DNA, 597 bp, Homo sapiens
tctccatgctcatttaatcctgagacttctttgaatagactgtcaattgaatctaaattgtgcaaaattatgcatgcactttttaatgcaggctattgttcactaagcactgaaccaagatttctcaacccatttccatttggcatgaggtcacttgaaacttaagtaatcatatatggaagacaagagcagtgtacttaaccaatctttctacattgtggcttctatataaatgcttactgggctttaattgcaaatctctcaccttaaaacaatagagaaatactagctacaatatattttttaaattgaggcttgtattcctaaaggtaaggagaaggtttagaaagtcagctggcgctgcataatctatactgctctacaatttagattctagaggaatggatgtttacagaagaaggacagccatagtgggtgtgcacttgtcatgagtagacgtgttttttcactagtgcaaagaggccttatattttgttaaaatccaaacgtggagagctggctttgaaaaccatgaagaaaaatatctactagactttttgcagttttaagtcagaacatgtcatctctgtaaaaccc

SEQ ID NO: 6356 - DNA, 2517 bp, Homo sapiens
agattattttcgaaataccagtatttcgactccagggggatgttcatttctatagtattttcagccccactgctggtgaatgccatgatcattgtggtacgtagatgacactttcagttgtctttcttcatgtgtatgtttttcaaatctaaacatgtctcaaacaattgtgtttaggttatgtgggtatggaagactttgaatgtgatgactgacctgaagaatgcacaagagagaagaaaggaaaagaaaaggagaaggaaagaagactgaggggcagcagctgcttggagtttgcgtccttcccgtccacccagtgcagctcccagtgctgcagtgtgcgtggcgtgggcatccttccagctgactcatggtttgaaaaaccgttgttttatttaaatatccacagtggtagggcacacactgaagttggcttttcagccagcactgaatgtatccatcaggacatgcgtcttcaggtgcctgatctttgtagtcaggctgtgggaacggtctctgcagagcttcataactgggaatttgatttgaagaagtccatgtcatatgtgtaactagtactaattataaatataaaatacacaatataaaatatgaaactcaataataaacagtgccacctgtacatgggcaccatgccctcctcctcgtgctgtgttttctagtgcatgccacagttcgcagtagagggtgttttcaccttccaagacatggggcaaagtttggagacacctggttgtcactggagggggtggtgctcctggcttctcctgtggagcccggggtgatgcataaaatcctgtgtgcctgggtcagccgcatcacagacaatgacttgacatgaaatgtcagctgtgctggggcagagagaccttggaaggaagctcttggaaaatacgttgtatctcagtttgatgaaccaattcacaagaggctaggccctctctagcaaagttatgggctgctttactgaaaacagaatggaagccctgaagtcaacactccatggagaagcgtgtctttcctaatgtcctggtgttctgttgatttaggtgcttgggaacacaatgctcccagttctgttaggacaggcatactgttactttgcaatatccactttataaaatagctcctgcccagtggctcttggttcctgtcaaatgtggacctgtagtttaagaatgacaggtggttagagacccagatatttaaaaataggtgttcaataagggaatactgattgtgcattgtatctggatagcatgcctaattgtgcatttctgaaagttaccaattcaaaatgtaattggaacagttatctttgattagacaagcctgggaagagaatgttgaggtgcagagctcaccagccaagttcatgcccctctcgggcctttgtggctgagaagtgggacagaaagatgattaaggtaatgtgtcctccctgtagcattgtccagggccgttgtgtagatatttgacttcactgacagaaaagaaaccagggagtttgtagagactgtgcatttttagtataacattttcaccatctgatatggtttggctttgtgtccccacccaaattgcatctcaaattgtaatccccatgtgtcaagggagggacctgatgggaggtgatgggatatgggggtggtttcccctatgttgttatcataatagagagggagttctcacaagatctgctggttttaaagacagcagtttcccctgctgtcactgtctctctcctgctgccttgtgaagaaggtgcttgtttctccctctgccatgattgtaagtttcccgaggcctccccggccatgtggaactgagtcaattaaacttcttgtttataaagtaatccaggtctcaggtagtatctttatagcagtgtgagaacagactaattaaacatctatatgttatttggacttaatatggggccgtgtgattgaatctcagtttgcctgtgataaagtagtgtaacagtattgctagctttgcatgaatttgatgctgatgacatgtcagtgtgaaaccatgacgtgtggtctttgattttcattctgcatgtgtgtgtctgtgttttggaacagttatattttggttttgtaaaaacaaccttcactttatttttaactgtgtagtaagtttatattcaatgccttaaagtgcattgttaacaattgtcttgatatgttgtcctcattttagggaaagtcatagaagccaaaatgatcagcagttgagtaatttacgaaagcacaggtgcaatcccactttaaagcactgggggttgcacagagcacactggtttcaggctccataaatgtggatgactcactggagagcttcatctgtttaagtagaacaaatgtttttactctactgataaagtacaggaaaggaggtttgggatcaaaattatttttcacattccaaacctgtgacaccttacgtttatcgattgctatgcaataaaatacatctttaataata

SEQ ID NO: 6357 - DNA, 436 bp, Homo sapiens
gcagcgtcgtgtcttcatgattcaccgagatctcctggtttcaaaagcgctgggttttttgcctgtcccacctgtgtggactgggcaccaggacgtctaacaaacatctcaaaattcacaattcagtcccattggtctgctcccccctcttcgtaggggcggcttctccctccagcttcttagaccagagacgtaacagggcattgttcaggaagctccgtccctccacctttaagatcagccacgagcccagtgtgttccatgcccttcaccccaccctcgccgacccgctgctgacatgcagcggtccctaagccgtcccccgactgcccagcctcttgggcatcctggggaagcgtgggcctcagagccaagcactgcccctcagaacgttccagagtgtccccagctcccccagagtaaacgcggagtcctg

SEQ ID NO: 6358 - DNA, 6882 bp, Homo sapiens
gaccaaggaggcgcccgcggctgcagagctgcagagcgggatctcttcgagctgtctgtgtccgggcagccggcgcgcaactgagccagaggacagcgcatcctttcggcgcgggccggcagggcccctgcggtcggcaagctggctccccgggtggccaccgggacccccgagcccaatggcgggggcggcggcaaaatcgacaacactgtagagatcacccccacctccaacggagtaagtgcccgagccccaggtggcgacgccatcctctcccagcacccccgcccccgcggagcgtctggcattttcctcctgcgcatccctcgcccctgactgccttcctagccctccctcccacctgccccctgcccttgctctgcggtttcctccgcttcacccttctcctgccaccccctgccccccaacagcaggtcgggaccctcggagatgcggtgcccacggagcagctgcagggtgagcgggagcgcgagcgggagggggagggagacgcgggcggcgacggactgggcagcagcctgtcgctggccgtgcccccaggccccctcagctttgaggcgctgctcgcccaggtgggggcgctgggcggcggccagcagctgcagctcggcctctgctgcctgccggtgctcttcgtggctctgggcatggcctcggaccccatcttcacgctggcgcccccgctgcattgccactacggggccttcccccctaatgcctctggctgggagcagcctcccaatgccagcggcgtcagcgtcgccagcgctgccctagcagccagcgccgccagccgtgtcgccaccagtaccgacccctcgtgcagcggcttcgccccgccggacttcaaccattgcctcaaggattgggactataatggccttcctgtgctcaccaccaacgccatcggccaggtgaggcggccaggcgggccgcgggtctgggggcgggcagagagcggcgagggcggggcctcacgcccgctgcacccttctcacatccccagtgggatctggtgtgtgacctgggctggcaggtgatcctggagcagatcctcttcatcttgggctttgcctccggctacctgttcctgggttaccccgcagacaggtgagggctgtcgtgggggcagggctggtagaaaggagggggtgctagggaagctaacccaagcagcgggcgtttacaggaggtcgaagacgattcgctggactctgcagtcttctctggacttctattcaatggtctatccatgtctcaacttcactctccatcaagaaataccccttccctacctcttccgcgcaagggaatgactcgacctctatggactattagtcccattcccactaattagtggccccctatccgtgaatcaatggcctcatctccaaagagaatagtctcatccccactaacagcccacatggactgttcgctccatctcagtgacctcattcctgaagatcaatatgttaattcctaaacaccaacagctccattcccactgatcaatagttcaacttcacaaacaaattaccccatttctgaccagcgacccctcccctacaagtcaactaactatctccaaagacaatatcctcagacccagtaacccacagtcccatgcctgccaccaaatgacccaacgctctgtaggggaatagcccatagattagcagtcataccctcatggatcctcagggctttgagatcctctcaccgaaatccccgtttccatgagtcggtagcttcacctctagagatcaacaacccaatcccagcaaccaataactcttcccacagatcaaaaatctcatctctgattctggtcaccttcaccactgaccagatgctctcactgcactaaacttccgattagactcagccccattgatccacagttccatccaagtggattaataactcaacttctgtggatcaaagccatcccaacattcaatagtccagttccttaaaatcaatacccatcctcactgcccaatagtcacacacctctgtgggccaatgatccgaaacccacaggtcaatagcccatccctatgcatcagtggcctcattgccacagaccagtagcctcattcctatggaaccatggtttcatccccaaagatcaataatttggtcttctaaaatctgtagccttcagcacattaaccaataagcccatcctcatggaaaaatgccccaccccattagatcaatagcctaactcccagggattggtgccccttttgcaatgaccagaggctccctatcttcatctccatagatcaatggtcttatccccaaagatcaatagcccagcctccaagaatcagtaaccatgtcttcactaactcatagttagtgaccataatcacttaccaatagtctcatctcccctggtctgtgaccttatccttactgattattcccatggattaatagattcatcccactgatcaatagtcctaccttatggattaatacacccatgtctatgtccccactgatctttcttttttctttcttttttttcttttttctttctttttgagatggagtctcgctctgttgcccaggctggagtgcagtggcataatctcagctcactgcaacctctgcctcccaggttcaagcgattctcctgcctcagcctcccgagtagctgagactacaggcacctgccaccacacctggctaatttttgtatttttagtaaggatggggtttcaccatatttgtcaggctggtcttgaactcctgacctcgtgatctgccagcctcggcctcccaaagtgctgggattacaggtgtgagccactgcgcccagcctgaccattcttaatgtattaatagaccaatgtcccacctccatggaacaatggcctcatctccaaaaatcaattactcagtcccctaatatcattggctttaccttcactgaccagtagtatcctcatgcacaagtggccaatggcctcccctccacaggttaatagttccaactccgtatatcaatgaacccccctcccacatctcctctgaacagtctgagcaagataagctccaggcccactgaccattagctctgttcctaaggatgaatggtcccaaatcccctaagcaatatcccatcccctctgttgagtgatgtcacatccattgacaagtgccctaatctctgaccaatagcccaagagtcaatgttcccacctcttaaagaaccacaaccacaccccagtgcccagtagccaggcatcacccacccatggtccccatccctccccatcttctcaagcctctgtccaactcttgctcccagaacttcattctcatacctctagctctgaagtgtgcagctgggtcttacccagcaactttcccaccaccagagagtctgggtgaccagaagcccttcccactttctagatttggccgtcgcgggattgtgctgctgaccttggggctggtgggcccctgtggagtaggaggggctgctgcaggctcctccacaggcgtcatggccctccgattcctcttgggctttctgcttgccggtgttgacctgggtgtctacctgatgcgtaagtggcaccctcccagaattccctcccttgggtctcatgcctacctgcctgcatcgccaggccatcctcactgccccctaggccacatttcagctgcctagaatctcagctatctttctgcccaggcccccttgaagaatccagggctcttgcttctctctacacctatctccccctcccgacaatctttaaagtctttgtcctggacttactgctgccaaggaataaggtgctattcccctgatagcagtaagtccagggacaaggattgtccctagctgtgtgaccttggacaagggttgatgtgaaggtcaaataagaggcctgatgggaaagggcctataaattggaaatgttgaacactcacccaggactctggccctagagccctcctaggtttgagcaggagaggagagagggctgaacagtctccccagtccttgccacccagaggttagcaagggaggcaatggctgcagcctccactctgggtctgacctctctctctgtcctcctccctccctctttcttcttctctcttatgccttcttcctccctggcctccctctcctctctccacccctgctgtatctccaggcctggagctgtgcgacccaacccagaggcttcgggtggccctggcaggggagttggtgggggtgggagggcacttcctgttcctgggcctggcccttgtctctaaggattggcgattcctacagcgaatgatcaccgctccctgcatcctcttcctgttttatgggtcagtattacccttcacctgtcgtctggcaattcccatctctgcctccaaactagccctagcccggagacccctcctcttctccaactacccctggtccaggcctaccccagccccagtccctcagaggtgcacatttcccacccctagatcaggagaagggaggcctcacagtataccccttcccccctgcccccagctggcctggtttgttcctggagtccgcacggtggctgatagtgaagcggcagattgaggaggctcagtctgtgctgaggatcctggctgagcgaaaccggccccatgggcagatgctgggggaggaggcccaggaggccctgcagggtaagagacagggatccctgtgagtgttgcctcacttgcacacatgatggtgccctctgcatggctgtagctgtgccaccttctcccagggtccccaccacccatgtgggaggatcctgggatctcagggttttcttctgacagctcctctctctctcccaaagacctggagaatacctgccctctccctgcaacatcctccttttcctttgcttccctcctcaactaccgcaacatctggaaaaatctgcttatcctgggcttcaccaagtgagcctgggtgtctgggctgagggccaggccagtagctggaatgggggctggctgggtgggaaggcccggggacccctgcggaggaccatcagcactgtagaaggctgcgggaggggattcaggctctgttcgttgcttccccaccccttctcacagcttcattgcccatgccattcgccactgctaccagcctgtgggaggaggagggagcccatcggacttctacctgtgctctctgctggccagcggcaccgcagccctggcctgtgtcttcctgggggtcaccgtggaccgatttggccgccggggcatccttcttctctccatgacccttaccggcattgcttccctggtcctgctgggcctgtgggattgtgagcatcctatcttccccacagtgtgggctcaacaagggaaccccaacagaggtgcttcagacaggcacagccatttcttctggcacaggcctcccaagacaagccccagaccctgcccagctcttccacgagcctccacctggccccacagccccatctgctctcccagtcaattactgaatgcccagagcctgcccagctagagccatgggaacagagagccaaggggatgacacccgggactaggccagccttgacctccccacctgcattcatatcatccctcttgcttctgcagatctgaacgaggctgccatcaccactttctctgtccttgggctcttctcctcccaagctgccgccatcctcagcaccctccttgctgctgaggtcatccccaccactgtccggtgagagcaggggtgcccccaggggcagagccgggccccctcgcctcccgctcccccaccccacccctgaggacagggcctgcgggctggaggaggggggctgcgggagaagggcccagcaaggctacagctgtgggctgagctcctcctctgtctccccccaggggccgtggcctgggcctgatcatggctctaggggcgcttggaggactgagcggcccggcccagcgcctccacatgggccatggagccttcctgcagcacgtggtgctggcggcctgcgccctcctctgcattctcagcattatgctgctgccggagaccaagcgcaagctcctgcccgaggtgctccgggacggggagctgtgtcgccggccttccctgctgcggcagccaccccctacccgctgtgaccacgtcccgctgcttgccacccccaaccctgccctctgagcggcctctgagtaccctggcgggaggctggcccacacagaaaggtggcaagaagatcgggaagactgagtagggaaggcagggctgcccagaagtctcagaggcacctcacgccagccatcgcggagagctcagagggccgtccccaccctgcctcctccctgctgctttgcattcacttccttggccagagtcaggggacagggagagagctccacactgtaaccactgggtctgggctccatcctgcgcccaaagacatccacccagacctcattatttcttgctctatcattctgtttcaataaagacatttggaataaacgagcatatcatagcctggacttccctcccttctgtttgtccttctatctcttgggggaaggtttttctcagtggaatgcacaccgataacaagctcccctctccctccttgtgccctgcccccagtggtgacttacagacaactgtcaccacttactgactgcttgcactgctgccagaactggcctaagcacttgacacacttcgtatcatttaatttttacagcattgcaaggtaggtgtttggatcaattaggggttgttgttgttgttgttgttgttgtttgttgttgtaagcaataaaaactggctctaatgaactt

SEQ ID NO: 6359 - DNA, 392 bp, Homo sapiens
atcactaccaatacagacccctcctgcagttgcgtcaccccgctggacttcaatcattgcctcaagaaccgggaggataatggcctgcccatgctcagcaccaatgccatgagctggaagacgatttctgcaatggagaaaaggggagcaagagagactcagcagcaaaggaagagagtgtttagaggaagaggggtcaacagtgccaaatgctgttgagaaatggagattcaaacaggatgggagtgatgaaacccaagaaagtggtctccttgtagaggactgaagctagggctgatacagggccaagacagtcttccatatgcataagttgtactgtaatagccagtttacatgtctgtctccctggagtaaaggtctccaaagtggaa

SEQ ID NO: 6360 - DNA, 6708 bp, Homo sapiens
gtgcttggccgtccctgccattagcgcgtaacgagagactgcttgctgcggcagagacgccagaggtgcagctccagcagcaatggcagtgacggcgttggcggcgcggacgtggcttggcgtgtggggcgtgaggaccatgcaagcccgaggcttcggctcggatcaggtacgctgcggcagtgtccgctgctccagccccgcgggcggatcccatctttgcttccgtacctttaccagtgtccctgtctctctgcagtccgagaatgtcgaccggggcgcgggctccatccgggaagccggtggggccttcggaaagagagagcaggctgaagaggaacgatatttccggtgaggctcaccgggtcccaagtccagccctggatctcccaatggccttccaatccttaaactgccaatcgccccacccgttcctacctggtgccttgggcgccccatcccccaacagaactcccgggccccaatccagtataccctaacccttgatgtcccgaccgttgccacgtatagggcactcccagttacctgcacaacagtttcaggcccccaaaccgtttccaccggcgggtctccaaaacaacccacggctcaactcctcctttatcattaccatctcccgcgtggagttctcctcaggtcgtgcgaaacacccccagattcttcgcacagtgtctagatccgaccgcccaacgtttgcctcccagcctgactccctcggcccttacccacctgtcaccccctctacgctctccttcctcgccagcacgccttagctttgcaagcctgcatgcattcaggcttctcaggtgtttctagacccccgactccgcaagagtgaggatgatgggagctggtcatgggagctacttatggttggacaccatcttctaaaggcttttgccctactcagcccaacctagacctgtagatttccctctcctgcttaggagtatggagtgggctgggcctccctttgccagccttgagttatctttaactgacttctgtccactctggagagcagtgaggaattaatcttgcttttgcttgtcctttggcctttcacttctgccttctgttgagaattatcaccatgacacctgccataccgtatagagagccaaggtacagccgttagagactatctaattgagcccctacattttgtagttaaggaaaactgaggcctaaatgtgaccaaaccaacattgtaatccagtcccttcttggaacctaaattgaactgccaagtactgcgcatgcaagagaccctttattggccttacagtgggccattcatttctataggcaaagaaagctctagacagattggaataggaaatggatatttgccttttagctacacccctttgtctgtcttcctcattttgttcctttttttttccctaaaggggagtcaagttccctgggttgttcccctcataaggtattagggacttgtgtcacatctctctggagttttctattttaaagaggaatctgaaagcaataagctctttggtcttcttaagatggctacacctcaatttaagatggggtattctttcactagttgaggagtagaagaggatgaccagctagactcccatggaattggaactcctattccttgcttagacattacaggttatgctttgagatctctttggggtgaaggattgaaattaaaccctgagccaccgtgtccttgtagagcacagagtagagaacaactggcagctttgaaaaaacaccatgaagaagaaatcgttcatcataagaaggagattgagcgtctgcagaaagaaattgagcgccataagcagaagatcaaaatgctaaaacatgatgattaagtgcacaccgtgtgccatagaatggcacatgtcattgcccacttctgtgtagacatggttctggtttaactaatatttgtctgtgtgctactaacagattataataaattgtcatcagtgaactgtgtttgatgccttcttctatctggaagagatagacagacaccaatggactgctaaaatggattagaggcgtccctgcatccaggaacccacagacaatgcacagtgtgataagtgctatgaaacaacacgagttggggggataggtgtgacacagacaaagtacccctccccgtctaattagaggtgttcagagaaagcttcctgaaggataaatcccaatctgaagcataaagatcaggaggatcctggagatccgaaggagtcattgcttcaaaagatacaattaggccaggtgcggtggctcatgcctgtaatcccagcactttggaaggccaaggtgggtggatcacctgaggtcaggagttcaagaccagcctggacaacagtaaaaccccatctctattaaaaatacaaaaattagccaggtgtggtggcacgcacctgtagtcccagctactcaggaggctgaggcaggaaaaccacttgaacctgggaggtgtaggttgcagtgagccgagactgtgccactgcactccagtctgggtgacagaatgagactctgtctcaaaaaaaaaaaaaaaaaagatacaattgaaagtaccatcagttaaaacagcattttgcatttttaaaatggtttagaggatacttaatatgagctagtcatccttgttctaattttgtagattgagagaactggaattagaaatcatgtgatttatacagtcactcagcaccttggcagtgagacttgtgtccaggttttttgactactaaaccaagtctgttattagcagaaaatcagaattatttcttaggttatattttgctttgccaagtattttgtttcaaattagacttgagggcctagtataactaaattattatacaaactagttgtgtaactcctctaggcaaaaaaatttgaggtgacatttgggccattagcaaaacattttcagttcaccagttcagtagagtatttgcccaggattgtaatgagttatttgttctaagaccctatctatctcacaagggcctgtaggaccattgagtgataaaagcttggagaagtcgcattgaccttgtctgtacagacaaaacactagatagtttgacttgcccatgaaactgaacacagccaggtgtggtatgtgcctacagttcagctacttggcagtctgaggcaagacgattgcttgagcccaggagttccagacatgcctgggcagcattttgaccccatctctttaaaaaaaaaaacaaaaaacaaaaaactaaactttgaattataatgattataatgttgctgaatctcagcactgaggcctcagtagtgcctataaatcttgcaagtggccagcaacaaaataacctgaaaagatgaagttcaagaaacaatcatactaagtcaaatgccttttattttaacattattaacagtgcaacacttgaaaagtttaaaaattggaaacaagtattagcaaacatctttaattttgcatatttgtaaccaaaaaaacaaggtatacaaaatcccctgaatttgtacatgatggtgtttttttgacttataatcaacaattgccttactaagagtgatgttcctgaattgtttcctcagtaaaggtgtaccataggctgggtgcgatggctcatgcctgtaatcccagcactttgagaggccgaggcaggcggatcatctgaggtcaggagttcaagaccagcctggctaacatggcaaaaccccatctctactaaaaatacaaaaattagccatgtgtggtgttgggcacctgtaatccccgctactcgggaggctgaggcaggagaattacttgaacctgggaggcagaggttgcagtgagctgagattgtgccactgtactccagcctgagagacagagtgagactccatctcaacaacaaccaaaaaaagattaaataggctaatttaaatatatctgaactttgtgaaaatggtaactcatggtctttttgttatgatatacctgtggttaatttttctatcatgctgcagtaaaagcaagatgtaaatactgagtaatatcacaaacatgtttgaatcctaaaagaatttatgtgacatgagccagtaaccactgaaaaaacagcacaggtcataggtggttcttagaatcaggataatttggaaaatactacagcagtggttccatgagccagcagtgtcagcatcacctgggaacttgttagaaatgcaaattctcggcagggcgcggtggctcttgcctgtaatcccagcaatttgggaggccgaggtgggtgggtcacaaggtcaggagttcgagaccagcctggccaatatggtaaaaccccgtctctactaaaaatccaaaaattagctgagcatggtggcgggcacctgtagtcccagctactcgggaggctgaggcagaagaatcgcttgaaccgggaggcggaggttgcagtgagccaagatcgcaccactgcactccagtctgggcaacagagcaagactccgtctaaaaaaaaaaaaaaaagaaatgtaaattctcaggccccaccacaaacctgctgaaacgaggggtttgactcagcaatcctttaacaagccctccggttgattctgtcatgtatgcaccaaagtttgacgatcattgtagtacaggtagtttctcatggaatctgctggcatttttgggtaaacacttttataaagacagattattaggtataataaaagtaactatatatgtttaatataattcataatatgaatgtgactttagaatttagaaataaatggttcttgtatggaacttgttaacatttgagaacacagcattccacagaatacagtttgggaaatacttcacttgtataatatatttattgccttagtcaaaattctttttgtcctccgcctcccactgcttcacttgactagcctaaaaaaataaaaaataaaatcctttttgtttacatgtaacagaaaccagcactggctgtctaaaggggaagaaaaagagtaatttactggaagaaataggggctattgtctcacagaatctcaagaagatttcagcaaacaagactcaggaaaaaaagggacagcagtagccagaggagttctgtgaacttacaggagcagatctgtctaagcaacttctaaaccctctgggtcagaatcgggctggctgggctgggcgcagtggctccccgctgtaatcccagcactttgggaggcaaaggcggacggatcacttgatcccaggagcttgagaccagcctgggtaacatgaccaaaccccatttctgcagaaaatacaaaataataataataataataataatggcggtacaggcctgcagtcccagctacctgggaggctgaggttgaagtgagctgtgatcatggcactgtactccagcctaggcaacagagtgagaccctgtttccaaaaaaaaaaagaatcattggggtgcttttttttatatatttgaaagagttctatagaattttatgcagtgaagttatttaacaatcgcagaattaatggagcactttaaaattatttgctcattaaatctcatatttttagcaaatagatccattccattagtttaattttataaccatagtaaccgaagcagggaattgtgaagtaactttcacaaggtcacatgatcaggtttgtgctgatcaaggtcttcacttcagaactcttgctcccacaaccttgagttgcagttccaatccagtgcttcagttgcctattagctagctccctcctcaatctgggggagtgggaggtacatgggtagcggggtatgggtggtaaaggcaagggctcctggaagtaaatatagaagtgccagcggttggtgttggcattagctttttggctgtaacataaaccccgtcagcatgtctatgcatgcctatatgatgcaaacacatgtttgcaatagaggctagtttgagattttcacaacagtaagtctaaagttgtagttctcaggccgggcgcaatgcctcacatgtgtaataccagcactttgggagaccgaggcaggcggatcacctgaggtcaggagtttgagaccaacctagccaatgtggtgaaaccccgtctctactaaaaatacaaaaattagtcaggcatggtggcgcacacctgtccagctacttgggagactgaggcaagagaatcacttgaacccaggaggcggaggttgcagtgagccgagattgcaccactgcattccagcttgggcgacagagccagactccaactcaaaaacaagtaaaataaaataaaataataaagttgtagttcttagcacaggtggcacactgaaatatgtggagagctttaaaatctcttccgcagctgggcgtggtggctcacgcctgtaatcccagcacttagggaggctgaggcggacggatcacgaggtcaagagatcgagaccatcctggctaacatggtgaaaccccgtctctattaaaaatacaaaaattagccacgcatggtggcacgcgcctgtagtcccagctactcgggaggctgaggcaggagaatcgcttgaacccgggaggtggaggttgcagtgagccaagattgtgtcactgcactccagcctgggcaacagagcgagactccgtctcaaaaaaaaaaaaaaaaaaaaaaaaaagaaa

SEQ ID NO: 6361 - DNA, 5062 bp, Homo sapiens
cgagattactgaattttacaagcttgacattttctattggctttataagctcttctcatgtttttattaccctcacatccaatccgttcgagctacacgctaaatcaaattggtattttatatttttatttttttagaggcaggatctcgctctgtcacccaggcaggagtgcagtggcacagtcatggctcgctgcagccttgacctcgcctcagcctccccagtagctgggaccacaggctcatgccacgcacgcccggctgaagctagttttaactgaagaaaactcaaagtgttctctcgccgttaacctttattattgaggcattggctctgctataggaaaacgaggtgacgttaatgtcggtggttgacattaaccactggcaagtgacagtgtggctccttgacaagtggttgctgctcataaatgtcatgaaacaaaaacactgattttagagaagtgggattctacagttaatatcgccagcaaacttttattaagctctcactctgtgccaaacacatgcttgaagttggggtgaatctgtgaccattaagatgttggctgttcatgggcacgttatcaagcaactggggtgtgagagcgaatgataagagggtgaatctggatgaggagggacttccagggcacaggtggaggagaggcattgcagccatagagaggcccaagggaacagtcaagacaaggcggggacagtggccaggaggcgagggcagcacttcctgggcagggaaggcttgccagggagaccagactcctgtctctgtttggaaagaaaaggaaccgcactgggggtcagggaggctaggcacggcaccagcctgggatgccagtcccgcctgaggggccaaggcaaaggggaagcattcacagaccccacaccaggctctgacgccaagtggaagaagagggagatagaagcagaagcctgggcttccaggcctggttcctgggcgggtgttgatgggacccagggagagtcctgtggggatactttgggtctgggctggcaggggctctggaaggagaggcatggaggtgcgaacctggtgcccaggtggaggtgcagtgggggtaaggtggccaggctgcagacccctgcatcagaatgcctgcgaagctgtgggttttttgtttgtttgtttgttttatttcgagacagggtgtcactctgtcgcccagactggagtgcagtagcgccgtctcggctcactgcaagctccgcctcccaggatcaagtgattctcctgcctcagcctcccgagtagctggatttacagatgcatgccaccacgcccagctaattttttgtatttttagtagaaacgaggtttcaccacgttggccaggctggtctcaaactcctgacctcaaatgatccacctgcctcgtcctcccaagtgctggaattacaggtgtgagccgcaccagcctgttttttaattttatttagagacagggtctcactctgttgcccagactggagtgcagtggtgtaatcttggctcactgcagcctcaacttccagcgctaaagcaatcctcccacctctgcctcccgagtaactgggactacacacgcatgccactacacccaggtaatttttaaaaattttttttagagacagagcttctccatgttgcccaggctagcctcaaactcctgggctccagtgaccctcccgccttagtgtctcaaagtgctgggattacaggtatgagccaccacgcccggtcagaagctgtgtttttaagtggacataccatcttgtcctgctgaagtatctccatgtaatcacaatatctatgtcacccaaatctcctccttcctcctccctcccccaaaacacccccacaggcatgcataccctcccatgcgctggaggcagaatctcccaaggggagctggccaggagaggtgtccctgagttcagatggaggtggaagccagagtggggctgggaccacccagtgacatgaggatggggcttgggataaagccctggggacactgacatttaaagtgtggacagaaggagctactgaaggcaatggatttagaaaagcaattgagtatgatttccttcttcaagaaaggctgtccaactagctctcacttcctctcgtgtgttcagtgtcacccggaagcagagtttaatgtgactaaagtcaacattggctcacactgtcagggagtgtgggaagatgagtaaggactcatcgcagggcgatacccacagcttaaaataggcaccttcccctcccaggtctggttagggcagttgttacatatgaggggcgtggagttttgtcttgtattttggccttgttggtaaagcattccaaagcttcgacacaccctcctttcagcccattaggaaaggctgttgattgtaatattcacacagctccctgggctatggttaagagccttgcagaaggactgggagaagccctgtgtgtttgaagtattgtagcatcagaaaaaaacaccggaagaaggcaggtggggacaaggtgcctatgtctgctccttggaattcctttccttactgtccgaggcaactacagggaaagcaaagcgtgagcccccaaatccacacctgggaggaacgttcccctttgcaaggcatgggactggctggccctgtgtctcacgggggctctgagttttgaggtcacactagcctcctgaggcctggctgagagggctgggttgggggtcaggaggccccctgtagccacgaagctcctctggggcattgttaaaggttcaccctcttttttgtgggtatcctggaagatctcaagaaactgagcttggaagaagagaggctgagagggtctcccgccgcctgcgttctctgcagctatggccccacagcctccagtgaccatggaggggaaggtgccacccgccttggctgctgaaagggtgatgctcttatgcctgagtcttggctcctgtggtcctgcagagaccctgtgggggccgcccggtcgtcacctgcactcatcttgggttttccttccttttccaccctaagctgaaggtatttttttcctgttttcttcactctaacttggggaagaaggaagatcctttatggaaaagaaaaaaaaaaaagcacctttgaacgtcctgcaacttgagtttcaagctttcagaaggattcggtgctgctggcctgctcagacctccgcctgggctgtggagttcctcctgttggcccctcctctctgtaccacaaaagctctaggcggcccagccacccctgtgaaagcggcgcccgtagccagacgccaaggctgccgtcccgagccgagggtggcaccttgcccagcgcacgtgcattctcctgtgggaactcggagggcatgtggtgagcagtctcctgtcagttgaggtggaggctcccggcccatctttgctctcctcaggctgcccagctcctggcggcacatggtggcctggcaaagctgacttggcctcctcagttccccacccatccgcggatcatcgccttccctagccacctctctctatagccaccgacatctgcggagcgtcacagactggttctgagctgtggtttacaaattcaacccaacacagagtgaattcaaatttgcttttggaacagcctttatctccaattaagtgcaagtatatttacactatgtgatattaaaggacttctccaatgactgggaggtactgaaccaagatgtttgtaaagaaacggtggggtgaggtggttaggtagaatataccgtcctggccatttctcttccttcaggcgagtaagcgctccttcagcagaaaggctgcggattgctggctgtgctctgtggactgggccagtaggtgtggcccaggtccaggtcctggcacctctgctgagtgcccagcctgagatgacacatgccatcctggagagaagcagagagggtgctgtctccaggcgttctccagacagcctgggcctggcttgctgagccagctgcaggaggggatctcctgactggggcttgggaccagatctgctgcagagaggcaataactctgtctaaaaagaaaacttgtcccgtgtgattacaaaaacaggaaaaggctccaagctaggaaatgagatttgaggtatggagaacattctcacctgatggaagcatcctgttcctgtacaggaggaggagctggtgcaagccctaggccacatatgtcacagttgttttggaccctccgtagcttttatactcataaaatattaaagttgcccctttcatatttgggtcattgaaagagcccaccgtactctaggttcctgctcactatgcacaacatctcagaagatggcgtacaaaactatttttctaactatagcacaggtaatgtgggggtggggaggcttgggatatacctaaatgtggcaaatgatttatcttccaccttgagggatgaaaaggaaactatgcacttgaattttaattaaaattttaatttaattcattggatagcttgtgccagaaagaacagtcaatattcaagaagcaaaactgacgattagctcagtttcgggcctccctgtcgggggagttttcttgtctggaacacaaacacctacaagtagagtgtgagctggttcttgacaatcagatctcatcaaccctttgaaatgttctgggcagcacagctccttggtctgcatggttggtgtaagtataatcaagtagtgaaattgtatggtatatacctatatgccaacagtgtacacccgtatgtgcagaatttgctaatataaccatttcaataaaaacctattgaaaaagctgatttgaccacatggagtattgttggtggtgacgtgtatcactgaggactctcttggttacaaatgacagaaaacccagccaaaactggctaacacaaaaggggaatgtcatggctcccaaaagccaaaatgcccaggggtgcctatgtcaggcttggtgtgatttcaccctcaaatgctgacaccaagacacatgccaactttg

SEQ ID NO: 6362 - DNA, 5061 bp, Homo sapiens
cgagattactgaattttacaagcttgacattttctattggctttataagctcttctcatgtttttattaccctcacatccaatccgttcgagctacacgctaaatcaaattggtattttatatttttatttttttagaggcaggatctcgctctgtcacccaggcaggagtgcagtggcacagtcatggctcgctgcagccttgacctcgcctcagcctccccagtagctgggaccacaggctcatgccacgcacgcccggctgaagctagttttaactgaagaaaactcaaagtgttctctcgccgttaacctttattattgaggcattggctctgctataggaaaacgaggtgacgttaatgtcggtggttgacattaaccactggcaagtgacagtgtggctccttgacaagtggttgctgctcataaatgtcatgaaacaaaaacactgattttagagaagtgggattctacagttaatatcgccagcaaacttttattaagctctcactctgtgcccaaacatgcttgaagttggggtgaatctgtgaccattaagatgttggctgttcatgggcacgttatcaagcaactggggtgtgagagcgaatgataagagggtgaatctggatgaggagggacttccagggcacaggtggaggagaggcattgcagccatagagaggcccaagggaacagtcaagacaaggcggggacagtggccaggaggcgagggcagcacttcctgggcagggaaggcttgccagggagaccagactcctgtctctgtttggaaagaaaaggaaccgcactgggggtcagggaggctaggcacggcaccagcctgggatgccagtcccgcctgaggggccaaggcaaaggggaagcattcacagaccccacaccaggctctgacgccaagtggaagaagagggagatagaagcagaagcctgggcttccaggcctggttcctgggcgggtgttgatgggacccagggagagtcctgtggggatactttgggtctgggctggcaggggctctggaaggagaggcatggaggtgcgaacctggtgcccaggtggaggtgcagtgggggtaaggtggccaggctgcagacccctgcatcagaatgcctgcgaagctgtgggtttattgtttgtttgtttgttttatttcgagacagggtgtcactctgtcgcccagactggagtgcagtagcgccgtctcggctcactgcaagctccgcctcccaggatcaagtgattctcctgcctcagcctcccgagtagctggatttacagatgcatgccaccacgcccagctaattttttgtatttttagtagaaacgaggtttcaccacgttggccaggctggtctcaaactcctgacctcaaatgatccacctgcctcgtcctcccaagtgctggaattacaggtgtgagccgcaccagcctgttttttaattttatttagagacagggtctcactctgttgcccagactggagtgcagtggtgtaatcttggctcactgcagcctcaacttccagcgctaaagcaatcctcccacctctgcctcccgagtaactgggactacacacgcatgccactacacccaggtaatttttaaaaattttttttagagacagagcttctccatgttgcccaggctagcctcaaactcctgggctccagtgaccctcccgccttagtgtctcaaagtgctgggattacaggtatgagccaccacgcccggtcagaagctgtgtttttaagtggacataccatcttgtcctgctgaagtatctccatgtaatcacaatatctatgtcacccaaatctcctccttcctcctccctcccccaaaacacccccacaggcatgcataccctcccatgcgctggaggcagaatctcccaaggggagctggccaggagaggtgtccctgagttcagatggaggtggaagccagagtggggctgggaccacccagtgacatgaggatggggcttgggataaagccctggggacactgacatttaaagtgtggacagaaggagctactgaaggcaatggatttagaaaagcaattgagtatgatttccttcttcaagaaaggctgtccaactagctctcacttcctctcgtgtgttcagtgtcacccggaagcagagtttaatgtgactaaagtcaacattggctcacactgtcagggagtgtgggaagatgagtaaggactcatcgcagggcgatacccacagcttaaaataggcaccttcccctcccaggtctggttagggcagttgttacatatgaggggcgtggagttttgtcttgtattttggccttgttggtaaagcattccaaagcttcgacacaccctcctttcagcccattaggaaaggctgttgattgtaatattcacacagctccctgggctatggttaagagccttgcagaaggactgggagaagccctgtgtgtttgaagtattgtagcatcagaaaaaaacaccggaagaaggcaggtggggacaaggtgcctatgtctgctccttggaattcctttccttactgtccgaggcaactacagggaaagcaaagcgtgagcccccaaatccacacctgggaggaacgttcccctttgcaaggcatgggactggctggccctgtgtctcacgggggctctgagttttgaggtcacactagcctcctgaggcctggctgagagggctgggttgggggtcaggaggccccctgtagccacgaagctcctctggggcattgttaaaggttcaccctcttttttgtgggtatcctggaagatctcaagaaactgagcttggaagaagagaggctgagagggtctcccgccgcctgcgttctctgcagctatggccccacagcctccagtgaccatggaggggaaggtgccacccgccttggctgctgaaagggtgatgctcttatgcctgagtcttggctcctgtggtcctgcagagaccctgtgggggccgcccggtcgtcacctgcactcatcttgggttttccttccttttccaccctaagctgaaggtatttttttcctgttttcttcactctaacttggggaagaaggaagatcctttatggaaaagaaaaaaaaaaaagcacctttgaacgtcctgcaacttgagtttcaagctttcagaaggattcggtgctgctggcctgctcagacctccgcctgggctgtggagttcctcctgttggcccctcctctctgtaccacaaaagctctaggcggcccagccacccctgtgaaagcggcgcccgtagccagacgccaaggctgccgtcccgagccgagggtggcaccttgcccagcgcacgtgcattctcctgtgggaactcggagggcatgtggtgagcagtctcctgtcagttgaggtggaggctcccggcccatctttgctctcctcaggctgcccagctcctggcggcacatggtggcctggcaaagctgacttggcctcctcagttccccacccatccgcggatcatcgccttccctagccacctctctctatagccaccgacatctgcggagcgtcacagactggttctgagctgtggtttacaaattcaacccaacacagagtgaattcaaatttgcttttggaacagcctttatctccaattaagtgcaagtatatttacactatgtgatattaaaggacttctccaatgactgggaggtactgaaccaagatgtttgtaaagaaacggtggggtgaggtggttaggtagaatataccgtcctggccatttctcttccttcaggcgagtaagcgctccttcagcagaaaggctgcggattgctggctgtgctctgtggactgggccagtaggtgtggcccaggtccaggtcctggcacctctgctgagtgcccagcctgagatgacacatgccatcctggagagaagcagagagggtgctgtctccaggcgttctccagacagcctgggcctggcttgctgagccagctgcaggaggggatctcctgactggggcttgggaccagatctgctgcagagaggcaataactctgtctaaaaagaaaacttgtcccgtgtgattacaaaaacaggaaaaggctccaagctaggaaatgagatttgaggtatggagaacattctcacctgatggaagcatcctgttcctgtacaggaggaggagctggtgcaagccctaggccacatatgtcacagttgttttggaccctccgtagcttttatactcataaaatattaaagttgcccctttcatatttgggtcattgaaagagcccaccgtactctaggttcctgctcactatgcacaacatctcagaagatggcgtacaaaactatttttctaactatagcacaggtaatgtgggggtggggaggcttgggatatacctaaatgtggcaaatgatttatcttccaccttgagggatgaaaaggaaactatgcacttgaattttaattaaaattttaatttaattcattggatagcttgtgccagaaagaacagtcaatattcaagaagcaaaactgacgattagctcagtttcgggcctccctgtcgggggagttttcttgtctggaacacaaacacctacaagtagagtgtgagctggttcttgacaatcagatctcatcaaccctttgaaatgttctgggcagcacagctccttggtctgcatggttggtgtaagtataatcaagtagtgaaattgtatggtatatacctatatgccaacagtgtacacccgtatgtgcagaatttgctaatataaccatttcaataaaaacctattgaaaaagctgatttgaccacatggagtattgttggtggtgacgtgtatcactgaggactctcttggttacaaatgacagaaaacccagccaaaactggctaacacaaaaggggaatgtcatggctcccaaaagccaaaatgcccaggggtgcctatgtcaggcttggtgtgatttcaccctcaaatgctgacaccaagacacatgccaactttg

SEQ ID NO: 6363 - DNA, 5063 bp, Homo sapiens
cgagattactgaattttacaagcttgacattttctattggctttataagctcttctcatgtttttattaccctcacatccaatccgttcgagctacacgctaaatcaaattggtattttatatttttatttttttagaggcaggatctcgctctgtcacccaggcaggagtgcagtggcacagtcatggctcgctgcagccttgacctcgcctcagcctccccagtagctgggaccacaggctcatgccacgcacgcccggctgaagctagttttaactgaagaaaactcaaagtgttctctcgccgttaacctttattattgaggcattggctctgctataggaaaacgaggtgacgttaatgtcggtggttgacattaaccactggcaagtgacagtgtggctccttgacaagtggttgctgctcataaatgtcatgaaacaaaaacactgattttagagaagtgggattctacagttaatatcgccagcaaacttttattaagctctcactctgtgccaaacacatgcttgaagttggggtgaatccgtgaccattaagatgttggctgttcatgggcacgttatcaagcaactggggtgtgagagcgaatgataagagggtgaatctggatgaggagggacttccagggcacaggtggaggagaggcattgcagccatagagaggcccaagggaacagtcaagacaaggcggggacagtggccaggaggcgagggcagcacttcctgggcagggaaggcttgccagggagaccagactcctgtctctgtttggaaagaaaaggaaccgcactgggggtcagggaggttaggcacggcaccagcctgggatgccagtcccgcctgaggggccaaggcaaaggggaagcattcacagaccccacaccaggctctgacgccaagtggaagaagagggagatagaagcagaagcctgggcttccaggcctggttcctgggcgggtgttgatgggacccagggagagtcctgtggggatactttgggtctgggctggcaggggctctggaaggagaggcatggaggtgcgaacctggtgcccaggtggaggtgcagtgggggtaaggtggccaggctgcagacccctgcatcagaatgcctgcgaagctgtgggttttttgtttgtttgtttgttttatttcgagacagggtgtcactctgtcgcccagactggagtgcaggagcgccgtctcggctcactgcaagctccgcctcccaggatcaagtgattctcctgcctcagcctcccgagtagctggatttacagatgcatgccaccacgcccagctaattttttgtatttttagtagaaacgaggtttcaccacgttggccaggctggtctcaaactcctgacctcaaatgatccacctgcctcgtcctcccaaagtgctggaattacaggtgtgagccgcaccagcctgttttttaattttatttagagacagggtctcactctgttgcccagactggagtgcagtggtgtaatcttggctcactgcagcctcaacttccagcgctaaagcaatcctcccacctctgcctcccgagtaactgggactacacacgcatgccactacacccaggtaatttttaaaaattttttttagagacagagcttctccatgttgcccaggctagcctcaaactcctgggctccagtgaccctcccgccttagtgtctcaaagtgctgggattacaggtatgagccaccacgcccggtcagaagctgtgtttttaagtggacataccatcttgtcctgctgaagtatctccatgtaatcacaatatctatgtcacccaaatctcctccttcctcctccctcccccaaaacacccccacaggcatgcataccctcccatgcgctggaggcagaatctcccaaggggagctggccaggagaggtgtccctgagttcagatggaggtggaagccagagtggggctgggaccacccagtgacatgaggatggggcttgggataaagccctggggacactgacatttaaagtgtggacagaaggagctactgaaggcaatggatttagaaaagcaattgagtatgatttccttcttcaagaaaggctgtccaactagctctcacttcctctcgtgtgttcagtgtcacccggaagcagagtttaatgtgactaaagtcaacattggctcacactgtcagggagtgtgggaagatgagtaaggactcatcgcagggcgatacccacagcttaaaataggcaccttcccctcccaggtctggttagggcagttgttacatatgaggggcgtggagttttgtcttgtattttggccttgttggtaaagcattccaaagcttcgacacaccctcctttcagcccattaggaaaggctgttgattgtaatattcacacagctccctgggctatggttaagagccttgcagaaggactgggagaagccctgtgtgtttgaagtattgtagcatcagaaaaaaacaccggaagaaggcaggtggggacaaggtgcctatgtctgctccttggaattcctttccttactgtccgaggcaactacagggaaagcaaagcgtgagcccccaaatccacacctgggaggaacgttcccctttgcaaggcatgggactggctggccctgtgtctcacgggggctctgagttttgaggtcacactagcctcctgaggcctggctgagagggctgggttgggggtcaggaggccccctgtagccacgaagctcctctggggcattgttaaaggttcaccctcttttttgtgggtatcctggaagatctcaagaaactgagcttggaagaagagaggctgagagggtctcccgccgcctgcgttctctgcagctatggccccacagcctccagtgaccatggaggggaaggtgccacccgccttggctgctgaaagggtgatgctcttatgcctgagtcttggctcctgtggtcctgcagagaccctgtgggggccgcccggtcgtcacctgcactcatcttgggttttccttccttttccaccctaagctgaaggtatttttttcctgttttcttcactctaacttggggaagaaggaagatcctttatggaaaagaaaaaaaaaaaagcacctttgaacgtcctgcaacttgagtttcaagctttcagaaggattcggtgctgctggcctgctcagacctccgcctgggctgtggagttcctcctgttggcccctcctctctgtaccacaaaagctctaggcggcccagccacccctgtgaaagcggcgcccgtagccagacgccaaggctgccgtcccgagccgagggtggcaccttgcccagcgcgcgtgcattctcctgtgggaactcggagggcatgtggtgagcagtctcctgtcagttgaggtggaggctcccggcccatctttgctctcctcaggctgcccagctcctggcggcacatggtggcctggcaaagctgacttggcctcctcagttccccacccatccgcggatcatcgccttccctagccacctctctctatagccaccgacatctgcggagcgtcacagactggttctgagctgtggtttacaaattcaacccaacacagagtgaattcaaatttgcttttggaacagcctttatctccaattaagtgcaagtatatttacactatgtgatattaaaggacttctccaatgactgggaggtactgaaccaagatgtttgtaaagaaacggtggggtgaggtggttaggtagaatataccgtcctggccatttctcttccttcaggcgagtaagcgctccttcagcagaaaggctgcggattgctggctgtgctctgtggactgggccagtaggtgtggcccaggtccaggtcctggcacctctgctgagtgcccagcctgagatgacacatgccatcctggagagaagcagagagggtgctgtctccaggcgttctccagacagcctgggcctggcttgctgagccagctgcaggaggggatctcctgactggggcttgggaccagatctgctgcagagaggcaataactctgtctaaaaagaaaacttgtcccgtgtgattacaaaaacaggaaaaggctccaagctaggaaatgagatttgaggtatggagaacattctcacctgatggaagcatcctgttcctgtacaggaggaggagctggtgcaagccctaggccacatatgtcacagttgttttggaccctccgtagcttttatactcataaaatattaaagttgcccctttcatatttgggtcattgaaagagcccaccgtactctaggttcctgctcactatgcacaacatctcagaagatggcgtacaaaactatttttctaactatagcacgggtaatgtgggggtggggaggcttgggatatacctaaatgtggcaaatgatttatcttccaccttgagggatgaaaaggaaactatgcacttgaattttaattaaaattttaatttaattcattggatagcttgtgccagaaagaacagtcaatattcaagaagcaaaactgacgattagctcagtttcgggcctccctgtcgggggagttttcttgtctggaacacaaacacctacaagtagagtgtgagctggttcttgacaatcagatctcatcaaccctttgaaatgttctgggcagcacagctccttggtctgcatggttggtgtaagtataatcaagtagtgaaattgtatggtatatacctatatgccaacagtgtacacccgtatgtgcagaatttgctaatataaccatttcaataaaaacctattgaaaaagctgatttgaccacatggagtattgttggtggtgacgtgtatcactgaggactctcttggttacaaatgacagaaaacccagccaaaactggctaacacaaaaggggaatgtcatggctcccaaaagccaaaatgcccaggggtgcctatgtcaggcttggtgtgatttcaccctcaaatgctgacaccaagacacatgccaactttg

SEQ ID NO: 6364 - DNA, 133 bp, Homo sapiens
ttttttttttttgagacggagtctcactctgctgcccaggctgaagttgcagtggcgtgatctcggctcactgcaacctccacctcccgggttcaagcaattctcctgcctcagcctcccgagtagctgggac

SEQ ID NO: 6365 - DNA, 282 bp, Homo sapiens
cgctttggtgattttttttttttttgagacggagtcttgctctgtcacccaggctggagtgcagtggcgcgatcttggctcactgcaacttccgcctcccgggttcacaccatcctcctgcctcagcctcccgagcagctgggactacaggcacctgccacgacgcccagctaattttttgtatttttagtagagatggggttttactgtgttagccaggctggtctcgatctcctgacctcgtgatccgcctgccttggcctcccaaagtgctgggattac

SEQ ID NO: 6366 - DNA, 133 bp, Homo sapiens; identical to SEQ ID NO: 6364

SEQ ID NO: 6367 - DNA, 246 bp, Homo sapiens
ttttttttttttttgagacggagtcttgctctgtcacccaggctggagtgcagtggcgcgatcttggctcactgcaacttccgcctcccgggttcacaccatcctcctgcctcagcctcccgagcagctgggactacaggcacctgccacgacgcccagctaattttttgtatttttagtagagatggggttttactgtgttagccaggctggtctcgatctcctgacctcgtgatccgcctgcct

SEQ ID NO: 6368 - DNA, 115 bp, Homo sapiens
tttttgtatttttagtagagacggggtttcaccgtgttagccaggatggtcttgatctcctaaccttgtgatctgcccacctcggcctcccaaagtgctggggttacaggcgtga

SEQ ID NO: 6369 - DNA, 7948 bp, Homo sapiens
aagtcacatgagccaccaaaatggtggtgttcgggtatgaggctgggactaagccaagggattcaggtgtggtgccggtgggaactgaggaagcgcccaaggtaggcggaaatccgaagtggtatggggggtgatttctgcaccttcaaagtgttggcagactcttctaagatgatacctttaaaggagatttgaaaagttaaaacagctcccaagtccatgcaaggagcagtcgattaagtctccagttgctgtggaaagaggcggagagaacgtagatgacctaaattctagtcctcattatctgcagtttgttttctcttgtctccaggcctttgcacaggctttttcttcaacttggagtatttccctgcttctatccgtcccaactcccctgccaaactgttctctttcggttattgatttaaatgtcacttcttccgggaagccttcccacgcttcctctggctagattgtttgctttttcttaggttgttgggtttttcgtttatgtcactctctcattctgtgtttaaattgccagcttttttgttctgaactcccactgcgttgtggattcctgaggatgggatgactgtatcttgattacccggaggtctggcatataccacgtgctccctaaattatgagcgaatgttgaataaaattctaaaggtgaaatttattattaggtgaaaaatttattattaggtaaaataatacacatgaaagcactacaaaaccgttagatgatttgcaaactataaacctacataaatgcactcttactggtataagcgtggtgactagttgagtggccttaagggggaaggggtgtaatgaaagcactggagtctttgacagtgccttgcaaagcttaagcactcaaatatttcctgtgttctttccagtatttcagtatttgctgtcctgtaatcataatcctgggtgtctgttttccctatagagactttagggtgtagactaggtaggagattagtagaagatattgcctggaagtttgttttgttttttgtttttggtggaaggtggaggatttcaatgaattggatgagagcaaaacaaaaatttatctatggtttatggttactcatgttattgacgtctgccaagacagcagatgtcttagtacaatagatgggttaggtatagaatctcccttagatgttactatcccttatactttccatttgggtgtcagggagagggaaaagatgtaagtctagtcactgaaaaattgtaatttgtaaaatattttacctttttttccccctgccctctccagaaatgttacagaaaaagattgagtacatttctgccatgatgcagagaaagaaactggtccattattactcattgtgtaacaccataagaaggttcaaaggagctcataccttctgtatgttgatgccaggaactgtgtataatgaactggccttctatagttaggattggtacataccgctcattcagcaaatgagtattacagtgatattcaacatgtgtccattgactacagcatcagaagcactaagtgctattaaaatgcagattctaggcctcatcctactcctgctgaatccaggtatctcaggagggaattcatgagactgcatttcaaataaataccccatgtgattcttgtgcatgctgaaggttgagaaccactgatttattaagtatcttgtgtgttcattatgctttatcccctctaatcctcttgtctaggactccttaaatttgagatttagtatttccctttaatataaacattaaaattgagattagtgtaaatttgtaaagagactatttagctaatctggaggaaaaagagtaaaaagcactgaatttagcagcaatagaccttccacttggctgctgtagtaggtaaacatttgcaaccacgtgtttggatttaacaaatgttattaagacttttcacagagactctagagtcttgcccagagcaaaacattcagaaacgatcctctctgagagtgcagggtttgtttttttgttgttgttgttttgttttgttttttaacctgtctagtttctgttaagatgctactggccaggtcttcatggtcccttgacattggcagctgtctgttcatcacacttgggacacaagaaccttccgaccaaggagcccagtgccatgggtctctggggccgggcacggtggctcacgcctttaatcccagcactttgggaggctgaggcaggtggatcacctgaggtcaggagttcgagaccagcctggctatcatagtgcaatcctgcctctactaaaaatacaaaaattagccgggtgtggtggcaggtatgggtctctgctataccacatgaccatttctagcaaaggctctgcttccaccacaggtggtaatagggaactggatatataatttatgtactccaaagtagtagccacaatccactgcctgttcccttcctggagcagtgtccctctttctgatttttctctctcactattctccaaggcaatccctgctctctcctacctctctaggaaatgaaacacgatttccaaaatgaacttaatctttcatgagaaactgaggatagagatgtcaataagcagccactgtttccacctccccacctgaagagctaggaggacaactacaaagagcctgactgccttctcggaatgaggagagaggaaaacagcaacagtatcagtatgttagccttctacactaaatctcaagcaagccaacctttcagaccttcagtttgctcatatgtatagaaataatcattatactaccaatttctcaagttagtgtgtaaatcagaaagccaatgtctgtattgtaggatgtttagcaagaaaataaaaaataataacaaaaagccaatgtctaacagataataagagctcagtaaatgttgattgaattactaacaaagtatgtgaaagcagacgacacagtacctggcacactactaaactgtaaatgttttcaaatctgaatctgtagaattctgtaaggttttatgtaatatgaatatcattagctattatggctctggaatttttttttccaggttttcaagatggcagcatctatgcatggtcagcccagtccttctctagaagatgcaaaactcagaagaccaatggtcatagaaatcatagaaaaaaattttgactatcttagaaaagaaatgtaagagaaatgcccaggctgaaaatcagtcattttatttgcaagtcttttgtattgccattgtttctaagatcctattctttcttaccttttctgttatctaagatcctattctttgagttggctatgaagaacacatctttaaaaaaaagaatgggggaaacaagaacagatgaaaatggtggtttgttggaatatttcggattgtggataatttcttttgtttcttaaaaagtatccaaaagtattgctaaaacttttgtgcagtaaatgtattttaattaaaagtaattaggagaaaaccattgaggggggtacttatatttaattggtgagtaattataatcagtttaggattgattatctcagccacagtacttagtacagcaaaagggaatacagatttcatggtataaatatagtctcacattaacatattgacttttttttttgagataagagtctcactctgtcacccaggctggagtgcagtggcacaatctcggctcactgcaatctccagctcccaggttcaagtgattctcctgcctcagcctcccaagtagctgggattacaggcgtgtaccaccacaaccagctaatttttgtatttttagtagagatggtttaaccatgttggccagactggccattttgacttttaaatgaacaaagttcaagaaaaaaatcaaaggacagttgatgttatttcctggatttacatatgggtcttaataagaaaactaaatcagatttttttggatgaagttttataaatcttggacaaattattttattttattttattttatttcattttctgttttatggctttattgaagtataatttatatatcttgacattcatccatttaaagtgtacagttatatgagttttagcaaatttatacagttatgtaaccatcaccacaattaaaatttggaatacttccaacatccccaaaaagttccctcattcccttttatttttttttattttattattattatactttaagttttagggtacatgtgcacaatgtgcaggttagttacatatgtatacatgtgccatgctggtgtgctgcacccattaactcatcatttagcattaggtagatctcctaaagctatccctcccctctcctcccaccccacaacagtccccagagtgtgatgttccccttcctgtgtccatgtgttctcattgttcatttcccacctatgagtgagaatatgcggtgtttggttttttgttcttgcaatagtttactgagaatgatgatttccaacttcatccatgtccctacaaaggacatgaactcatcattttttatggctgcatagtattccatggtgtatatgtgccacattttcttaatccagtctatcattgctggacatttgggttggttccaagtctttgctattgtgaatagtgccacaataaacatacgtgtgcatgtgtctttatagcagcatgatttatagtcctttgggtatatacccagtaatgggatggctgggtcaaatggtatttctagttctagatccctgaggaatcgtgacactgacttccacaatggttgaactagtttacagtcccaccaacagtgtaaaagtgttcctatttctccacatcctctccagcacctgttgtttcctgactttttaatgattgccattctaattcatgtgagatggtatctcattgtggttttgatttgcatttctctgatggccagtgatggtgagcattttttcatgtgttttttggctgcataaatgtcttcttttgagaagtgtctgttcaggacaaattattttaaatgtatctgggactaatgaagaaatagaaggcctaaccaaatgtaaacagcttttttttagatgaacttaagcaaagtaaatcttttagttgcaggaaaggtattcttggatttgggtagctcataaaatttggctgcattggaacatatttatatttatttgtggccaaaattatttaaaagagctctattttagaattactgtaaatattcttagaaagagaatcatgtcctctcattagaatacaagttctatgaggggtgggaaatttctttttttcttttgctttgtttactgtcctatcttaagcacttagaaaatacttttcacatatagtaagtgctcaagaaatatttgatattgatatgcaataacaacttttcaggagaggctgtatccattaagttcaatggtatagtgaactgaatttttctttttttctattaggacacaaaatatatatcaaatggcgacatttggaacaacagctggtttctctggaatattctcaaacttcctgttcagacgctgcttcaaggttaaacatgatgctttgaagacatatgcatcattggctacacttccatttttgtctactgttgttactgacaagctttttgtaattgatgctttgtattcaggtgaatttaaattcactaatgtataacgtagttatgtctaagtaaagttacttattaacatatactgttgctactgctaataataattctttacatttatatattgctatacagtttacaaagtccatataccttgtcatatttaatccctgcaacaatcctcctaatcaggtaaactgtatttttttatttctgtagataagcaacccaaactgaggcatgttcaagtacgctaataagcaacatactgggaaaagaattggctgtggcatacaacgcacatcatttcagtatgctacctcctgccacttaagttttgtgacattcagtaaggcatttcatctctgagcctccgttgtcttatctataagttaggactaatagtacttacctcacaggattgttgtgagaattaaaagatactgtaggttaaatgactaccacaatatctgtcatattatgggcttttaatgttatttcctgcccctcaccttaccttgagtttcacaactagtaattgatagagcatctatcccttgttcattcttcaggttcctgcttaagtatcttttccccagggagacctctgattgcctcattgtacactaggtgtctggatacattctctatatagtttatcttcaaagtattgtgtacactgataattatctatttaaatatttatctcgtgtctttcatctctgtaaactggccagaaggtcagagatcaggtctcttttatgtaccaccgtattcctagctcctagcacgttcctgatatatagtagataataaaaatgtattaacctagaatccaggtctggtttgctagtttagtattgtcattgtaaaattgtttctggctgggcacggtggctcatgcctataatcccaacactttgggaggccaagacaggcagatcacttgaggtcaggagttcgagaccagcctggccaacacagtctctactaaaaatagaaaaacagttgagcatggtggtgcaagcttataatcccagctacttgggaggctgaggcatgagaattgcttgaaccctggaggcagaggttgcagtgagccgagatcgtgccactgtactctagcctgggcaacagagtgagactccgtctccaaaaaataaaataaaattgcttctacaacaaccacatacgttagaggtaattctctatgtgataaagtataataaaaactttttaaaatgtgctgcatttggcctgttatatgccacagagtttgaatttctaatattctttctatggtttagttgtggttgaggatagtgcagataactactctgtgaggtacaacactgtcttaatagctcttgagttttaaaggaaaaccaaatttacttttgttttccagataatataagcaaggaaaactgtgttttcagaagctcactgattggcatagtttgtggtgttttctatcccagttctttggcttttactaaaaatggacgcctggcaaccaagtaagttcttccttttccttcttttttcttttcttttcttttcttttttttttttttttttaggttaataaactctctttcttctttagctgtctatgatatatttgaatcaaaatgtggtagtttggtatttcagatagctaacttttaacttttttgctctctacattatagatctagaaaggcaattatcaatttaggagaagtcaacaaacttctaatagcattcatatccaggagaggtgattaactcttttttctttttaggtatcataccgttccactgccaccaaaaggaagggttttaatccattggatgacgctttgtcaaacacaaatgaaattaatggcgattcctctagtctttcagattatgtttggaatattaaatggtctataccattatgcagtatttgaagagacacttgagaaaactatacatgaagagtaaccaaaaaaatgaatggttgctaacttagcaaaatgaagtttctataaagaggactcaggcattgctgaaagagttaaaagtaactgtgaacaaataatttgttctgtgccttttgcctggtatatagcaaatactcaaaaagtattcaataattcaatcaataaatataagtttcatcttacacgtaagatacaggtcttatctcctgatggtgtgtccattttgcctggtatataacagataataaatatccagtgtcaataaatgtaacaataaaagtttcatctttcctctttgtatgtggaa

SEQ ID NO: 6370 - DNA, 3464 bp, Homo sapiens
caccaaaatggtggtgttcgggtatgaggctgggactaagccaagggattcaggtgtggtgccggtggaactgaggaagcgcccaagtaggcggaatccgaagtgctatgcggggtaatttctgcaccttcaaagtgttagctgactcttctaagatgatacctttaaaggagatttgaaaagttaaaacagctcccaagtccatgcaaggagcagtcgattaagtctccagttgctgtggaaagaggcggagagaacgtagatgacctaaattctagtcctcattatctgcagtttgttttctcttgtctccaggcctttgcacaggctttttcttcaacttggagtatttccctgcttctatccgtcccaactcccctgccaaactgttctctttcggttattgatttaaatgtcacttcttccgggaagccttcccacgcttcctctggctagattgtttgctttttcttaggttgttgggtttttcgtttatgtcactctctcattctgtgtttaaattgccagcttttttgttctgaactcccactgcgttgtggattcctgaggatgggatgactgtatcttgattacccggaggtctggcatataccacgtgctccctaaattatgagcgaatgttgaataaaattctaaaggtgaaatttattattaggtgaaaaatttattattaggtaaaataatacacatgaaagcactacaaaaccgttagatgatttgcaaactataaacctacataaatgcactcttactggtataagcgtggtgactagttgagtggccttaagggggaaggggtgtaatgaaagcactggagtctttgacagtgccttgcaaagcttaagcactcaaatatttcctgtgttctttccagtatttcagtatttgctgtcctgtaatcataatcctgggtgtctgttttccctatagagactttagggtgtagactaggtaggagattagtagaagatattgcctggaagtttgttttgttttttgtttttggtggaaggtggaggatttcaatgaattggatgatagcaaaacaaaaatttatctatggtttatggttactcatgttattgacgtctgccaagacagcagatgtcttagtacaatagatgggttaggtatagaatctcccttagatgttactatcccttatactttccatttgggtgtcagggagagggaaaagatgtaagtctagtcactgaaaaattgtaatttgtaaaatattttacctttttttccccctgccctctccagaaatgttacagaaaaagattgagtacatttctgccatgatgcagagaaagaaactggtccattattactcattgtgtaacaccataagaaggttcaaaggagctcataccttctgtatgttgatgccaggaactgtgtataatgaactggccttctatagttaggattggtacataccgctcattcagcaaatgagtattacagtgatattcaacatgtgtccattgactacagcatcagaagcactaagtgctattaaaatgcagattctaggcctcatcctactcctgctgaatccaggtatctcaggagggaattcatgagactgcatttcaaataaataccccatgtgattcttgtgcatgctgaaggttgagaaccactgatttattaagtatcttgtgtgttcattatgctttatcccctctaatcctcttgtctaggactccttaaatttgagatttagtatttccctttaatataaacattaaaattgagattagtgtaaatttgtaaagagactatttagctaatctggaggaaaaagagtaaaaagcactgaatttagcagcaatagaccttccacttggctgctgtagtaggtaaacatttgcaaccacgtgtttggatttaacaaatgttattaagacttttcacagagactctagagtcttgcccagagcaaaacattcagaaacgatcctctctgagagtgcagggtttgtttttttgttgttgttgtttagttttgtattttaacctgtctagtttctgttaagatgctactggccaggtcttcatggtcccttgacattggcagctgtctgttcatcacacttgggacacaagaaccttccgaccaaggagcccagtgccatgggtctctggggccgggcacggtggctcacgcctttaatcccagcactttgggaggctgaggcaggtggatcacctgaggtcaggagttcgagaccagcctggctatcatagtgcaatcctgcctctactaaaaatacaaaaattagccgggtgtggtggcaggtatgggtctctgctataccacatgaccatttctagcaaaggctctgcttccaccacaggtggtaatagggaactggatatataatttatgtactccaaagtagtagccacaatccactgcctgttcccttcctggagcagtgtccctctttctgatttttctctctcactattctccaaggcaatccctgctctctcctacctctctaggaaatgaaacacgatttccaaaatgaacttaatctttcatgagaaactgaggatagagatgtcaataagcagccactgtttccacctccccacctgaagagctaggaggacaactacaaagagcctgactgccttctcggaatgaggagagaggaaaacagcaacagtatcagtatgttagccttctacactaaatctcaagcaagccaacctttcagaccttcagtttgctcatatgtatagaaataatcattatactaccaatttctcaagttagtgtgtaaatcagaaagccaatgtctgtattgtaggatgtttagcaagaaaataaaaaataataacaaaaagccaatgtctaacagataataagagctcagtaaatgttgattgaattactaacaaagtatgtgaaagcagacgacacagtacctggcacactactaaactgtaaatgttttcaaatctgaatctgtagaattctgtaaggttttatgtaatatgaatatcattagctattatggctctggaatttttttttccaggttttcaagatggcagcatctatgcatggtcagcccagtccttctctagaagatgcaaaactcagaagaccaatggtcatagaaatcatagaaaaaaattttgactatcttagaaaagaaatgtaagagaaatgcccaggctgaaaatcagtcattttatttgcaagtcttttgtattgccattgtttctaagatcctattctttcttaccttttctgttatctaagatcctattctttgagttggctatgaagaacacatctttaaaaaaaagaatgggggaaacaagaacagatgaaaatggtggtttgttggaatatttcggattgtggataatttcttttgtttcttaaaaagtatccaaaagtattgctaaaactt

SEQ ID NO: 6371 - DNA, 7948 bp, Homo sapiens
aagtcacatgagccaccaaaatggtggtgttcgggtatgaggctgggactaagccaagggattcaggtgtggtgccggtgggaactgaggaagcgcccaaggtaggcggaaatccgaagtggtatggggggtgatttctgcaccttcaaagtgttggcagactcttctaagatgatacctttaaaggagatttgaaaagttaaaacagctcccaagtccatgcaaggagcagtcgattaagtctccagttgctgtggaaagaggcggagagaacgtagatgacctaaattctagtcctcattatctgcagtttgttttctcttgtctccaggcctttgcacaggctttttcttcaacttggagtatttccctgcttctatccgtcccaactcccctgccaaactgttctctttcggttattgatttaaatgtcacttcttccgggaagccttcccacgcttcctctggctagattgtttgctttttcttaggttgttgggtttttcgtttatgtcactctctcattctgtgtttaaattgccagcttttttgttctgaactcccactgcgttgtggattcctgaggatgggatgactgtatcttgattacccggaggtctggcatataccacgtgctccctaaattatgagcgaatgttgaataaaattctaaaggtgaaatttattattaggtgaaaaatttattattaggtaaaataatacacatgaaagcactacaaaaccgttagatgatttgcaaactataaacctacataaatgcactcttactggtataagcgtggtgactagttgagtggccttaagggggaaggggtgtaatgaaagcactggagtctttgacagtgccttgcaaagcttaagcactcaaatatttcctgtgttctttccagtatttcagtatttgctgtcctgtaatcataatcctgggtgtctgttttccctatagagactttagggtgtagactaggtaggagattagtagaagatattgcctggaagtttgttttgttttttgtttttggtggaaggtggaggatttcaatgaattggatgagagcaaaacaaaaatttatctatggtttatggttactcatgttattgacgtctgccaagacagcagatgtcttagtacaatagatgggttaggtatagaatctcccttagatgttactatcccttatactttccatttgggtgtcagggagagggaaaagatgtaagtctagtcactgaaaaattgtaatttgtaaaatattttacctttttttccccctgccctctccagaaatgttacagaaaaagattgagtacatttctgccatgatgcagagaaagaaactggtccattattactcattgtgtaacaccataagaaggttcaaaggagctcataccttctgtatgttgatgccaggaactgtgtataatgaactggccttctatagttaggattggtacataccgctcattcagcaaatgagtattacagtgatattcaacatgtgtccattgactacagcatcagaagcactaagtgctattaaaatgcagattctaggcctcatcctactcctgctgaatccaggtatctcaggagggaattcatgagactgcatttcaaataaataccccatgtgattcttgtgcatgctgaaggttgagaaccactgatttattaagtatcttgtgtgttcattatgctttatcccctctaatcctcttgtctaggactccttaaatttgagatttagtatttccctttaatataaacattaaaattgagattagtgtaaatttgtaaagagactatttagctaatctggaggaaaaagagtaaaaagcactgaatttagcagcaatagaccttccacttggctgctgtagtaggtaaacatttgcaaccacgtgtttggatttaacaaatgttattaagacttttcacagagactctagagtcttgcccagagcaaaacattcagaaacgatcctctctgagagtgcagggtttgtttttttgttgttgttgttttgttttgttttttaacctgtctagtttctgttaagatgctactggccaggtcttcatggtcccttgacattggcagctgtctgttcatcacacttgggacacaagaaccttccgaccaaggagcccagtgccatgggtctctggggccgggcacggtggctcacgcctttaatcccagcactttgggaggctgaggcaggtggatcacctgaggtcaggagttcgagaccagcctggctatcatagtgcaatcctgcctctactaaaaatacaaaaattagccgggtgtggtggcaggtatgggtctctgctataccacatgaccatttctagcaaaggctctgcttccaccacaggtggtaatagggaactggatatataatttatgtactccaaagtagtagccacaatccactgcctgttcccttcctggagcagtgtccctctttctgatttttctctctcactattctccaaggcaatccctgctctctcctacctctctaggaaatgaaacacgatttccaaaatgaacttaatctttcatgagaaactgaggatagagatgtcaataagcagccactgtttccacctccccacctgaagagctaggaggacaactacaaagagcctgactgccttctcggaatgaggagagaggaaaacagcaacagtatcagtatgttagccttctacactaaatctcaagcaagccaacctttcagaccttcagtttgctcatatgtatagaaataatcattatactaccaatttctcaagttagtgtgtaaatcagaaagccaatgtctgtattgtaggatgtttagcaagaaaataaaaaataataacaaaaagccaatgtctaacagataataagagctcagtaaatgttgattgaattactaacaaagtatgtgaaagcagacgacacagtacctggcacactactaaactgtaaatgttttcaaatctgaatctgtagaattctgtaaggttttatgtaatatgaatatcattagctattatggctctggaatttttttttccaggttttcaagatggcagcatctatgcatggtcagcccagtccttctctagaagatgcaaaactcagaagaccaatggtcatagaaatcatagaaaaaaattttgactatcttagaaaagaaatgtaagagaaatgcccaggctgaaaatcagtcattttatttgcaagtcttttgtattgccattgtttctaagatcctattctttcttaccttttctgttatctaagatcctattctttgagttggctatgaagaacacatctttaaaaaaaagaatgggggaaacaagaacagatgaaaatggtggtttgttggaatatttcggattgtggataatttcttttgtttcttaaaaagtatccaaaagtattgctaaaacttttgtgcagtaaatgtattttaattaaaagtaattaggagaaaaccattgaggggggtacttatatttaattggtgagtaattataatcagtttacgattgattatctcagccacagtacttattacagcaaaagggaatacagatttcatggtataaatatagtctcacattaacatattgacttttttttttgagataagagtctcactctgtcacccatgctggagtgcagtggcacaatctcggctcactgcaatctccagctcccaagttcaagtgattctcctgcctcatcctcccaagtagctgggattacaggcgtgtaccaccacaaccagctaatttttgtatttttagtagagatggtttaaccatgttggccagactggccattttgacttttaaatgaacaaagttcaagaaaaaaatcaaaggacagttgatgttatttcctggatttacatatgggtcttaataagaaaactaaatcagatttttttggatgaagttttataaatcttggacaaattattttattttattttattttatttcattttctgttttatggctttattgaagtataatttatatatcttgacattcatccatttaaagtgtacagttatatgagttttagcaaatttatacagttatgtaaccatcaccacaattaaaatttggaatacttccaacatccccaaaaagttccctcattcccttttatttttttttattttattattattatactttaagttttagggtacatgtgcacaatgtgcaggttagttacatatgtatacatgtgccatgctggtgtgctgcacccattaactcatcatttagcattaggtagatctcctaaagctatccctcccctctcctcccaccccacaacagtccccagagtgtgatgttccccttcctgtgtccatgtgttctcattgttcatttcccacctatgagtgagaatatgcggtgtttggttttttgttcttgcaatagtttactgagaatgatgatttccaacttcatccatgtccctacaaaggacatgaactcatcattttttatggctgcatagtattccatggtgtatatgtgccacattttcttaatccagtctatcattgctggacatttgggttggttccaagtctttgctattgtgaatagtgccacaataaacatacgtgtgcatgtgtctttatagcagcatgatttatagtcctttgggtatatacccagtaatgggatggctgggtcaaatggtatttctagttctagatccctgaggaatcgtgacactgacttccacaatggttgaactagtttacagtcccaccaacagtgtaaaagtgttcctatttctccacatcctctccagcacctgttgtttcctgactttttaatgattgccattctaattcatgtgagatggtatctcattgtggttttgatttgcatttctctgatggccagtgatggtgagcattttttcatgtgttttttggctgcataaatgtcttcttttgagaagtgtctgttcaggacaaattattttaaatgtatctgggactaatgaagaaatagaaggcctaaccaaatgtaaacagcttttttttagatgaacttaagcaaagtaaatcttttagttgcaggaaaggtattcttggatttgggtagctcataaaatttggctgcattggaacatatttatatttatttgtggccaaaattatttaaaagagctctattttagaattactgtaaatattcttagaaagagaatcatgtcctctcattagaatacaagttctatgaggggtgggaaatttctttttttcttttgctttgtttactgtcctatcttaagcacttagaaaatacttttcacatatagtaagtgctcaagaaatatttgatattgatatgcaataacaacttttcaggagaggctgtatccattaagttcaatggtatagtgaactgaatttttctttttttctattaggacacaaaatatatatcaaatggcgacatttggaacaacagctggtttctctggaatattctcaaacttcctgttcagacgctgcttcaaggttaaacatgatgctttgaagacatatgcatcattggctacacttccatttttgtctactgttgttactgacaagctttttgtaattgatgctttgtattcaggtgaatttaaattcactaatgtataacgtagttatgtctaagtaaagttacttattaacatatactgttgctactgctaataataattctttacatttatatattgctatacagtttacaaagtccatataccttgtcatatttaatccctgcaacaatcctcctaatcaggtaaactgtatttttttatttctgtagataagcaacccaaactgaggcatgttcaagtacgctaataagcaacatactgggaaaagaattggctgtggcatacaacgcacatcatttcagtatgctacctcctgccacttaagttttgtgacattcagtaaggcatttcatctctgagcctccgttgtcttatctataagttaggactaatagtacttacctcacaggattgttgtgagaattaaaagatactgtaggttaaatgactaccacaatatctgtcatattatgggcttttaatgttatttcctgcccctcaccttaccttgagtttcacaactagtaattgatagagcatctatcccttgttcattcttcaggttcctgcttaagtatcttttccccagggagacctctgattgcctcattgtacactaggtgtctggatacattctctatatagtttatcttcaaagtattgtgtacactgataattatctatttaaatatttatctcgtgtctttcatctctgtaaactggccagaaggtcagagatcaggtctcttttatgtaccaccgtattcctagctcctagcacgttcctgatatatagtagataataaaaatgtattaacctagaatccaggtctggtttgctagtttagtattgtcattgtaaaattgtttctggctgggcacggtggctcatgcctataatcccaacactttgggaggccaagacaggcagatcacttgaggtcaggagttcgagaccagcctggccaacacagtctctactaaaaatagaaaaacagttgagcatggtggtgcaagcttataatcccagctacttgggaggctgaggcatgagaattgcttgaaccctggaggcagaggttgcagtgagccgagatcgtgccactgtactctagcctgggcaacagagtgagactccgtctccaaaaaataaaataaaattgcttctacaacaaccacatacgttagaggtaattctctatgtgataaagtataataaaaactttttaaaatgtgctgcatttggcctgttatatgccacagagtttgaatttctaatattctttctatggtttagttgtggttgaggatagtgcagataactactctgtgaggtacaacactgtcttaatagctcttgagttttaaaggaaaaccaaatttacttttgttttccagataatataagcaaggaaaactgtgttttcagaagctcactgattggcatagtttgtggtgttttctatcccagttctttggcttttactaaaaatggacgcctggcaaccaagtaagttcttccttttccttcttttttcttttcttttcttttcttttttttttttttttttaggttaataaactctctttcttctttagctgtctatgatatatttgaatcaaaatgtggtagtttggtatttcagatagctaacttttaacttttttgctctctacattatagatctagaaaggcaattatcaatttaggagaagtcaacaaacttctaatagcattcatatccaggagaggtgattaactcttttttctttttaggtatcataccgttccactgccaccaaaaggaagggttttaatccattggatgacgctttgtcaaacacaaatgaaattaatggcgattcctctagtctttcagattatgtttggaatattaaatggtctataccattatgcagtatttgaagagacacttgagaaaactatacatgaagagtaaccaaaaaaatgaatggttgctaacttagcaaaatgaagtttctataaagaggactcaggcattgctgaaagagttaaaagtaactgtgaacaaataatttgttctgtgccttttgcctggtatatagcaaatactcaaaaagtattcaataattcaatcaataaatataagtttcatcttacacgtaagatacaggtcttatctcctgatggtgtgtccattttgcctggtatataacagataataaatatccagtgtcaataaatgtaacaataaaagtttcatctttcctctttgtatgtggaa

SEQ ID NO: 6372 - DNA, 1022 bp, Homo sapiens
tcttttcaggtctcagtttgatccagctggattgaggccaagagccaggtaactgttgcaaaccacttcagtgttcagttttgaaatccaggctgagtcttctatgtcagacaaagaaaataatgatgtattttttccacaactaaactttttacaccgcccacagagtttacagcaacgtaattttttagtttttcaagtttttcaattttcagaaaatatttagactgtttttacaaactgggaaaattattgtaaacatgaagaacgttactgaaattcctcttcaggcagcaacatttttggaagttcaatgactaactcaattaaggcacaaaccaaatttagacaggtctcattactttatacatggtcaaattcaaagatgatgataaagatactcaaatctgtagagaaaaatgtaaccccacctccccaaaaatacttttaaaaatctctttgactccagtctctaaaaagataggtgagtttgaacagttttctgtggcagaacacacattgaaaggcccccttatatttactgatcagaagttccggatctcaccccctcagtaactcagaatccagcttgctgtccctttcatttttttcttctgtgctctccaagcccccaggcttgatccttaatgcccctctgattctgatcctcccatgtattaaccgagaggattgaaaaaaaaggaaagcaatcccttggcatggagacattaaagtgacagtgctactcaatgggcacttgatgcaggatgagttggcgaagcagatttcttcacactggagtcattcacatcatgccatctcttcgcattcaagcagctccctatccggcgaggaaaaacactgagacttcgagagaagccaaaccttcccccaaaggtgttttcagagacgccgtagtagtattagacatgtaagcataagctatgtaaacggtccgcgatttcctaaatgagaaagtgcagctgcttggctttcacatccaccttttctctcaatctctc

SEQ ID NO: 6373 - DNA, 2635 bp, Homo sapiens
ctctttctctgtctctcctccttcccattctctcttcctttcactcttttcctctctgtctctctctctctcacacacacacgtaatgtgtttaattccattattagttcaaaataaggtaatccaaaagaaactctctagagaaatggtagaaagaataaaaacacacatcaacttaaatatgtcaaagagccatatcatttattggctacattcccaaaaccattcttgttctagataaaccaattgtgtctggtctggacaagtgtggctccaaaatctcaggcagtttacttctgtcagtggtattattagaaacagcagggggaggaaacaatcccaatcttaaatcccagtgtgcaaatatcacagttctaggtgttccaaaagttttatatatcattgtccatctctacaaatatcagcttggataaggcatctcagtgattataagtttcctcaacatccctaacaaatccacaggtagaagaattaaacaccatgcagagataagttccactttaacctgcaattcacccagagctttagtttcagattgtagcaactcacataactggacaacatttggatctatattagtccagtatagcagagttcaaggctgttcatataagttttgattcaaaactcttgagaaactctttacagttgatctcaccttccatataatgtcaaaacaaaacaaaacaaaaacagtcccaaactaggatcctttggaacaaagttaacctggggtgcatctaagctaaactgaatccccaagttcagaatataatcaactatgcttcaggaattcactagatcttgatcaattccaataataaaagttgttgaggagggaggaaaaaaacaggtgtttgccccatttggggaacttgacaatcatgttattggataatgcatatatctggaaaagcacaatagtcacgaaagttgtgctttatcacaaaagtgaagatttacactagaataaatccaaataataagtctattttttaaccaaaagataaattataaagctgtaattttgttcagtgcaaatgaaattactttgctacctttcacaattctgtaattagtttgataaatattaaacccatgaggaagagctccactgcacaagtttcttttttaaagactgcttaaaagtaaccttcaacaagctaagaaaacaagctaaaggagactccaaatctgcggtactgaatctattcttattaccaacggtgatataaacaacctgatttatgaaatcataaatatctatcaataaatactatagtcttgcttccttttactttagtaaaataatattactgaattatgtaccactgaaactatattacaataaatatttcccccaaactgaagcaaaactttactctcaaatggaatataatttaaattacaagtaccagaaccaacaaaagggagaaatattatatagcaaccttatggcccacctgtcttcttgactggcattcttgggtctttccactgccacaggagtcaatatctcttttcaggtctcagtttgatccagctggattgaggccaagagccaggtaactgttgcaaaccacttcagtgttcagttttgaaatccaggctgagtcttctatgtcagacaaagaaaataatgatgtattttttccacaactaaactttttacaccgcccacagagtttacagcaacgtaattttttagtttttcaagtttttcaattttcagaaaatatttagactgtttttacaaactgggaaaattattgtaaacatgaagaacgttactgaaattcctcttcaggcagcaacatttttggaagttcaatgactaactcaattaaggcacaaaccaaatttagacaggtctcattactttatacatggtcaaattcaaagatgatgataaagatactcaaatctgtagagaaaaatgtaaccccacctccccaaaaatacttttaaaaatctctttgactccagtctctaaaaagataggtgagtttgaacagttttctgtggcagaacacacattgaaaggcccccttatatttactgatcagaagttccggatctcaccccctcagtaactcagaatccagcttgctgtccctttcatttttttcttctgtgctctccaagcccccaggcttgatccttaatgcccctctgattctgatcctcccatgtattaaccgagaggattgaaaaaaaaggaaagcaatcccttggcatggagacattaaagtgacagtgctactcaatgggcacttgatgcaggatgagttggcgaagcagatttcttcacactggagtcattcacatcatgccatctcttcgcattcaagcagctccctatccggcgaggaaaaacactgagacttcgagagaagccaaaccttcccccaaaggtgttttcagagacgccgtagtagtattagacatgtaagcataagctatgtaaacggtccgcgatttcctaaatgagaaagtgcagctgcttggctttcacatccaccttttctctcaatctctcttcaaactacccaccttccttttgcagaaaagacaagacatttctttgccaccgctggccacccctgcccaagcc

SEQ ID NO: 6374 - DNA, 1576 bp, Homo sapiens
ttagcttttaaaatgtatttttgtttttacttaagagttttaaaaagtagtcatattttaaatttacatattgttgggaaaattctgccaatggtaggataaaacaatagatttcaattgaaatattgaaagcaacttgtgttggtaaaagatgagaagtgaaggtggaagactgattaaaactaccaaaaatatcatagtgataacacttttatttttctttttttgtgggggtggggatagtaccattataaaaatacaaacataagctgcttttgtacatcaccaaataattcattgaaatttaaggaaatcaaccagttatgtgtgtacacacacacacacacacacacacacgatctcatagagtgaagggttaattggaatactgactgagtgcaatgtacaagaaaatgtacacactgaatacaaacaagggaaaaaaatcaactttgcctaggagaataataaatataattataggaaggaggggggacagggtaggtgttaaaaaggagtttcctgggaaaataaggaagtgaagaaaggcattccaggcataaaatatgcttgctatgtgcaaaacaacagtgggaaatagcatagactcttccatgtacatactgcaagtgggtatgtgatggtggagctacagttggaaaggtaggtaggggtcgtatcatctagcccgatttactagagtttaactttatttactcatgaataggtagatcttgacagattttaatgaggggagggacatcaggtgccaagtacctacaaacatttaaacaagggaagggttttatggttgcagtgattaggacacgtttgaggaatatttagacaattaagttagtggaacttatatttttataggatgtaaatgaaggggcacagggaagccaccgaaggtgatttctgagattctgttttgcataacttggtacatgatatgccacagacataaaggggaaatgctttcaaagagatctgtgtttttctcaaattttacccaatatatttgcataaagctcaatgtagattggaactatggcaatttgattcagttccacagcttaagtaagtgttattttgttcagttaattgaaaatgaaactatacctgacaggaagctgattacttatatgctaatgtgacagtattatagatcataggacttataacacctattaatttggtaaatgggaaaaacaaaactgtatactgtgaaataagaatttacgttatgtatataagaaatagttgatttaggctgggtgtggtggctcacacctgtaatcccagcactttgggcagccaaggcagctggatcacctgaagtcaggagtttgagaccaacccggccaacatggcagaaccccgtctctactaaaactacaaaaattagccagatgtggtggtgtgtacctgtcgtcccagctacttgggaaactgaggcaggagaatcacttgaacccaggaggcagaggttgcagtaagcccaaatcgcaccactacattccagcactatactccagcctaggccacagagtgagactgtctagaaaaaaaa

SEQ ID NO: 6375 - DNA, 3120 bp, Homo sapiens
  SITE (887): n equals a,t,g, or c
aaaagcacatgtagaccccgcccctgcagagatagcccagggtgggggtggggggtcgcaccagtccttctgtcctatttttttagagatatctactctgaagcctttgtaggggcctgggtacctttgggagcctgagctggaactgaagctgagcctgcagcctgggccttggtttgttctttgggcttggccttggcctttggccggcacagcctgagccccttggcaatacgggcaagagcacgcttcccaagcttggggtgggcaacgtaggcatgtcgatcgagcttgcagctgactccctttgggatcttgggcttaacctccttgggctttacgagggccttgatagcctcggcacgtgcactcatggccttggcattgttggcctgcatcttctttaggccctttttgttgtgcttcttggcaaagcgcatgttcctcaggaacttggggtccacccccttaagagattcgtatctttgtgatcggggtttcttgataccatttctgtgccattttcgggactggttgtgtgtggtgtggttcttggacttggccatgtctgcaccataagccgcggctcccgaagtgcctagaaccggaagagctgattttaggtatttcttgccttctgctagcttttgaatgtgtttgctcttgcttttctagttcttttaattgtgatgttagggtgtcaattttggatctttcctgctttctcttgtgggcatatagtgctataaatttccctctacacactgctttgaatgtgtcccagagattctggtctgttgtgtctttgttctcattggtttcaaagaacatctttatttctgccttcatttccttatgtatccagtagtcattcaggagcaggttgntcagtttccatgtagttgagtggttttgagtgagtttctgaatcctgagttctagttggattgcactgtggtctgagagatagtttgttataatttctgatcttttacatttgctgaggacagctttacttccaagtatgtggtcaattttggaataggtgtggtgtggtgctgaaaaaaatgtatattctgttgatttggggtggagagttctttagatgtctattaggtccacttggtgcagagctgagttcaattcctgggtatccttgttaactttctgtctcgttgatctgtctaatgttgacagtggggtgttaaagtctcccattattattgtgtgggagtctaagtctctttgtaggtcactcaggacttgctttatgaatctgggtgctcctgtattgggtgcatatatatttaggatagttagctcttcttgttgaattgatccctttaccattatgtaatggccttctttgtctcttttgatctttgttggtttaaagtctgttttatcagagaataggattgcaacccctgcctttttttgttttccatttgcttggtagatcttcctccatccttttattttgagcctatgtgtgtctctgcacgtgagatgggtttcctgaatacagcacactgatgggtcttgactctttatccaatttgccagtctgtgtcttttaattggagcatttagtccatttacatttaaagttaatattgttgtgtgtgaatttgatcctgtcattatgatgttagctggttattttgctcgttagttgatgcagtttcttcctagccttgatggtctttacaatttggtatgattttgcagtggctggtaccggttgttcctttccatgtttagtacttccttcaggagctgttttagggcaggcctggtggtgacaaaatctctcagcatttgcttgtctgtaaaggattttctttctccttcagttatgaagcttagcttggctggatatgaaattctgggttgaaaattcttttctttaagaatgttgaatattggcccccactctcttccggcttgtagagtttctgctgagagatccactgttagtctgatgggcttccctttgtgggtaacctgacatttctctctggctgcccttaacattttttccttcatttcaactttggtgaatctgacagttatgtgtcttggagttgctcttctcgaggagtatctttgtggcgttctctgtatttcctgaatctgaatgttggcctgccttgctagatgggggaagttctcctggataatatcctgcagagtgttttccaacttggttccattctcccagtcactttcaggtacaccaatcagacgtagatttgatcttttcacatagtcccatatttcttggaggctttgtttgtttctttttattcttttttctctaaacttcccttcttgcttcatttcattcatttcatcttccatcactgataccctttcttccagttgatcgcatcagctgctgaggcttctgcattcttcacgtagttctcgagccttggctttcagctccatcagctcctttaagcacttctctgtattggttattctagttatacattcatctaaatttttttcaaagtttttaacttctttgcctttggtttgaatttcctcctgtagctcggagtagtttgatcgtctgaagccttcttctctcaactcgtcaaagtcattctccgtccagctttgtttcgttgctggtgaggaactgtgttcctttggaggaggagaggcactctgctttttagagtttccagtttttctgctctgttttttccccatctttgtggttttatctactttgatgatggtgatgtacagatgggtttttggtgtggatgtcctttctgtttgttagttttccttctaacacacaggaccctcagctgcaggtctgttggagtttgctagaggtccactccagacccctgtgtgcctgggtatcagcagctgtggctgcagaacagcagattttcatgaaccgcgaatgctgctgtctgattgttcctctggaagttttgtctcagaggagaggccggccgtgtgtaggtgtcagtctgcccctactggggggtgcctcccagttaggctgctcagggatcaggggtcagggacccacttgaggaggcagtctgcccgttctcagatctccagctgcatgctgggagaagcactgct

SEQ ID NO: 6376 - DNA, 1865 bp, Homo sapiens
  SITE (1168): n equals a,t,g, or c
tccccaggatcatagacagaggctaacaaatcctgcctcaggtttatttgtacaaatagcacaggaggaccccagccccatgcagatggtagcccaggggcgggggtggggggtcgcaccagtccttctgtcctcatgttggcagagatatctactctgaagcctttgtaggggcctgggtacgtttgggagcctgagctggaactgaagctggggctgcagcctgggccttggtttgatccttggccttggccttggcctttggccggcacagcctgagccccttggcaatacgggcacgagcacgcttcccaagcttggggtgggcaatgtaggcaagtcgatcgagcttgcggctgacaccctttgggatcttgggcttaacctccttgggctttacgagggccttgatagcctcggcacgtgcactcatggccttggcattgttggcctgcatcttctttaggccctttttgttgtgcttcttggcaaagcgcatgttcctcaggaacttggggtccacctgaaaagcaggaaaggtacaggtggcagcatgtgggtccccaagtctctccctgctgcccctctccataggggtacccagcattctaaagacagcatcaagtcaacctcaaatgtggaaatacccaacctcttgaaactatttccagagaaagtgtaccaccaccccagggagccaatacgccacctgggtaatgctgtgcagacctccttcaagaacaaaattacaagctgctttgctgccctgtctgccaaggttgtggggcttcaacttcctacagcaggggttcgaccaagttttttcctgacatcccctcagggacaccccctcccctctttagaaggtgtcaattaaataccaagtctggtccaaaagacttatagccaaggtgggatatggggaaactgaggctcagagtttgtgattcactccacggaacagagagcaaaagtaaagggaaggaacagactggggacatgctcagctctcccctagaccctccagccttctcagctaatccttagaaccccctgacacaggaagagaagctgaccccaactccagcactgggtcagatggaggtcataaggctggtcagtgtgggaatgtgccctgcacgcactcagacaaggccactccttaccntaagtgccactgccaagcaagggagatagccaaactgccctcaggaggcaggttacaccctgaccagagggttacacttcaggctgtggagaccaaggaaagctttattatgggtctggtagggtagaaaaaggaattgcaggctttgggtgggccagttaggctgtgctcaggcagaagccaaagctagagaaaaactacatgagaggccttgactgtgcacctggaaccaagaaaagacacttccatgtgattcagtgcactcacccccttaagagattcgtatctttgtgatcggggtttcttgataccatttctgtgccattttcgggctgtgggagaaaaaaagggaattaagccaacaaagaactttcctctaataagaccacccaacatcacagctggcaagtctgggagaaccaacacttcctacagcagctacacttgagatatgggaaacccttactactaaatgcaaaacactctgtatctcaagtagatctctaaacctataaaccctaaagttattactgggtgaaatcaatcagcctcaggcccacaatggaaacgtgccccttcatctctgtcccagtttgcctgaaccagtccttgccagggtctgggatgtaggcagggcccaaaaaacttacactggttgtgtgtggtgtggttcttggacttggccatgtctgcacct

SEQ ID NO: 6377 - DNA, 286 bp, Homo sapiens
tcacgcctgtaatcccagcactttgggaggccgaggcaggcagatcacaaggtcaggagatcaagaccatcctggctaacacagtgaaaccccatctctactaaaaatacaaaaacaaaattagccgggtgtagtggcaggcacctgtagtcccagctacttgggaggctgaggcaggagaatggtgtgaacccgggaggcggagcttgcagtgagccgagatggcaccactgcactccagcctgggtgacagagcacgattctgtctcaaaaaaaaaaaaaaaaa

SEQ ID NO: 6378 - DNA, 7422 bp, Homo sapiens
tgaattgacagtcccaactgtagttgtactgaatacttcaaaccagcaatatttcttgctagatagacagattaagaatgttgaagacatggtccagtttattaataacattttggatggcacagtagaagtaagttgttcacttctgtttcaaagagatgatggacagggggtagaggagaaactagttcatttctttacttgtgattctgaaaagaatcgttggccatcacccggagtagagggctggacctccatacattgcttctgtccaattataggcagagtagaggtacattctcccagatacagaaggttcttctgtggcagaggttgctaaagatggaagtgtccttttatgggttatttggagggtatttttggttgtcatggtgatggggaggggctgttggctaaggttgaggcttagggatgctaggaagtctgcactgtgtggggtaatcttaatagtgaacttgcctgtctcttagtatgtttctaggtccaaaagtacaattggattaagtcgttaggattggttttctaagaaaatctgcaaataagatgacaatttctcaagaaatgaggaaatttattgagagtaaaagcccccgtggagagttctagacttaatcctataaaatatttctcagaaataagtgaatagtcttaattttctatttttttcctataaattttaactgcagtgtttttcaaactgtgaattgcaacctatattagaaagtcatgaaaccaccgcaagtcacaatcaggttgtgaccagcatgcatcttaattcaatagactaggataaaatttaaaagaaagcgccttcattgcttttgtgaaatgtaattactagtttttgagagttgtttcagttttacacaaactttatttaaaatttgcttacagagtaacaaacataactactttcggtcaaggtgaagaagtttgaaaaacagtcaaatagttaagaatatttttgaaaataatttgttgaaatgaaactctcacctatataaataatcagccttctatttttaagttagtggaatgcaactcagactatttaacaacagattttattgtctcatagagcttggaaatttaaaaaatgagccagattgcaggtatggccgaatataggatttgagtgattttcatcaggaatttttcactctcttcccttcagcactttcatcctcagggaagctctccctgcacagtagcaaaggtatcctgcagcagctctggttttgcggtcccagctaaactcaaaagctggttaggctgtactcagaggtgggtcagcttcagccaagctgtgtgggttatgaatagaggaggaggaattgtttagagtagaatcagggtgaattaacacaagcaggcaggaggaatgctggacatgacacagacaaaaaacaacacagtaaatgtttaccacatggccttttcaggtgattatgtaatattttggagtcaaccatttggcctgcaattgtaaggttatgtaacaccaagtaaatgaagtaatggtgcttaaataatttatttttcttttccttttttgaaggcccaaggaggtgatagcattttgcagagattgaaaagaatagtatttgatgccaaatctactattgtggtaagttgtgacagtttatgtcattgataatgaagaagatataggttctttatgtctagctgtgttaaaaatctgaatttgaaaagattaggtcaaaatatgtctttttaatttgcaggatatgactagtcagtatttaagaaaatatattcattaggtggaaattgtttctaattgtttatatgattgatgagttaaaactaaaattcagaatcaattaacttgatagtataatttaaaagattttatttctgcaacctgccatgtaaagtttttacttagtaatttctatgatttgttgaaagtgcagataatatgaaatttttagttccattacgtgctgtcttctgtaaattggtcatttttgttaaagaaaatgatgtgtgctgggaagtcactttttattttgcaggagtcaaaataaaattttagatcttacaattttaaacatccctgttaattctgtacttttccctagttggtaaataattaagatcatttacagatgtttttccttcttccctttttctctccttccttttttttttcttttattctttttatagaacactttaaatgtggaattaaaatgtgatggatcacatcctttctaacagtgtttactttcatttgtttgtcccagtgtttattcacagttgttatatgtaagtagaatatcaacagtggtagacgaattgacatgtctgcccctaattacccgtctctcttgtttttataattatactttctaaatatatttccttgactttcttcactgtcacctctcacctgattatttctgctattctaatttcctcttcctttcactctatcaaactaatgctcactctgtcaaactaattagatctgttgtatttcccctggatttctttgaagcatcctttccttgacattctcctttccgtgctgctgtgagtatcactactcccctgctcctgccccatctcttcagtgtttttcagcatccctttcctccctttcccctttgcagtccctgggtctgaaccttctcgcttgacactcttacgaaattgttctccctctcccagctttaactgtcaatcaacttgacagcagaggaattcttaaatttgtttgagccctaaacttagttcctgttgtccttctcgagctcttacatgggcattttcattcactgtggcccaaagcaatcataaaaatatagctaacattttttggttagaagtaaattctgggactctttgtttttttccttgcatagtattcttcagtttgctttactttcctgttgccacgagcatggattaggccctaatcacattctgtctagctgctggtctctttcacctggtttccatacttccacttgcccagtctccaatctatattatattccactacacagttaatattactaaaataatcgattttgatcactttccttcccttttccagggacatcagaatactctgtccatctaaagtattttcctcattggtttttgaatattagcttttgctagtgcaaattgcctggtgctcacttgtcccatatcctgcctccttctcactcatccttaaattcctacctaaaacacacctttattctgtgaaactttcttttattatctcaatccaaagtgatctttttcttctctgaacttctctatgttctcaagagttatcgttgcaattcatgcagtatattctagttgaaaaccctattcattaaaattacttttactttcctgggagctatgaagacagtatgtaaattgagggaaattagtaagtcaatgaagttttactactaaccagataagtaaaaaatattaaaaatgtcatgtgaaaagagtatgtgtgtaccttctttgtggtaaataacccagccttctccataagcagattcctgtagttcaggaagcaactctaaagctgctgggcgcacatagtaagcaccttaaagagacctttgtggttaatgtagaaaaatcagtgtctttaggaaaggctgtagaatatttgatgcctttttctgttgctaatagctggttctgcacacacatgcttatgtatgtgcatatagaaattatatctcttaacagtgtctttcacatggtagttactgctgaaatgattgattcattggaactaaaaacaagctgaatagcaacaagagaaatctatagtggtttcaagttcatttcatgctatatatatcagaattacatgtgaagggaactgagttttaattctctttccacagtctatattcaagagctcaccactgatgggctgctttctctttggcctgccactgggtgtcatcagtatcatgtgctatggaatctacacagccgacacagatggaggttatatagaagaacgatatgaagtgtctaaaagtgaaaatgaaaaccaagaacagatagaagagagcaaagaacagcaggagcccagcagtggaggatctgtagtgcctacagtgcaggagcccaaggatgtattagaaaagaagaaagattgagacttgatgactataaaatatttgttaggacttcaaattattgaagagtctatttattgaatttagacatttaatcatgatctttacagaaaagaacatgttattcgtattttgctaatatcaactgcatggattaaagtagtccctccatacatggggaagtgtttggagcaaagagatgaacagtttgtctgaaacaaacacagagcactccatcaaaatttacctgatctttgtgattagaacagaacaattctatttgcatgtttctctatctgaatattctgtgacaaaaagttaagattcttgggcagaatatttaaattggtcagtcaggtagaagatacatgtgtgatatagaaaaataatgcctctcctgctgccatccgtttccctcatatattttggacaagatttatatggacaaaattaagtctttaaaatttaggcactttaaggagaactaataactttttccatgtatcaagattatgaggttaaaaataatgtggttttatatagcatagtggttttattttgttagttatttttaaaggagaagaaatgttactttttaactttatactcagttgcattgtcataaaattttcatatatgcctagataatggggaaaaaaagtcttctgattgactttcgcaaaataaacaggatttactgagtagaggtttcagcccattccttggaatactaacaggtatttcatcagtcattgtaggttgggaagggtctctgttaatcctactctgctttagccagaatagcctagtattttatttctattttatatattgagatttcttctaacatttcctttgataaaaatcttctgctttttgaaaagtggtatgtatcatatttttatgtttctggtgtgtgaactttatggtaacttctactctagaatacgtacgtatgcacccacagacacacacagtttattgacacatctattatgtaatgctgtagacctgtccgtgtctgcttcataaggagtaacgactgacattagcatgtccagtgacaagtcacatccggtgtaaaaaaaagagatcagccagttaccttctccattgtcttagttctgtcacccatttcgtcaagtgacctctcatcttctataaactaatacaggaattctttccaaagcaatgtctaaaaactcttttttttaaagtaacagtttggtatgtttattgtagataaattattttgaggccttcattttagctaagtttagaatttatattaggcaactatgatttgagtggttattcattgagtaattttccactataaagaattttattgaacatttattaaaaaataatgtaatgcatggtcaaaaaatatgtaattcatggtctggacactgacgttgtttagggatttagtcatcaaggacagccctctgttgtttctaatgccatactaatcaagactgtatggacacttgcatcttaagtactaaggaattactagtgattgttttattttatccatgtactcttttagtatttaataattaaatacctattcttagtgtttgacactccatatttcttttttttggaaatgaaacaaatatgcagtccaaaattcaggaactactagagtgaaatgatattaagtggaaaccagagataaatgctgttaatttaacaagtagattcttctccaaagaatgatgagtgattcttgggaagataaatgttaatgttcccaatagtcaagcttgttttgcagtagtgaaaagcttagatgagtacggatacctcatttgaaactcagcctagtaaggaagtgaaaacttagcagtcagtgacatggggaaatagttatagaaaatgtcactgaattttttcatatttataattagtcatttacatatttttgtcttgttgatcattacctgtaaatgaaagaccttaataggaaaaaaagagtaaagctcagtgtgaatgcaaacatccacaaaatatgatcttcgtttatattctgtgatgttgtttataaatgaatgcctcagttctctgctacccttttcacagctttgtactgtttgccttatattctatttgtgcttttaaagtgtgtctgttgggaaaacaaaatgtgtaggtggtttgtaagtgaataatttttatttcttcttgtattaaaattttgtttttttctctactttgggagatgtttatttacattgtcagactattcacaaaacagattctaaaatttgtttgctcgtatgctgttcccttcaatgtgatatcagagattactatgaatgttagtttcattccgtgaaacattacttccatataaagacagatctcttaataagtgaatctagtggaagaacataggtatcattctaattccatggtaaattttgtcatgattctatatgaataatggggtccttcaggaagttggaatttttgccttctcttttaattgcagtgaagttctctttataacttctaaaattcggaattctagatccttgcttttgcagaatttggtgctcagacaatatttaaggacatttcagcgagacaaagtgcatgtttttatcgagtaccctgtgcaccacattatatctggcaattctttttgtttcattatgtgcatcaatatttttctcagctactattacctgaaacttgtttaacatgtattagacctagaattttcattttctttctcacatagttgcttcctggtatctgatttagaaataacatttaaatgccaagtatctgggggattgaaggaagggtctatatgagcaggtgaattagcagtactgtttttgtttagtggatattgttagtgactttttgtgtgtgttttgctttgggacctttttattttggtgttgcaaaaagtaacatattttcatcattgcttcatacgacatggagttaggacagggaaaaatcattcaacactccttatgcattaaatgatcaaataaaccagtgtaggatattaagactatcaattggtgggattaggcttgacattttatttttataaatatatattttttctgaatgtgtctgagtccaagagtgggcaaaaaataattttctactttggactaatctatagaggtttttgaaagtctgcattactaacttgttgaattcatgatattctgcctatggcacaaattgtaaacctttgtttttctaaaataaagtaattgaaaacctgcaa

SEQ ID NO: 6379 - DNA, 7423 bp, Homo sapiens
tgaattgacagtcccaactgtagttgtactgaatacttcaaaccagcaatatttcttgctagatagacagattaagaatgttgaagacatggtccagtttattaataacattttggatggcacagtagaagtaagttgttcacttctgtttcaaagagatgatggacagggggtagaggagaaactagttcatttctttacttgtgattctgaaaagaatcgttggccatcacccggagtagagggctggacctccatacattgcttctgtccaattataggcagagtagaggtacattctcccagatacagaaggttcttctgtggcagaggttgctaaagatggaagtgtccttttatgggttatttggagggtatttttggttgtcatggtgatggggaggggctgttggctaaggttgaggcttagggatgctaggaagtctgcactgtgtggggtaatcttaatagtgaacttgcctgtctcttagtatgtttctaggtccaaaagtacaattggattaagtcgttaggattggttttctaagaaaatctgcaaataagatgacaatttctcaagaaatgaggaaatttattgagagtaaaagcccccgtggagagttctagacttaatcctataaaatatttctcagaaataagtgaatagtcttaattttctatttttttcctataaattttaactgcagtgtttttcaaactgtgaattgcaacctatattagaaagtcatgaaaccaccgcaagtcacaatcaggttgtgaccagcatgcatcttaattcaatagactaggataaaatttaaaagaaagcgccttcattgcttttgtgaaatgtaattactagtttttgagagttgtttcagttttacacaaactttatttaaaatttgcttacagagtaacaaacataactactttcggtcaaggtgaagaagtttgaaaaacagtcaaatagttaagaatatttttgaaaataatttgttgaaatgaaactctcacctatataaataatcagccttctatttttaagttagtggaatgcaactcagactatttaacaacagattttattgtctcatagagcttggaaatttaaaaaatgagccagattgcaggtatggccgaatataggatttgagtgattttcatcaggaatttttcactctcttcccttcagcactttcatcctcagggaagctctccctgcacagtagcaaaggtatcctgcagcagctctggttttgcggtcccagctaaactcaaaagctggttaggctgtactcagaggtgggtcagcttcagccaagctgtgtgggttatgaatagaggaggaggaattgtttagagtagaatcagggtgaattaacacaagcaggcaggaggaatgctggacatgacacagacaaaaaacaacacagtaaatgtttaccacatggccttttcaggtgattatgtaatattttggagtcaaccatttggcctgcaattgtaaggttatgtaacaccaagtaaatgaagtaatggtgcttaaataatttatttttcttttccttttttgaaggcccaaggaggtgatagcattttgcagagattgaaaagaatagtatttgatgccaaatctactattgtggtaagttgtgacagtttatgtcattgataatgaagaagatataggttctttatgtctagctgtgttaaaaatctgaatttgaaaagattaggtcaaaatatgtctttttaatttgcaggatatgactagtcagtatttaagaaaatatattcattaggtggaaattgtttctaattgtttatatgattgatgagttaaaactaaaattcagaatcaattaacttgatagtataatttaaaagattttatttctgcaacctgccatgtaaagtttttacttagtaatttctatgatttgttgaaagtgcagataatatgaaatttttagttccattacgtgctgtcttctgtaaattggtcatttttgttaaagaaaatgatgtgtgctgggaagtcactttttattttgcaggagtcaaaataaaattttagatcttacaattttaaacatccctgttaattctgtacttttccctagttggtaaataattaagatcatttacagatgtttttccttcttccctttttctctccttccttttttttttcttttattctttttatagaacactttaaatgtggaattaaaatgtgatggatcacatcctttctaacagtgtttactttcatttgtttgtcccagtgtttattcacagttgttatatgtaagtagaatatcaacagtggtagacgaattgacatgtctgcccctaattacccgtctctcttgtttttataattatactttctaaatatatttccttgactttcttcactgtcacctctcacctgattatttctgctattctaatttcctcttcctttcactctatcaaactaatgctcactctgtcaaactaattagatctgttgtatttcccctggatttctttgaagcatcctttccttgacattctcctttccgtgctgctgtgagtatcactactcccctgctcctgccccatctcttcagtgtttttcagcatccctttcctccctttcccctttgcagtccctgggtctgaaccttctcgcttgacactcttacgaaattgttctccctctcccagctttaactgtcaatcaacttgacagcagaggaattcttaaatttgtttgagccctaaacttagttcctgttgtccttctcgagctcttacatgggcattttcattcactgtggcccaaagcaatcataaaaatatagctaacattttttggttagaagtaaattctgggactctttgtttttttccttgcatagtattcttcagtttgctttactttcctgttgccacgagcatggattaggccctaatcacattctgtctagctgctggtctctttcacctggtttccatacttccacttgcccagtctccaatctatattatattccactacacagttaatattactaaaataatcgattttgatcactttccttcccttttccagggacatcagaatactctgtccatctaaagtattttcctcattggtttttgaatattagcttttgctagtgcaaattgcctggtgctcacttgtcccatatcctgcctccttctcactcatccttaaattcctacctaaaacacacctttattctgtgaaactttcttttattatctcaatccaaagtgatctttttcttctctgaacttctctatgttctcaagagttatcgttgcaattcatgcagtatattctagttgaaaaccctattcattaaaattacttttactttcctgggagctatgaagacagtatgtaaattgagggaaattagtaagtcaatgaagttttactactaaccagataagtaaaaaatattaaaaatgtcatgtgaaaagagtatgtgtgtaccttctttgtggtaaataacccagccttctccataagcagattcctgtagttcaggaagcaactctaaagctgctgggcgcacatagtaagcaccttaaagagacctttgtggttaatgtagaaaaatcagtgtctttaggaaaggctgtagaatatttgatgcctttttctgttgctaatagctggttctgcacacacatgcttatgtatgtgcatatagaaattatatctcttaacagtgtctttcacatggtagttactgctgaaatgattgattcattggaactaaaaacaagctgaatagcaacaagagaaatctatagtggtttcaagttcatttcatgctatatatatcagaattacatgtgaagggaactgagttttaattctctttccacagtctatattcaagagctcaccactgatgggctgctttctctttggcctgccactgggtgtcatcagtatcatgtgctatggaatctacacagccgacacagatggaggttatatagaagaacgatatgaagtgtctaaaagtgaaaatgaaaaccaagaacagatagaagagagcaaagaacagcaggagcccagcagtggaggatctgtagtgcctacagtgcaggagcccaaggatgtattagaaaagaagaaagattgagacttgatgactataaaatatttgttaggacttcaaattattgaagagtctatttattgaatttagacatttaatcatgatctttacagaaaagaacatgttattcgtattttgctaatatcaactgcatggattaaagtagtccctccatacatggggaagtgtttggagcaaagagatgaacagtttgtctgaaacaaacacagagcactccatcaaaatttacctgatctttgtgattagaacagaacaattctatttgcatgtttctctatctgaatattctgtgacaaaaagttaagattcttgggcagaatatttaaattggtcagtcaggtagaagatacatgtgtgatatagaaaaataatgcctctcctgctgccatccgtttccctcatatattttggacaagatttatatggacaaaattaagtctttaaaatttaggcactttaaggagaactaataactttttccatgtatcaagattatgaggttaaaaataatgtggttttatatagcatagtggttttattttgttagttatttttaaaggagaagaaatgttactttttaactttatactcagttgcattgtcataaaattttcatatatgcctagataatggggaaaaaaagtcttctgattgactttcgcaaaataaacaggatttactgagtagaggtttcagcccattccttggaatactaacaggtatttcatcagtcattgtaggttgggaagggtctctgttaatcctactctgctttagccagaatagcctagtattttatttctattttatatattgagatttcttctaacatttcctttgataaaaatcttctgctttttgaaaagtggtatgtatcatatttttatgtttctggtgtgtgaactttatggtaacttctactctagaatacgtacgtatgcacccacagacacacacagtttattgacacatctattatgtaatgctgtagacctgtccgtgtctgcttcataaggagtaacgactgacattagcatgtccagtgacaagtcacatccggtgtaaaaaaaagagatcagccagttaccttctccattgtcttagttctgtcacccatttcgtcaagtgacctctcatcttctataaactaatacaggaattctttccaaagcaatgtctaaaaactcttttttttaaagtaacagtttggtatgtttattgtagataaattatttttgaggccttcattttagctaagtttagaatttatattaggcaactatgatttgagtggttattcattgagtaattttccactataaagaattttattgaacatttattaaaaaataatgtaatgcatggtcaaaaaatatgtaattcatggtctggacactgacgttgtttagggatttagtcatcaaggacagccctctgttgtttctaatgccatactaatcaagactgtatggacacttgcatcttaagtactaaggaattactagtgattgttttattttatccatgtactcttttagtatttaataattaaatacctattcttagtgtttgacactccatatttcttttttttggaaatgaaacaaatatgcagtccaaaattcaggaactactagagtgaaatgatattaagtggaaaccagagataaatgctgttaatttaacaagtagattcttctccaaagaatgatgagtgattcttgggaagataaatgttaatgttcccaatagtcaagcttgttttgcagtagtgaaaagcttagatgagtacggatacctcatttgaaactcagcctagtaaggaagtgaaaacttagcagtcagtgacatggggaaatagttatagaaaatgtcactgaattttttcatatttataattagtcatttacatatttttgtcttgttgatcattacctgtaaatgaaagaccttaataggaaaaaaagagtaaagctcagtgtgaatgcaaacatccacaaaatatgatcttcgtttatattctgtgatgttgtttataaatgaatgcctcagttctctgctacccttttcacagctttgtactgtttgccttatattctatttgtgcttttaaagtgtgtctgttgggaaaacaaaatgtgtaggtggtttgtaagtgaataatttttatttcttcttgtattaaaattttgtttttttctctactttgggagatgtttatttacattgtcagactattcacaaaacagattctaaaatttgtttgctcgtatgctgttcccttcaatgtgatatcagagattactatgaatgttagtttcattccgtgaaacattacttccatataaagacagatctcttaataagtgaatctagtggaagaacataggtatcattctaattccatggtaaattttgtcatgattctatatgaataatggggtccttcaggaagttggaatttttgccttctcttttaattgcagtgaagttctctttataacttctaaaattcggaattctagatccttgcttttgcagaatttggtgctcagacaatatttaaggacatttcagcgagacaaagtgcatgtttttatcgagtaccctgtgcaccacattatatctggcaattctttttgtttcattatgtgcatcaatatttttctcagctactattacctgaaacttgtttaacatgtattagacctagaattttcattttctttctcacatagttgcttcctggtatctgatttagaaataacatttaaatgccaagtatctgggggattgaaggaagggtctatatgagcaggtgaattagcagtactgtttttgtttagtggatattgttagtgactttttgtgtgtgttttgctttgggacctttttattttggtgttgcaaaaagtaacatattttcatcattgcttcatacgacatggagttaggacagggaaaaatcattcaacactccttatgcattaaatgatcaaataaaccagtgtaggatattaagactatcaattggtgggattaggcttgacattttatttttataaatatatattttttctgaatgtgtctgagtccaagagtgggcaaaaaataattttctactttggactaatctatagaggtttttgaaagtctgcattactaacttgttgaattcatgatattctgcctatggcacaaattgtaaacctttgtttttctaaaataaagtaattgaaaacctgcaa

SEQ ID NO: 6380 - DNA, 7424 bp, Homo sapiens
tgaattgacagtcccaactgtagttgtactgaatacttcaaaccagcaatatttcttgctagatagacagattaagaatgttgaagacatggtccagtttattaataacattttggatggcacagtagaagtaagttgttcacttctgtttcaaagagatgatggacagggggtagaggagaaactagttcatttctttacttgtgattctgaaaagaatcgttggccatcacccggagtagagggctggacctccatacattgcttctgtccaattataggcagagtagaggtacattctcccagatacagaaggttcttctgtggcagaggttgctaaagatggaagtgtccttttatgggttatttggagggtatttttggttgtcatggtgatggggaggggctgttggctaaggttgaggcttagggatgctaggaagtctgcactgtgtggggtaatcttaatagtgaacttgcctgtctcttagtatgtttctaggtccaaaagtacaattggattaagtcgttaggattggttttctaagaaaatctgcaaataagatgacaatttctcaagaaatgaggaaatttattgagagtaaaagcccccgtggagagttctagacttaatcctataaaatatttctcagaaataagtgaatagtcttaattttctatttttttcctataaattttaactgcagtgtttttcaaactgtgaattgcaacctatattagaaagtcatgaaaccaccgcaagtcacaatcaggttgtgaccagcatgcatcttaattcaatagactaggataaaatttaaaagaaagcgccttcattgcttttgtgaaatgtaattactagtttttgagagttgtttcagttttacacaaactttatttaaaatttgcttacagagtaacaaacataactactttcggtcaaggtgaagaagtttgaaaaacagtcaaatagttaagaatatttttgaaaataatttgttgaaatgaaactctcacctatataaataatcagccttctatttttaagttagtggaatgcaactcagactatttaacaacagattttattgtctcatagagcttggaaatttaaaaaatgagccagattgcaggtatggccgaatataggatttgagtgattttcatcaggaatttttcactctcttcccttcagcactttcatcctcagggaagctctccctgcacagtagcaaaggtatcctgcagcagctctggttttgcggtcccagctaaactcaaaagctggttaggctgtactcagaggtgggtcagcttcagccaagctgtgtgggttatgaatagaggaggaggaattgtttagagtagaatcagggtgaattaacacaagcaggcaggaggaatgctggacatgacacagacaaaaaacaacacagtaaatgtttaccacatggccttttcaggtgattatgtaatattttggagtcaaccatttggcctgcaattgtaaggttatgtaacaccaagtaaatgaagtaatggtgcttaaataatttatttttcttttccttttttgaaggcccaaggaggtgatagcattttgcagagattgaaaagaatagtatttgatgccaaatctactattgtggtaagttgtgacagtttatgtcattgataatgaagaagatataggttctttatgtctagctgtgttaaaaatctgaatttgaaaagattaggtcaaaatatgtctttttaatttgcaggatatgactagtcagtatttaagaaaatatattcattaggtggaaattgtttctaattgtttatatgattgatgagttaaaactaaaattcagaatcaattaacttgatagtataatttaaaagattttatttctgcaacctgccatgtaaagtttttacttagtaatttctatgatttgttgaaagtgcagataatatgaaatttttagttccattacgtgctgtcttctgtaaattggtcatttttgttaaagaaaatgatgtgtgctgggaagtcactttttattttgcaggagtcaaaataaaattttagatcttacaattttaaacatccctgttaattctgtacttttccctagttggtaaataattaagatcatttacagatgtttttccttcttccctttttctctccttccttttttttttcttttattctttttatagaacactttaaatgtggaattaaaatgtgatggatcacatcctttctaacagtgtttactttcatttgtttgtcccagtgtttattcacagttgttatatgtaagtagaatatcaacagtggtagacgaattgacatgtctgcccctaattacccgtctctcttgtttttataattatactttctaaatatatttccttgactttcttcactgtcacctctcacctgattatttctgctattctaatttcctcttcctttcactctatcaaactaatgctcactctgtcaaactaattagatctgttgtatttcccctggatttctttgaagcatcctttccttgacattctcctttccgtgctgctgtgagtatcactactcccctgctcctgccccatctcttcagtgtttttcagcatccctttcctccctttcccctttgcagtccctgggtctgaaccttctcgcttgacactcttacgaaattgttctccctctcccagctttaactgtcaatcaacttgacagcagaggaattcttaaatttgtttgagccctaaacttagttcctgttgtccttctcgagctcttacatgggcattttcattcactgtggcccaaagcaatcataaaaatatagctaacattttttggttagaagtaaattctgggactctttgtttttttccttgcatagtattcttcagtttgctttactttcctgttgccacgagcatggattaggccctaatcacattctgtctagctgctggtctctttcacctggtttccatacttccacttgcccagtctccaatctatattatattccactacacagttaatattactaaaataatcgattttgatcactttccttcccttttccagggacatcagaatactctgtccatctaaagtattttcctcattggtttttgaatattagcttttgctagtgcaaattgcctggtgctcacttgtcccatatcctgcctcgcttctcactcatccttaaattcctacctaaaacacacctttattctgtgaaactttcttttattatctcaatccaaagtgatctttttcttctctgaacttctctatgttctcaagagttatcgttgcaattcatgcagtatattctagttgaaaaccctattcattaaaattacttttactttcctgggagctatgaagacagtatgtaaattgagggaaattagtaagtcaatgaagttttactactaaccagataagtaaaaaatattaaaaatgtcatgtgaaaagagtatgtgtgtaccttctttgtggtaaataacccagccttctccataagcagattcctgtagttcaggaagcaactctaaagctgctgggcgcacatagtaagcaccttaaagagacctttgtggttaatgtagaaaaatcagtgtctttaggaaaggctgtagaatatttgatgcctttttctgttgctaatagctggttctgcacacacatgcttatgtatgtgcatatagaaattatatctcttaacagtgtctttcacatggtagttactgctgaaatgattgattcattggaactaaaaacaagctgaatagcaacaagagaaatctatagtggtttcaagttcatttcatgctatatatatcagaattacatgtgaagggaactgagttttaattctctttccacagtctatattcaagagctcaccactgatgggctgctttctctttggcctgccactgggtgtcatcagtatcatgtgctatggaatctacacagccgacacagatggaggttatatagaagaacgatatgaagtgtctaaaagtgaaaatgaaaaccaagaacagatagaagagagcaaagaacagcaggagcccagcagtggaggatctgtagtgcctacagtgcaggagcccaaggatgtattagaaaagaagaaagattgagacttgatgactataaaatatttgttaggacttcaaattattgaagagtctatttattgaatttagacatttaatcatgatctttacagaaaagaacatgttattcgtattttgctaatatcaactgcatggattaaagtagtccctccatacatggggaagtgtttggagcaaagagatgaacagtttgtctgaaacaaacacagagcactccatcaaaatttacctgatctttgtgattagaacagaacaattctatttgcatgtttctctatctgaatattctgtgacaaaaagttaagattcttgggcagaatatttaaattggtcagtcaggtagaagatacatgtgtgatatagaaaaataatgcctctcctgctgccatccgtttccctcatatattttggacaagatttatatggacaaaattaagtctttaaaatttaggcactttaaggagaactaataactttttccatgtatcaagattatgaggttaaaaataatgtggttttatatagcatagtggttttattttgttagttatttttaaaggagaagaaatgttactttttaactttatactcagttgcattgtcataaaattttcatatatgcctagataatggggaaaaaaagtcttctgattgactttcgcaaaataaacaggatttactgagtagaggtttcagcccattccttggaatactaacaggtatttcatcagtcattgtaggttgggaagggtctctgttaatcctactctgctttagccagaatagcctagtattttatttctattttatatattgagatttcttctaacatttcctttgataaaaatcttctgctttttgaaaagtggtatgtatcatatttttatgtttctggtgtgtgaactttatggtaacttctactctagaatacgtacgtatgcacccacagacacacacagtttattgacacatctattatgtaatgctgtagacctgtccgtgtctgcttcataaggagtaacgactgacattagcatgtccagtgacaagtcacatccggtgtaaaaaaaagagatcagccagttaccttctccattgtcttagttctgtcacccatttcgtcaagtgacctctcatcttctataaactaatacaggaattctttccaaagcaatgtctaaaaactcttttttttaaagtaacagtttggtatgtttattgtagataaattatttttgaggccttcattttagctaagtttagaatttatattaggcaactatgatttgagtggttattcattgagtaattttccactataaagaattttattgaacatttattaaaaaataatgtaatgcatggtcaaaaaatatgtaattcatggtctggacactgacgttgtttagggatttagtcatcaaggacagccctctgttgtttctaatgccatactaatcaagactgtatggacacttgcatcttaagtactaaggaattactagtgattgttttattttatccatgtactcttttagtatttaataattaaatacctattcttagtgtttgacactccatatttcttttttttggaaatgaaacaaatatgcagtccaaaattcaggaactactagagtgaaatgatattaagtggaaaccagagataaatgctgttaatttaacaagtagattcttctccaaagaatgatgagtgattcttgggaagataaatgttaatgttcccaatagtcaagcttgttttgcagtagtgaaaagcttagatgagtacggatacctcatttgaaactcagcctagtaaggaagtgaaaacttagcagtcagtgacatggggaaatagttatagaaaatgtcactgaattttttcatatttataattagtcatttacatatttttgtcttgttgatcattacctgtaaatgaaagaccttaataggaaaaaaagagtaaagctcagtgtgaatgcaaacatccacaaaatatgatcttcgtttatattctgtgatgttgtttataaatgaatgcctcagttctctgctacccttttcacagctttgtactgtttgccttatattctatttgtgcttttaaagtgtgtctgttgggaaaacaaaatgtgtaggtggtttgtaagtgaataatttttatttcttcttgtattaaaattttgtttttttctctactttgggagatgtttatttacattgtcagactattcacaaaacagattctaaaatttgtttgctcgtatgctgttcccttcaatgtgatatcagagattactatgaatgttagtttcattccgtgaaacattacttccatataaagacagatctcttaataagtgaatctagtggaagaacataggtatcattctaattccatggtaaattttgtcatgattctatatgaataatggggtccttcaggaagttggaatttttgccttctcttttaattgcagtgaagttctctttataacttctaaaattcggaattctagatccttgcttttgcagaatttggtgctcagacaatatttaaggacatttcagcgagacaaagtgcatgtttttatcgagtaccctgtgcaccacattatatctggcaattctttttgtttcattatgtgcatcaatatttttctcagctactattacctgaaacttgtttaacatgtattagacctagaattttcattttctttctcacatagttgcttcctggtatctgatttagaaataacatttaaatgccaagtatctgggggattgaaggaagggtctatatgagcaggtgaattagcagtactgtttttgtttagtggatattgttagtgactttttgtgtgtgttttgctttgggacctttttattttggtgttgcaaaaagtaacatattttcatcattgcttcatacgacatggagttaggacagggaaaaatcattcaacactccttatgcattaaatgatcaaataaaccagtgtaggatattaagactatcaattggtgggattaggcttgacattttatttttataaatatatattttttctgaatgtgtctgagtccaagagtgggcaaaaaataattttctactttggactaatctatagaggtttttgaaagtctgcattactaacttgttgaattcatgatattctgcctatggcacaaattgtaaacctttgtttttctaaaataaagtaattgaaaacctgcaa

SEQ ID NO: 6381 - DNA, 7424 bp, Homo sapiens
tgaattgacagtcccaactgtagttgtactgaatacttcaaaccagcaatatttcttgctagatagacagattaagaatgttgaagacatggtccagtttattaataacattttggatggcacagtagaagtaagttgttcacttctgtttcaaagagatgatggacagggggtagaggagaaactagttcatttctttacttgtgattctgaaaagaatagttggccatcacccggagtagagggctggacctccatacattgcttctgtccaattataggcagagtagaggtacattctcccagatacagaaggttcttctgtggcagaggttgctaaagatggaagtgtccttttatgggttatttggagggtatttttggttgtcatggggatggggaggggctgttggctaaggttgaggcttagggatgctaggaagtctgcactgtgtggggtaatcttaatagtgaacttgcctgtctcttagtatgtttctagggccaaaagtacaattggattaagtcgttaggattggttttctaagaaaatctgcaaataagatgacaatttctcaagaaatgaggaaatttattgagagtaaaagcccccgtggagagttctagacttaatcctataaaatatttctcagaaataagtgaatagtcttaattttctatttttttcctataaattttaactgcagtgtttttcaaactgtgaattgcaacctatattagaaagtcatgaaaccaccgcaagtcacaatcaggttgtgaccagcatgcatcttaattcaatagactaggataaaatttaaaagaaagcgccttcattgcttttgtgaaatgtaattactagtttttgagagttgtttcagttttacacaaactttatttaaaatttgcttacagagtaacaaacataactactttcggtcaaggtgaagaagtttgaaaaacagtcaaatagttaagaatatttttgaaaataatttgttgaaatgaaactctcacctatataaataatcagccttctatttttaagttagtggaatgcaactcagactatttaacaacagattttattgtctcatagagcttggaaatttaaaaaatgagccagattgcaggtatggccgaatataggatttgagtgattttcatcaggaatttttcactctcttcccttcagcactttcatcctcagggaagctctccctgcacagtagcaaaggtatcctgcagcagctctggttttgcggtcccagctaaactcaaaagctggttaggctgtcctcagaggtgggtcagcttcagccaagctgtgtgggttatgaatagaggaggaggaattgtttagagtagaatcagggtgaattaacacaagcaggcaggaggaatgctggacatgacacagacaaaaaacaacacagtaaatgtttaccacatggccttttcagggtgattatgtaatattttggagtcaaccatttggcctgcaattgtaaggttatgtaacaccaagtaaatgaagtaatggtgcttaaataatttatttttcttttccttttttgaaggcccaaggaggtgatagcattttgcagagattgaaaagaatagtatttgatgccaaatctactattgtggtaagttgtgacagtttatgtcattgataatgaagaagatataggttctttatgtctagctgtgttaaaaatctgaatttgaaaagattaggtcaaaatatgtctttttaatttgcaggatatgactagtcagtatttaagaaaatatattcattaggtggaaattgtttctaattgtttatatgattgatgagttaaaactaaaattcagaatcaattaacttgatagtataatttaaaagattttatttctgcaacctgccatgtaaagtttttacttagtaatttctatgatttgttgaaagtgcagataatatgaaatttttagttccattacgtgctgtcttctgtaaattggtcatttttgttaaagaaaatgatgtgtgctgggaagtcactttttattttgcaggagtcaaaataaaattttagatcttacaattttaaacatccctgttaattctgtacttttccctagttggtaaataattaagatcatttacagatgtttttccttcttccctttttctctccttccttttttttttcttttattctttttatagaacactttaaatgtggaattaaaatgtgatggatcaaatcctttctaacagtgtttactttcatttgtttgtcccagtgtttattcacagttgttatatgtaagtagaatatcaacagtggtagacgaattgacatgtctgcccctaattacccgtctctcttgtttttataattatactttctaaatatatttccttgactttcttcactgtcacctctcacctgattatttctgctattctaatttcctcttcctttcactctatcaaactaatgctcactctgtcaaactaattagatctgttgtatttcccctggatttctttgaagcatcctttccttgacattctcctttccgtgctgctgtgagtatcactactcccctgctcctgccccatctcttcagtgtttttcagcatccctttcctccctttcccctttgcagtccctgggtctgaaccttctcgcttgacactcttacgaaattgttctccctctcccagctttaactgtcaatcaacttgacagcagaggaattcttaaatttgtttgagccctaaacttagttcctgttgtccttctcgagctcttacatgggcattttcattcactgtggcccaaagcaatcataaaaatatagctaacattttttggttagaagtaaattctgggactctttgtttttttccttgcatagtattcttcagtttgctttactttcctgttgccacgagcatggattaggccctaatcacattctgtctagctgctggtctctttcacctggtttccatacttccacttgcccagtctccaatctatattatattccactacacagttaatattactaaaataatcgattttgatcactttccttcccttttccagggacatcagaatactctgtccatctaaagtattttcctcgttggtttttgaatattagcttttgctagtgcaaattgcctggtgctcacttgtcccatatactgcctccttctcactcatccttaaattcctacctaaaacacacctttattctgtgaaactttcttttattatctcaatccaaagtgatctttttcttctctgaacttctctatgttctcaagagttatcgttgcaattcatgcagtatattctagttgaaaaccctattcattaaaattacttttactttcctgggagctatgaagacagtatgtaaattgagggaaattagtaagtcaatgaagttttactactaaccagataagtaaaaaatattaaaaatgtcatgtgaaaagagtatgtgtgtaccttctttgtggtaaataacccagccttctccataagcagattcctgtggttcaggaagcaactctaaagctgctgggcgcacatagtaagcaccttaaagagacctttgtggttaatgtagaaaaatcagtgtctttaggaaaggctgtagaatatttgatgcctttttctgttgctaatagctggttctgcacacacatgcttatgtatgtgcatatagaaattatatctcttaacagtgtctttcacatggtagttactgctgaaatgattgattcattggaactaaaaacaagctgaatagcaacaagagaaatctatagtggtttcaagttcatttcatgctatatatatcagaattacatgtgaagggaactgagttttaattctctttccacagtctatattcaagagctcaccactgatgggctgctttctctttggcctgccactgggtgtcatcagtatcatgtgctatggaatctacacagccgacacagatggaggttatatagaagaacgatatgaagtgtctaaaagtgaaaatgaaaaccaagaacagatagaagagagcaaagaacagcaggagcccagcagtggaggatctgtagtgcctacagtgcaggagcccaaggatgtattagaaaagaagaaagattgagacttgatgactataaaatatttgttaggacttcaaattattaaagagtctatttattgaatttagacatttaatcatgatctttacagaaaagaacatgttattcgtattttgctaatatcaactgcatggattaaagtagtccctccatacatggggaagtgtttggagcaaagagatgaacagtttgtctgaaacaaacacagagcactccatcaaaatttacctgatctttgtgattagaacagaacaattctatttgcatgtttctctatctgaatattctgtgacaaaaagttaagattcttgggcagaatatttaaattggtcagtcaggtagaagatacatgtgtgatatagaaaaataatgcctctcctgctgccatccgtttccctcatatattttggacaagatttatatggacaaaattaagtctttaaaatttaggcactttaaggagaactaataactttttccatgtatcaagattatgaggttaaaaataatgtggttttatatagcatagtggttttattttgttagttatttttaaaggagaagaaatgttactttttaactttatactcagttgcattatcataaaattttcatatatgcctagataatggggaaaaaaagtcttgtgattgactttcgcaaaataaacaggatttactgagtagaggtttcagcccattccttggaatactaacaggtatttcatcagtcattgtaggttgggaagggtctctgttaatcctactctgctttagccagaatagcctagtattttatttctattttatatattgagatttcttctaacatttcctttgataaaaatcttctgctttttgaaaagtggtatgtatcatatttttatgtttctggtgtgtgaactttatggtaacttctactctagaatacgtacgtatgcacccacagacacacacagtttattgacacatctattatgtaatgctgtagacctgtccgtgtctgcttcataaggagtaacgactgacattagcatgtccagtgacaagtcacatccggtgtaaaaaaaagagatcagccagttaccttctccattgtcttagttctgtcacccatttcgtcaagtgacctctcatcttctataaactaatacaggaattctttccaaagcaatgtctaaaaactcttttttttaaagtaacagtttggtatgtttattgtagataaattatttttgaggccttcattttagctaagtttagaatttatattaggcaactatgatttgagtggttattcattgagtaattttccactataaagaattttattgaacatttattaaaaaataatgtaatgcatggtcaaaaaatatgtaattcatggtctggacactgacgttgtttagggatttagtcatcaaggacagccctctgttgtttctaatgccgtactaatcaagactgtatggacacttgcatcttaagtactaaggaattactagtgattgttttattttatccatgtactcttttagtatttaataattaaatacctattcttagtgtttgacactccatatttcttttttttggaaatgaaacaaatatgcagtccaaaattcaggaactactagagtgaaatgatattaagtggaaaccagagataaatgctgttaatttaacaagtagattcttctccaaagaatgatgagtgattcttgggaagataaatgttaatgttcccaatagtcaagcttgttttgcagtagtgaaaagcttagatgagtacggatacctcatttgaaactcagcctagtaaggaagtgaaaacttagcagtcagtgacatggggaaatagttatagaaaatgtcactgaattttttcatatttataattagtcatttacatatttttgtcttgttgatcattacctgtaaatgaaagaccttaataggaaaaaaagagtaaagctcagtgtgaatgcaaacatccacaaaatatgatcttcgtttatattctgtgatgttgtttataaatgaatgcctcagttctctgctacccttttcacagctttgtactgtttgccttatattctatttgtgcttttaaagtgtgtctgttgggaaaacaaaatgtgtaggtggtttgtaagtgaataatttttatttcttcttgtattaaaattttgtttttttctctactttgggagatgtttatttacattgtcagactattcacaaaacagattctaaaatttgtttgctcgtatgctgttcccttcaatgtgatatcagagattactatgaatgttagtttcattccgtgaaacattacttccatataaagacagatctcttaataagtgaatctagtggaagaacataggtatcattctaattccatggtaaattttgtcatgattctatatgaataatggggtccttcaggaagttggaatttttgccttctcttttaattgcagtgaagttctctttataacttctaaaattcggaattctagatccttgcttttgcagaatttggtgctcagacaatatttaaggacatttcagcgagacaaagtgcatgtttttatcgagtaccctgtgcaccacattatatctggcaattctttttgtttcattatgtgcatcaatatttttctcagctactattacctgaaacttgtttaacatgtattagacctagaattttcattttctttctcacatagttgcttcctggtatctgatttagaaataacatttaaatgccaagtatctgggggattgaaggaagggtctatatgagcaggtgaattagcagtactgtttttgtttagtggatattgttagtgactttttgtgtgtgttttgctttgggacctttttattttggtgttgcaaaaagtaacatattttcatcattgcttcatacgacatggagttaggacagggaaaaatcattcaacactccttatgcattaaatgatcaaataaaccagtgtaggatattaagactatcaattggtgggattaggcttgacattttatttttataaatatatattttttctgaatgtgtctgagtccaagagtgggcaaaaaataattttctactttggactaatctatagaggtttttgaaagtctgcattactaacttgttgaattcatgatattctgcctatggcacaaattgtaaacctttgtttttctaaaataaagtaattgaaaacctgcaa

SEQ ID NO: 6382 - DNA, 2485 bp, Homo sapiens
aaactgcctcactgttacttcatcaatcacagcttcaaatgtctcaatcagcagaagattgtaaattcgatctttcagggaaattaatctattctgaaaggcaataacatgaagcaaggcaaaggaggcactgatggtttagtatactacataagggatttttttgttctattattaagaaaatctagacctgaaatgttttctcaactcttattgtactgtgtatatttatattgttgtcgtggcggctgtttttaaagggaaagtgttggttctattaatttgttaagtgtccatccaggtgggcctacctgattccacatatataagtacatatctgcttataaagcgctgtaaatggcagcaaggctgtttttggagaagagtttgggttttcctaccatccctttgaatgctacacatccgtctattttaacccaagtagttcgtatttcagatatattttctcctttcatctcctctcactactgcagagtccagtaatacctagcataggattctgtcctgtgtcaaatggctaaaataaatttttgccccaatagacatgctgcctcattcaaaagagctgccgctgtcatcttgaggttccaggtagtgagagaagaaactcgacctgccagggtcaacagccatgaagaggtggggggagtcatgattcataaacactgaaagaagtcaaggcttttggcagagagtgttgatttagatttttagtcttgattgatgggcagtatgcatcggtgtctagctgaagttgtctttaaatgcccttactcgtcacagtttaaacacttaggatgtggcaatcttaagtatcaatggcattttatgtccagctaacatcctaaagcattagaaattaaaaacgaaagacttttaaaaacatacatcaaacatgcttgcaccagagaagctttttaaaataatacactctcatagccaggtgctaatttaattttacttatgaaattaagagaggtgatgggttctagcaacagatattttcacggacatattctaaaaccactagagaattcgctacctctcagagccatcgatgctttgagctacctttataaacagggcacaaatgtttactgctgtggtttacaagaaaagggctactcacttattttgaaaccaacgaaccaacttttaactagggtgaacaaagcactcaaagtgctttgtgaaattggagcatacagagattttgagcttcaagtatttgctagttttaaaaagaatacaccttttctttaccttgtagcagcaattaaaagtcacacaaagcttgcatcgagtagggccaactgccacttgggtagcctatggtcacattcaatactgagaatgacttggaactcacagattaatatgaaagaagcagcgttcatcccaagacccatgctcacaattacagctccgtgccctgaggtagagttgagatttggattaagaaatagatttctaatacgactcaagatcatcctacaatattttctttggaaactaatttagcccatgatattttaaagagagacaagagaaggcctatttatcttgtctaagtgaacggcatttgtatattcataagctatttttggtaagaattttaaatcttttagctcaaggcctacagggcatcatgatctttgccttccttgaaaatacaatttaaattgtacaaacactttataaaaagctaattattggtgttagaacatgaccccacacaatgctgcttgacccctgaaactgacattcatgagcataacctttgttacattgttctttttgatgtaatttgtagaaatgttttttagttcgtaatggaaaatgtatgtaccctgaaaaattacttattttgtttaactttggtataaaggtgttgggcattttcttggggagggggggattacaaaagaagtttgtctcccacatcaaaaaacgttcaaagaaattaagtatttattatattttttgcagatgtttccatacaattcacataacctttttgtaaagagagatgaagaaatggattaaagatttttaatatttgaaatggtaaatagaactaatttattgtaatatatttctgttatttatagatgtttccttaatgttttactgtgcattaccactttcatttaagccttatccttgtgaatttaccatttcttttttaaaacatgtctagatgcatattttaaataactggaatgtaaatcactagcatatctgaattcccaaatgtaatttttaaaaattattttggtttggaaaaaaaagattcatttgaaagccttcagatggaggggtgggaacatttttatggctttatgaattggaatttcataggcttatttacctagattgtgtgtgaacaaaaaaatattgtaaatagatgaatgtttcccataatgtaaaaagaagaaattaataaaataattaatgcactgct

SEQ ID NO: 6383 - DNA, 2486 bp, Homo sapiens
aaactgcctcactgttacttcatcaatcacagcttcaaatgtctcaatcagcagaagattgtaaattcgatcttttcagggaaattaatctattctgaaaggcaataacatgaagcaaggcaaaggaggcactgatggtttagtatactacataagggatttttttgttctattattaagaaaatctagacctgaaatgttttctcaactcttattgtactgtgtatatttatattgttgtcgtggcggctgtttttaaagggaaagtgttggttctattaatttgttaagtgtccatccaggtgggcctacctgattccacatatataagtacatatctgcttataaagcgctgtaaatggcagcaaggctgtttttggagaagagtttgggttttcctaccatccctttgaatgctacacatccgtctattttaacccaagtagttcgtatttcagatatattttctcctttcatctcctctcactactgcagagtccagtaatacctagcataggattctgtcctgtgtcaaatggctaaaataaatttttgccccaatagacatgctgcctcattcaaaagagctgccgctgtcatcttgaggttccaggtagtgagagaagaaactcgacctgccagggtcaacagccatgaagaggtggggggagtcatgattcataaacactgaaagaagtcaaggcttttggcagagagtgttgatttagatttttagtcttgattgatgggcagtatgcatcggtgtctagctgaagttgtctttaaatgcccttactcgtcacagtttaaacacttaggatgtggcaatcttaagtatcaatggcattttatgtccagctaacatcctaaagcattagaaattaaaaacgaaagacttttaaaaacatacatcaaacatgcttgcaccagagaagctttttaaaataatacactctcatagccaggtgctaatttaattttacttatgaaattaagagaggtgatgggttctagcaacagatattttcacggacatattctaaaaccactagagaattcgctacctctcagagccatcgatgctttgagctacctttataaacagggcacaaatgtttactgctgtggtttacaagaaaagggctactcacttattttgaaaccaacgaaccaacttttaactagggtgaacaaagcactcaaagtgctttgtgaaattggagcatacagagattttgagcttcaagtatttgctagttttaaaaagaatacaccttttctttaccttgtagcagcaattaaaagtcacacaaagcttgcatcgagtagggccaactgccacttgggtagcctatggtcacattcaatactgagaatgacttggaactcacagattaatatgaaagaagcagcgttcatcccaagacccatgctcacaattacagctccgtgccctgaggtagagttgagatttggattaagaaatagatttctaatacgactcaagatcatcctacaatattttctttggaaactaatttagcccatgatattttaaagagagacaagagaaggcctatttatcttgtctaagtgaacggcatttgtatattcataagctatttttggtaagaattttaaatcttttagctcaaggcctacagggcatcatgatctttgccttccttgaaaatacaatttaaattgtacaaacactttataaaaagctaattattggtgttagaacatgaccccacacaatgctgcttgacccctgaaactgacattcatgagcataacctttgttacattgttctttttgatgtaatttgtagaaatgttttttagttcgtaatggaaaatgtatgtaccctgaaaaattacttattttgtttaactttggtataaaggtgttgggcattttcttggggagggggggattacaaaagaagtttgtctcccacatcaaaaaacgttcaaagaaattaagtatttattatattttttgcagatgtttccatacaattcacataacctttttgtaaagagagatgaagaaatggattaaagatttttaatatttgaaatggtaaatagaactaatttattgtaatatatttctgttatttatagatgtttccttaatgttttactgtgcattaccactttcatttaagccttatccttgtgaatttaccatttcttttttaaaacatgtctagatgcatattttaaataactggaatgtaaatcactagcatatctgaattcccaaatgtaatttttaaaaattattttggtttggaaaaaaaagattcatttgaaagccttcagatggaggggtgggaacatttttatggctttatgaattggaatttcataggcttatttacctagattgtgtgtgaacaaaaaaatattgtaaatagatgaatgtttcccataatgtaaaaagaagaaattaataaaataattaatgcactgct

SEQ ID NO: 6384 - DNA, 2485 bp, Homo sapiens
aaactgcctcactgttacttcatcaatcacagcttcaaatgtctcaatcagcagaagattgtaaattcgatctttcagggaaattaatctattctgaaaggcaataacatgaagcaaggcaaaggaggcactgatggtttagtatactacataagggatttttttgttctattattaagaaaatctagacctgaaatgttttctcaactcttattgtactgtgtatatttatattgttgtcgtggcggctgtttttaaagggaaagtgttggttctattaatttgttaagtgtccatccaggtgggcctacctgattccacatatataagtacatatctgcttataaagcgctgtaaatggcagcaaggctgtttttggagaagagtttgggttttcctaccatccctttgaatgctacacatccgtctattttaacccaagtagttcatatttcagatatattttctcctttcatctcctctcactactgcagagtccagtaatacctagcataggattctgtcctgtgtcaaatggctaaaataaatttttgccccaatagacatgctgcctcattcaaaagagctgccgctgtcatcttgaggttccaggtagtgagagaagaaactcgacctgccagggtcaacagccatgaagaggtcgggggagtcatgattcataaacactgaaagaagtcaaggcttttggcagagagtgttgatttagatttttagtcttgattgatgggcagtatgcatcggtgtctagctgaagttgtctttaaatgcccttactcgtcacagtttaaacacttaggatgtggcaatcttaagtatcaatggcattttatgtccagctaacatcctaaagcattagaaattaaaaacgaaagacttttaaaaacatacatcaaacatgcttgcaccagagaagctttttaaaataatacactctcatagccaggtgctaatttaattttacttatgaaattaagagaggtgatgggttctagcaacagatattttcacggacatattctaaaaccactagagaattcgctacctctcagagccatcgatgctttgagctacctttataaacagggcacaaatgtttactgctgtggtttacaagaaaagggctactcacttattttgaaaccaacgaaccaacttttaactagggtgaacaaagcactcaaagtgctttgtgaaattggagcatacagagattttgagcttcaagtatttgctagttttaaaaagaatacaccttttctttaccttgtagcagcaattaaaagtcacacaaagcttgcatcgagtagggccaactgccacttgggtagcctatggtcacattcaatactgagaatgacttggaactcacagattaatatgaaagaagcagcgttcatcccaagacccatgctcacaattacagctccgtgccctgaggtagagttgagatttggattaagaaatagatttctaatacgactcaagatcatcctacaatattttctttggaaactaatttagcccatgatattttaaagagagacaagagaaggcctatttatcttgtctaagtgaacggcatttgtatattcataagctatttttggtaagaattttaaatcttttagctcaaggcctacagggcatcatgatctttgccttccttgaaaatacaatttaaattgtacaaacactttataaaaagctaattattggtgttagaacatgaccccacacaatgctgcttgacccctgaaactgacattcatgagcataacctttgttacattgttctttttgatgtaatttgtagaaatgttttttagttcgtaatggaaaatgtatgtaccctgaaaaattacttattttgtttaactttggtataaaggtgttgggcattttcttggggagggggggattacaaaagaagtttgtctcccacatcaaaaaacgttcaaagaaattaagtatttattatattttttgcagatgtttccatacaattcacataacctttttgtaaagagagatgaagaaatggattaaagatttttaatatttgaaatggtaaatagaactaatttattgtaatatatttctgttatttatagatgtttccttaatgttttactgtgcattaccactttcatttaagccttatccttgtgaatttaccatttcttttttaaaacatgtctagatgcatattttaaataactggaatgtaaatcactagcatatctgaattcccaaatgtaatttttaaaaattattttggtttggaaaaaaaagattcatttgaaagccttcagatggaggggtgggaacatttttatggctttatgaattggaatttcataggcttatttacctagattgtgtgtgaacaaaaaaatattgtaaatagatgaatgtttcccataatgtaaaaagaagaaattaataaaataattaatgcactgct

SEQ ID NO: 6385 - DNA, 541 bp, Homo sapiens
ggccgccaagcgcgccgcgtccgtccgccagaactcggccaccgagagcgccgagagcatcgagatctacatccccgaggcgcagacccggctctgagcgccccgcagcccggccgccgccgccaagcatctgtcccctcctcccccggccgctcctctgccggctgcctctccccctccgagcccgtccgctcccgagctcggtgacttccactgtcgcggtgtagttgtccacctcgcaggagccgccccccgggcccccctcagccccccacttcccgtacccgtttgcccatctccttcttcaccgagcttcgccccctgtcctgatgccgtcgccctgcctcatactgagatccaaccctttattttctgggcaaagccaaacccacctgtgtagaagtgatgcctttaggtcacccgccgtcctcagttctctcgagctagtctgttcagcaatataaaaccatagggtatttcagaaatccagtatcacagggtgatcctttgggacttaccgtcttccacgtgaaagaaacta

SEQ ID NO: 6386 - DNA, 361 bp, Homo sapiens
aattgacccccaaaaagggtaaattagaattttttatgatgtggacttgcacttatttgttgcctgaaaatgccacaactctaaaatttgtttccacagtgctttgtcctaatccccaccaacttttcaccgacatgcaacaaccttggaaattagtaagcacaggagccactttttctgatttttgtacataagcaagacctatgccagtcaccagaataacacactgtacttttgaaactgctttgaaagaggaatgatcaggtgactgaatctctgtgaggttacaaaggcctcatcgctttggttcgtgcactgactattcatgtagtctgaaccgtgattacactttttgcctttt

SEQ ID NO: 6387 - DNA, 361 bp, Homo sapiens; identical to SEQ ID NO: 6386

SEQ ID NO: 6388 - DNA, 541 bp, Homo sapiens; identical to SEQ ID NO: 6385

SEQ ID NO: 6389 - DNA, 361 bp, Homo sapiens
aattgacccccaaaaagggtaaattagaattttttatgatgtggacttgcacttacttgttgcctgaaaatgccacaactctaaaatttgtttccacagtgctttgtcctaatccccaccaacttttcaccgacatgcaacaaccttggaaattagtaagcacaggagccactttttctgatttttgtacagaagcaagacctatgccagtcaccagaataacacactgtacttttgaaactgctttgaaagaggaatgatcaggtgactgaatctctgtgaggttacaaaggcctcatcgctttggttcgtgcactgactattcatgtagtctgaaccgtgattacactttttgcctttt

SEQ ID NO: 6390 - DNA, 5456 bp, Homo sapiens
cctgtgaagaccctggcgactggaccgcggccattggaggtacgaggttcctccttgtgggcttctcacaagccctggcggggtggtggagtctctgcccacctcgggccacacaggggctccaggagtccaggtggggccggcagggtctttgtggagaaaggcctggttccagcagcattgtcgtgggcgctctgaggctgacctgctagattttggcactgtggatgtgtctgggcagtgcaagcccagcacagtgccaggcgctgccggctctggcatggtgtcctcgtggctatggtgatgtccttgtggctgtggtggctgccccgtgtagcagcactttccctgcccactgaacccactccttccctcacagatgacacatttaccttctggcgggggctgaaggacgccggcctgctggacgaggtcatccaggagttccaccaggagctggtggagaccatgagaggcctgcagcagcgggtccaggaccctcccctgcagcttcgaggtgagaagctgcatcttccctcttgctggctactcagcccaggagtctctgcaggaggtgaggccactggccctcctgcccctaggcccttctgtgctgctgggttggaggctgaatctaggcttgggactcctgctgtgctgaggctgaacttggtgggaggatcgccttgatgtatctcagtcttctccctctgaactgagctcctggctggctgggttcctgaggagcagcctcagtggtggtgttctcactctctaggaagagcccaggctctcaccgagcgtccacgtgactctctaggaaggtcccgggctctcaccgagcgtccgcgtggctctctaggaagggcttgggctctcactgagtgtccgcgttaccctttaagatgctgtacttctcaacaacatcgtgcagaacttcggcatgctggacctggtgaagaaggtgctggccagccacaagtgccagatggaccgctcgcgggagcagtacgcccgggacctggcaggtatgctgagaccacccccgtcccgtcccctgggcggtaggctgaggacctggagcccacgggctcaccccacggctgtgcatccacctgcacttcctggagtcaccgccaccacggcgagcttctccgcactgctgttgtgcgaggaaaacaacctgaagcttaagtgaggtagtcagacctctccattgcactaagcttacatttaccggcatttctgtgatgaaccaagtagttatttaagagaaaatgacagaggccaggcgcggtggctcacgcctgttatcccagcgctttgggaggccgaggcgggcggatcacttcaggctaggagtttgagaccagcctggccaacgtggtgaaaccccatctctgctgaaaaaaacaaaacaaaactgggcatggtggtgtgtgcctgtaatcccagctactcgggaggctggcaggcaattgcttgagcccaggaggtggaagttgcagggagctgagatcacaccactgcactccagtctgggtgacagagcgagaccctgtctcaaaaaaaaacaatgacagagaatgggaagggctggtcctgaccccgctcagagctcaagcccctgatattggtgcgtttcctccatgctcctcttggggtctgtgcttactgtgtgttcactgtgtgtgtgttcagtgtgtgtgtgttcactgcgtgttcactgtgtgttcaatgtgtgtgtattcagtgtgtgtgttcactgtgttcagtgtgtgtgtattcagtgtgtgtgcactgtgtgttcactcttcactttgtgtgttcactgtttgtgttcattgtgtgtgtgcactctgcatgtgtgtgtgcatgtttatgtttaaacacatgtgccacatgtgctgcttttcctcctctctctcttaatatgtcacaagagcaactttccacgctgggtgtgtgaaagctcatgcggggatctgagacggcatttccacgcttgcacgcaggccctgggtcagtgcaggagggtctgagacgggattgccacgcttgcacacaggccccgggtcagtgcagaccctgggtcagcacaggctggtgtctaccccgagggccatcttgggccccgtctcccacagacctcacctttggcggccatgtggtcatctgggtttgtggcatcaggtgagcagacctgggttgccactgacccaggggccacccagatggtgtggcgtgtctgcccccatcccctgcatgccgccatccatgcccccgtcccctgtgtgatgccatctgtacctccctgcagccctggagcagcagtgtgatgagcatcgtcgccgagccaaggagctgaagcacaagtcccagcacctcagcaacgtgctcatgacgctgacgccggtctccctgccaccgcctgtgaagcggccccggcttgcacgtgccacatcaggaccggccgccatggcctcgcaggtgctcacccagtctgcccagctggcgcttggcccgggcgtgcccgtcccccagctgaccagcgtgccccttggtaaagtggtgtccaccctgccgtccaccgtcctgggcaagggttcccttcaggcgccccccgccagctccccggcctccccgctgctcgggggatacacagtcttggcctcttccggctccacctaccccagcacagtggagatccacccggacgcgtccagcctcacggtcctgagcacggccgccgtgcaggacggtagcacggtgttcaaggtggtcagcccgctacagctgctcacgttgcctggcctgggccccaccctgcagaacgtggcccaggcctcgcctggctccagcacaattgtgacagtgcccgcaggggctgcccccgggcctgaggagcacacggccaccattgaggtggctgccatggcagaggaccacgagcggaagtagccgacaggagggcgaggcccctgggacggacagggctggctgtctctcagccgcggcagcagggagcgggcagaggccgcagggctggctcgggcaggtgggtcacgtggtctgcagaaccaaagagaggaatcgccaaaacaaatcacgagaagagagaaggggacagaacagcgagagcaacctggaaaatcggtcttcaggtcccacgtttcctcccccttttttcttgggaaatatatttttccatctgttgcttattaatactgtttacacattgggccttgatcaggagccaggtgggcgggggctagggggagcctgggtgcagcagagacagaggaagcagagccaggtgccgagcgcgaccctgcaggtgctggacgcggtgcagcaggtcacgaggcccccatgtctgcacccagccaggtccctggggacgttactaactcatgacttgggagctaagcccaagtgtgaaacctctggatcctatggatttggtttcttcccacagttttctgtaggtttagtgtggctggcgccccgttctcctccagttgggaacatgcacccggagcttggggtgcagatcctgatgggtgcctgcctcccccgcccccagccggtgctcaggtggcccaggggccgcacagacgaggcgtggtccaggcattgttgcacatgtactgagggtgtttttaagtgaattgcttagtaggcttctaggaagagtcagatttatagcattttcaaccaaaataatggtgagtgcctaggcttcccgagttagctctttgggtggcccctgagcccctgtgagtgcacttgaccgggtgcggaggtcctgggcagcctgtccctgagccggcccctcccaggggtctgagatccatgaggtgtgtccctagggcttcagtcctggggcagaggcataaacagaaccagtcactatggaggtcgaggattcccatgtgggcccttcagcttgggctgcttggccacggaacagcccttggctccctggcccccggcccccatgcagcccctgggctggcccttggtggtctctgtccaagggagagcccctgggtgttcaggaggctgccccgggtgggctgctcagggcagctgccgaaggtggagcccagagcctgtctggaagggctgtctgtggctgtcctgagacctggccttggactcacaaggaagaccaggctgaggcccctccaggccagggtcctggggcaggcatctcagggagcagccagcccaggcctcctgccgtctccaacagggcatgtcccgggaggaccctgagtgccagattcccctggacgctcctgctgattctgtcggcagttgaaggcccgtctgaggccccgcaatgcgagggtcctgtgtcccacttcactgctccgaagggaactggctggctgtccgtccagtgagcggcccagaccccacctctgcgccattgtcaccagggccctgtcctggctgccctcacccatgtcaagctactgaggctgtgtcttgtttgttttctctgttacatttttgtttgctgttgtcacagtcagctggtttcggcgtgatgttgatcttttgatgtacatactccgttttaaactcatttccactctagttgagttctgcagcatgcagcggtatgaccctacgggggtcaggagagccctgcggcccccacccaccagctcagaacctgtcactaatacagctgcctgtgaccctgggacccgcaaccttccagctgcttccctttgtcaaagtcacgagtgcgtctgccttgacagccctcgtcaacagaacttccagtgggttgtgggttcatttcctttctttttaagaacagggttgggaccttttctgcccctgccccttagctactgaggcatagggagaggaagttaatttcagagccatacaaaaataagccacaaccagcttcagaattaattcccaatcccccattccaccagggctgggagcccattcccagtgcttcccaaggccctcggggacatctaccgccaacccagctgcttctggcaggggctccaagccccagcgtggggaagggccctggagaagccctcatcctcatgggaaccacactgcagtgggtggggaaggttgttgtcagcaccgcccccggctcctccaggtcctgctggctcctcgggggcagggttccctggacctcccagttctgcgccttggggccagccagtactcagagaggaggaccttctcaaccacgtacagaacacgggttttcatggctgcctttggtttggttttctgagaagataggattggattggattttgcagagggtgagaacttctctgtgcctgctcagaggcgccctagggaagggccatgtttgagttttgctttgtatgttgttttgcaagtatctgcctggtactttgatttaaaataaaaacaattttcatagtttgagtgtc

SEQ ID NO: 6391 - DNA, 5457 bp, Homo sapiens
cctgtgaagaccctggcgactggaccgcggccattggaggtacgaggttcctccttgtgggcttctcacaagccctggcggggtggtggagtctctgcccacctcgggccacacaggggctccaggagtccaggtggggccggcagggtctttgtggagaaaggcctggttccagcagcattgtcgtgggcgctctgaggctgacctgctagattttggcactgtggatgtgtctgggcagtgcaagcccagcacagtgccaggcgctgccggctctggcatggtgtcctcgtggctatggtgatgtccttgtggctgtagtgggtgccccgtgtagcagcactttccctgcccactgaacccactccttccctcacagatgacacatttaccttctggcgggggctgaaggacgccggcctgctggacgaggtcatccaggagttccaccaggagctggtggagaccatgagaggcctgcagcagcgggtccaggaccctcccctgcagcttcgaggtgagaagctgcatcttccctcttgctggctactcagcccaggagtctctgcaggaggtgaggccactggccctcctgcccctaggcccttctgtgctgctgggttggaggctgaatctaggcttgggactcctgctgtgctgaggctgaacttggtgggaggatcgccttgatgtatctcagtcttctccctctgaactgagctcctggctggctgggttcctgaggagcagcctcagtggtggtgttctcactctctaggaagagcccaggctctcaccgagcgtccacgtgactctctaggaaggtcccgggctctcaccgagcgtccgcgtggctctctaggaagggcttgggctctcactgagtgtccgcgttaccctttaagatgctgtacttctcaacaacatcgtgcagaacttcggcatgctggacctggtgaagaaggtgctggccagccacaagtgccagatggaccgctcgcgggagcagtacgcccgggacctggcaggtacgctgagaccacccccgtcccgtcccctgggcggtaggctgaggacctggagcccacgggctcaccccacggctgtgcatccacctgcacttcctggagtcgccgccaccacggcgagcttctccgcactgctattgtgcgaggaaaacaacctgaagcttaagtgaggtagtcagacctctccattgcactaagcttacatttaccggcatttctgtgatgaaccaagtagttatttaagagaaaatgacagaggccaggcgcagtggctcacgcctgttatcccagcgctttgggaggccgaggcgggcggatcacttcaggctaggagtttgagaccagcctggccaacgtggtgaaaccccatctctgctgaaaaaaacaaaacaaaactgggcatggtggtgtgtgcctgtaatcccagctactcgggaggctggcaggcaattgcttgagcccaggaggtggaagttgcagggagctgagatcacaccactgcactccagtctgggtgacagagcgagaccctgtctcaaaaaaaaaacaatgacagagaatgggaagggctggtcctgaccccgctcagagctcaagcccctgatattggtgcgtttcctccatgctcctcttggggtctgtgcttactgtgtgttcactgtgtgtgtgttcagtgtgtgtgtgttcactgcgtgttcactgtgtgttcaatgtgtgtgtattcagtgtgtgtgttcactgtgttcagtgtgtgtgtattcagtgtgtgtgcactgtgtgttcactcttcactttgtgtgttcactgtttgtgttcattgtgtgtgtgcactctgcatgtgtgtgtgcatgtttatgtttaaacacatgtgccacatgtgctgcttttcctcctctctctcttaatatgtcacaagagcaactttccacgctgggtgtgtgaaagctcatgcggggatctgagacggcatttccacgcttgcatgcaggccctgggtcagtgcaggagggtctgagacgggattgccacgcttgcacacaggccccgggtcagtgcagaccctgggtcagcacaggctggtgtctaccccgagggccatcttgggccccgtctcccacagacctcacctttggcggccatgtggtcatctgggtttgtggcatccggtgagcagacctgggttgccactgacccaggggccacccagatggtgtggcgtgtctgcccccatcccctgcatgccgccatccatgcccccgtcccctgtgtgatgccatctgtacctccctgcagccctggagcagcagtgtgatgagcatcgtcgccgagccaaggagctgaagcacaagtcccagcacctcagcaacgtgctcatgacgctgacgccggtctccctgccaccgcctgtgaagcggccccggcttgcacgtgccacatcaggaccggccgccatggcctcgcaggtgctcacccagtctgcccagctggcgcttggcccgggcgtgcccgtcccccagctgaccagcgtgccccttggtaaagtggtgtccaccctgccgtccaccgtcctgggcaagggttcccttcaggcgccccccgccagctccccggcctccccgctgctcgggggatacacagtcttggcctcttccggctccacctaccccagcacagtggagatccacccggacgcgtccagcctcacggtcctgagcacggccgccgtgcaggacggtagcacggtgttcaaggtggtcagcccgctgcagctgctcacgttgcctggcctgggccccaccctgcagaacgtggcccaggcctcgcctggctccagcacaattgtgacagtgcccgcaggggctgcccccgggcctgaggagcacacggccaccattgaggtggctgccatggcagaggaccacgagcggaagtagccgacaggagggcgaggcccctgggacggacagggctggctgtctctcagccgcggcagcagggagcgggcagaggccgcagggctggctcgggcaggtgggtcacgtggtctgcagaaccaaagagaggaatcgccaaaacaaatcacgagaagagagaaggggacagaacagcgagagcaacctggaaaaccggtcttcaggtcccacgtttcctcccccttttttcttgggaaatatatttttccatctgttgcttattaatactgtttacacattgggccttgatcaggagccaggtgggcgggggctagggggagcctgggtgcagcagagacagaggaagcagagccaggtgccgagcgcgaccctgcaggtgctggacgcggtgcagcaggtcacgaggcccccatgtctgcacccagccaggtccctggggacgttactaactcatgacttgggagctaagcccaagtgtgaaacctctggatcctatggatttggtttcttcccacagttttctgtaggtttagtgtggctggcgccccgttctcctccagttgggaacatgcacccggagcttggggtgcagatcctgatgggtgcctgcctcccccgcccccagccggtgctcaggtggcccaggggccgcacagacgaggcgtggtccaggcattgttgcacatgtactgagggtgtttttaagtgaattgcttagtaggcttctaggaagagtcagatttatagcattttcaaccaaaataatggtgagtgcctaggcttcccgagttagctctttgggtggcccctgagcccctgtgagtgcacttgaccgggtgcggaggtcctgggcagcctgtccctgagccggcccctcccaggggtctgagatccatgaggtgtgtccctagggcttcagtcctggggcagaggcataaacagaaccagtcactatggaggtcgaggattcccatgtgggcccttcagcttgggctgcttggccacggaacagcccttggctccctggcccccggcccccatgcagcccctgggctggcccttggtggtctctgtccaagggagagcccctgggtgttcaggaggctgccccgggtgggctgctcagggcagctgccgaaggtggagcccagagcctgtctggaagggctgtctgtggctgtcctgagacctggccttggactcacaaggaagaccaggctgaggcccctccaggccagggtcctggggcaggcatctcagggagcagccagcccaggcctcctgccgtctccaacagggcatgtcccgggaggaccctgagtgccagattcccctggacgctcctgctgattctgtcggcagttgaaggcccgtctgaggccccgcaatgcgagggtcctgtgtcccacttcactgctccgaagggaactggctggctgtccgtccagtgagcggcccagaccccacctctgcgccattgtcaccagggccctgtcctggctgccctcacccatgtcaagctactgaggctgtgtcttgtttgttttctctgttacatttttgtttgctgttgtcacagtcagctggtttcggcgtgatgttgaccttttgatgtacatactccgttttaaactcatttccactctagttgagttctgcagcatgcagcggtatgaccctacgggggtcaggagagccctgcggcccccacccaccagctcagaacctgtcactaatacagctgcctgtgaccctgggacccgcaaccttccagctgcttccctttgtcaaagtcacgagtgcgtctgccttgacagccctcgtcaacagaacttccagtgggttgtgggttcatttcctttctttttaagaacagggttgggaccttttctgcccctgccccttagctactgaggcatagggagaggaagttaatttcagagccatacaaaaataagccacaaccagcttcagaattaattcccaatcccccattccaccagggctgggagcccattcccagtgcttcccaaggccctcggggacatctaccgccaacccagctgcttctggcaggggctccaagccccagcgtggggaagggccctggagaagccctcatcctcatgggaaccacactgcagtgggtggggaaggttgttgtcagcaccgcccccggctcctccaggtcctgctggctcctcgggggcagggttccctggacctcccagttctgcgccttggggccagccagtactcagagaggaggaccttctcaaccacgtacagaacacgggttttcatggctgcctttggtttggttttctgagaagataggattggattggattttgcagagggtgagaacttctctgtgcctgctcagaggcgccctagggaagggccatgtttgagttttgctttgtatgttgttttgcaagtatctgcctggtactttgatttaaaataaaaacaattttcatagtttgagtgtc

SEQ ID NO: 6392 - DNA, 5457 bp, Homo sapiens
cctgtgaagaccctggcgactggaccgcggccattggaggtacgaggttcctccttgtgggcttctcacaagccctggcggggtggtggagtctctgcccacctcgggccacacaggggctccaggagtccaggtggggccggcagggtctttgtggagaaaggcctggttccagcagcattgtcgtgggcgctctgaggctgacctgctagattttggcactgtggatgtgtctgggcagtgcaagcccagcacagtgccaggcgctgccggctctggcatggtgtcctcgtggctatggtgatgtccttgtggctgtggtggctgccccgtgtagcagcactttccctgcccactgaacccactccttccctcacagatgacacatttaccttctggcgggggctgaaggacgccggcctgctggacgaggtcatccaggagttccaccaggagctggtggagaccatgagaggcctgcagcagcgggtccaggaccctcccctgcagcttcgaggtgagaagctgcatcttccctcttgctggctactcagcccaggagtctctgcaggaggtgaggccactggccctcctgcccctaggcccttctgtgctgctgggttggaggctgaatctaggcttgggactcctgctgtgctgaggctgaacttggtgggaggatcgccttgatgtatctcagtcttctccctctgaactgagctcctggctggctgggttcctgaggagcagcctcagtggtggtgttctcactctctaggaagagcccaggctctcaccgagcgtccacgtgactctctaggaaggtcccgggctctcaccgagcgtccgcgtggctctctaggaagggcttgggctctcactgagtgtccgcgttaccctttaagatgctgtacttctcaacaacatcgtgcagaacttcggcatgctggacctggtgaagaaggtgctggccagccacaagtgccagatggaccgctcgcgggagcagtacgcccgggacctggcaggtatgctgagaccacccccgtcccgtcccctgggcggtaggctgaggacctggagcccacgggctcaccccacggctgtgcatccacctgcacttcctggagtcgccgccaccacggcgagcttctccgcactgctattgtgcgaggaaaacaacctgaagcttaagtgaggtagtcagacctctccattgcactaagcttacatttaccggcatttctgtgatgaaccaagtagttatttaagagaaaatgacagaggccaggcgcggtggctcacgcctgttatcccagcgctttgggaggccgaggcgggcggatcacttcaggctaggagtttgagaccagcctggccaacgtggtgaaaccccatctctgctgaaaaaaacaaaacaaaactgggcatggtggtgtgtgcctgtaatcccagctactcgggaggctggcaggcaattgcttgagcccaggaggtggaagttgcagggagctgagatcacaccactgcactccagtctgggtgacagagcgagaccctgtctcaaaaaaaaaacaatgacagagaatgggaagggctggtcctgaccccgctcagagctcaagcccctgatattggtgcgtttcctccatgctcctcttggggtctgtgcttactgtgtgttcactgtgtgtgtgttcagtgtgtgtgtgttcactgcgtgttcactgtgtgttcaatgtgtgtgtattcagtgtgtgtgttcactgtgttcagtgtgtgtgtattcagtgtgtgtgcactgtgtgttcactcttcactttgtgtgttcactgtttgtgttcattgtgtgtgtgcactctgcatgtgtgtgtgcatgtttatgtttaaacacatgtgccacatgtgctgcttttcctcctctctctcttaatatgtcacaagagcaactttccacgctgggtgtgtgaaagctcatgcggggatctgagacggcatttccacgcttgcatgcaggccctgggtcagtgcaggagggtctgagacgggattgccacgcttgcacacaggccccgggtcagtgcagaccctgggtcagcacaggctggtgtctaccccgagggccatcttgggccccgtctcccacagacctcacctttggcggccatgtggtcatctgggtttgtggcatccggtgagcagacctgggttgccactgacccaggggccacccagatggtgtggcgtgtctgcccccatcccctgcatgccgccatccatgcccccgtcccctgtgtgatgccatctgtacctccctgcagccctggagcagcagtgtgatgagcatcgtcgccgagccaaggagctgaagcacaagtcccagcacctcagcaacgtgctcatgacgctgacgccggtctccctgccaccgcctgtgaagcggccccggcttgcacgtgccacatcaggaccggccgccatggcctcgcaggtgctcacccagtctgcccagctggcgcttggcccgggcgtgcccgtcccccagctgaccagcgtgccccttggtaaagtggtgtccaccctgccgtccaccgtcctgggcaagggttcccttcaggcgccccccgccagctccccggcctccccgctgctcgggggatacacagtcttggcctcttccggctccacctaccccagcacagtggagatccacccggacgcgtccagcctcacggtcctgagcacggccgccgtgcaggacggtagcacggtgttcaaggtggtcagcccgctgcagctgctcacgttgcctggcctgggccccaccctgcagaacgtggcccaggcctcgcctggctccagcacaattgtgacagtgcccgcaggggctgcccccgggcctgaggagcacacggccaccattgaggtggctgccatggcagaggaccacgagcggaagtagccgacaggagggcgaggcccctgggacggacagggctggctgtctctcagccgcggcagcagggagcgggcagaggccgcagggctggctcgggcaggtgggtcacgtggtctgcagaaccaaagagaggaatcgccaaaacaaatcacgagaagagagaaggggacagaacagcgagagcaacctggaaaatcggtcttcaggtcccacgtttcctcccccttttttcttgggaaatatatttttccatctgttgcttattaatactgtttacacattgggccttgatcaggagccaggtgggcgggggctagggggagcctgggtgcagcagagacagaggaagcagagccaggtgccgagcgcgaccctgcaggtgctggacgcggtgcagcaggtcacgaggcccccatgtctgcacccagccaggtccctggggacgttactaactcatgacttgggagctaagcccaagtgtgaaacctctggatcctatggatttggtttcttcccacagttttctgtaggtttagtgtggctggcgccccgttctcctccagttgggaacatgcacccggagcttggggtgcagatcctgatgggtgcctgcctcccccgcccccagccggtgctcaggtggcccaggggccgcacagacgaggcgtggtccaggcattgttgcacatgtactgagggtgtttttaagtgaattgcttagtaggcttctaggaagagtcagatttatagcattttcaaccaaaataatggtgagtgcctaggcttcccgagttagctctttgggtggcccctgagcccctgtgagtgcacttgaccgggtgcggaggtcctgggcagcctgtccctgagccggcccctcccaggggtctgagatccatgaggtgtgtccctagggcttcagtcctggggcagaggcataaacagaaccagtcactatggaggtcgaggattcccatgtgggcccttcagcttgggctgcttggccacggaacagcccttggctccctggcccccggcccccatgcagcccctgggctggcccttggtggtctctgtccaagggagagcccctgggtgttcaggaggctgccccgggtgggctgctcagggcagctgccgaaggtggagcccagagcctgtctggaagggctgtctgtggctgtcctgagacctggccttggactcacaaggaagaccaggctgaggcccctccaggccagggtcctggggcaggcatctcagggagcagccagcccaggcctcctgccgtctccaacagggcatgtcccgggaggaccctgagtgccagattcccctggacgctcctgctgattctgtcggcagttgaaggcccgtctgaggccccgcaatgcgagggtcctgtgtcccacttcactgctccgaagggaactggctggctgtccgtccagtgagcggcccagaccccacctctgcgccattgtcaccagggccctgtcctggctgccctcacccatgtcaagctactgaggctgtgtcttgtttgttttctctgttacatttttgtttgctgttgtcacagtcagctggtttcggcgtgatgttgaccttttgatgtacatactccgttttaaactcatttccactctagttgagttctgcagcatgcagcggtatgaccctacgggggtcaggagagccctgcggcccccacccaccagctcagaacctgtcactaatacagctgcctgtgaccctgggacccgcaaccttccagctgcttccctttgtcaaagtcacgagtgcgtctgccttgacagccctcgtcaacagaacttccagtgggttgtgggttcatttcctttctttttaagaacagggttgggaccttttctgcccctgccccttagctactgaggcatagggagaggaagttaatttcagagccatacaaaaataagccacaaccagcttcagaattaattcccaatcccccattccaccagggctgggagcccattcccagtgcttcccaaggccctcggggacatctaccgccaacccagctgcttctggcaggggctccaagccccagcgtggggaagggccctggagaagccctcatcctcatgggaaccacactgcagtgggtggggaaggttgttgtcagcaccgcccccggctcctccaggtcctgctggctcctcgggggcagggttccctggacctcccagttctgcgccttggggccagccagtactcagagaggaggaccttctcaaccacgtacagaacacgggttttcatggctgcctttggtttggttttctgagaagataggattggattggattttgcagagggtgagaacttctctgtgcctgctcagaggcgccctagggaagggccatgtttgagttttgctttgtatgttgttttgcaagtatctgcctggtactttgatttaaaataaaaacaattttcatagtttgagtgtc

SEQ ID NO: 6393 - DNA, 2156 bp, Homo sapiens
cctggtgggaggatcatggccgttttagtcgttagtgctactgtaacaaaataccgcaggctggggggcttgcaagcaacagaggttcatttatgcagttctgcacgctggcaagtcggagatcaagagcatcagccgatttggtgcctggtgagggttttgaatcagccgattcggtaactcgtgagggttttgaaggtgtcctgcaaatcgctggaggacaatagtaagaacagcctgggccccaccttgacccgaggctggcgtcggaggcaccgccgctcacaggtaaggagacctctcagtggcacaggggcctgcgcccgccagtcaggagctcaacagactcacgcccaggggggccccttcctcccctctcccaggttcagtcccagagccttctcgtcaccaacgctgttcccctccctgctgccatggtccacccaaggccataggagcctgcacaccagccacaggccagcctcccagactcacggcccagcaagaggcagacatagaagtccacgctgtgtggtcactgggtgtggtggctcccgcctgtcatcctagcactttgggaggctgaggcgggtggatcacctgaggtcaggagcttgagaccagcctggccaacatggtgaaaccccatctctactaaaaatacaaaattagctgggcgtggtggcaggtgcctgtaatcccagctactcgggagactgaggcaggagaatcgcttgaacctgggaggcagaggttgcagtgagccgagattgcaccactgcacttcagcctgggcgaccagagtgaaattctgtctcaaaaaaaaaaaaagtccatgccgcgtggttccacttaggaaagttggacacgtccctcaaggcagaatggcatcgaaagccgggtcactgggtgccctccgggacggtggctggaggggcacagggcgctggttccaagagtccactctgaaacctgcccttctgccatggctgctcttccacgcttgtgccctgctgcagcccagagctgataaacgcacaggcatgtccttccagcacacattggcacgggaccaccctccccacaggtcatctgtcagctcctcagattccatgtgtacaagacagagctcctgcttcatattccctcccatgctctgtccccatcgtgccccgtcggggaggggagcaccaacacctgcccacaggctcagcccaccttcctgcaacctcacatccacgatgcatccccttcttgtgaggccaggccccctccatctctctcaggtcgatgtaactacccggttcccacctctggcccttcctaccctcctgctacccttccggctgtgacccttcccatttgctgacacgtcctgagcacccccatcattccctctgcccctggagggggctgcacccctcagtatcccaccatgatatctcctcctcctgatacttcatggggtttcagaggccacaagatacaaacctacaaggggtcatgtcttgtacccactgagtgtccccaggagccggtgcagcactggccactcctcagctgaggacacaggagtggggagtgggctgtggcctgtccagcccagggcactccagaaggcagagtccccacagagggtggagtgctttgtgacatgccactgtttggatgggccacagtataccattcagcgactgagggacatcttggtttcttccaaggtttggcaattatgagtaaagctgctgttaaaaaccctcgtgcaagtttttgtgtggacctaagctttcaactcatctgggtaaataccaaggggtgaaactgctagattgtgtggtaagaatgtatttcattttgtaagaaactactgaagtgtcttccgccagtggcagcaccatctcgcattcccacccgcaatgactgagattcctgttgctccacgtcctcacctgcaatgactgagattcctgttgctccacgtcctcacctgcaatgactgaggttcctgttcctctacgtcctcacctgcaatgactgaggttcctgttcctctacgtcctcacctgcaatgactgaggttcctgctccacgtcctcacctgcaatgactgaggttcctgctccacgtcctcacctgcaatgactgaggttcctgct

SEQ ID NO: 6394 - DNA, 289 bp, Homo sapiens
tgagggcgagccccacgggcgacagacgcagccgcagagctctcggtgggaaaacaagtcaagcagaaggatcaccttgtctcgctcctgacggtccagtcgaaagtgcttgttgagtacaatcgtaaatggacaagaggaggaaagtgttgaggatttgctgaaattgggtgacgggttcaagggatttgtttctgcgttgtttctcctttgtatgtttgacaacgtctgtgattaaaaatagccataaaatataaggcaggtacactttggctgtactagtgcgtat

SEQ ID NO: 6395 - DNA, 2157 bp, Homo sapiens
cctggtgggaggatcatggccgttttagtcgttagtgctactgtaacaaaataccgcaggctggggggcttgcaagcaacagaggttcatttatgcagttctgcacgctggcaagtcggagatcaagagcatcagccgatttggtgcctggtgagggttttgaatcagccgattcggtaacccgtgagggttttgaaggtgtcctgcaaatcgctggaggacaatagtaagaacagcctgggccccaccttgacccgaggctggcgtcggaggcaccgccgctcacaggtaaggagacctctcagtggcacaggggcctgcgcccgccagtcaggagctcaacagactcacgcccaggggggccccttcctcccctctcccaggttcagtcccagagccttctcgtcaccaacgctgttcccctccctgctgccatggtccacccaaggccataggagcctgcacaccagccacaggccagcctcccagactcacggcccagcaagaggcagacatagaagtccacgctgtgtggtcactgggtgtggtggctcccgcctgtcatcctagtactttgggaggctgaggcgggtggatcacctgaggtcaggagcttgagaccagcctggccaacatggtgaaaccccatctctactaaaaatacaaaaattagctgggcgtggtggcgtgtgcctgtaatcccagctacttgggagactgaggcaggagaatcgcttgaaccaggaagtcagaggttgcagtgagccgagatcacaccactgcactccagcctgggcgacaagagtgaaattctgtctcaaaaaaaaaaaaagtccatgccgcgtggttccacttaggaaagttggacacgtccctcaaggcagaatggcatcgaaagccgggtcactgggtgccctccgggacggtggctggaggggcacagggcgctggttccaagagtccactctgaaacctgcccttctgccatggctgctcttccacgcttgtgccctgctgcagcccagagctgataaacgcacaggcatgtccttccagcacacattggcacgggaccaccctccccacaggtcatctgccagctcctcagattccatgtgtacgagacagagctcctgcttcatattccctcccatgctctgtccccatcgtgccccgtcggggaggggagcaccaacacctgcccacaggctcagcccaccttcctgcaacctcacatccacgatgcatccccttcttgtgaggccaggccccctccatctctctcaggtcgatgtaactacccggttcccacctctggcccttcctaccctcctgctacccttccggctgtgacccttcccatttgctgacacgtcctgagcacccccatcattccctctgcccctggagggggctgcacccctcagtatcccaccatgatatctcctcctcctgatacttcatggggtttcagaggccacaagatacaaacctacaaggggtcatgtcttgtacccactgagtgtccccaggagccggtgcagcactggccactcctcagctgaggacacaggagtggggagtgggctgtggcctgtccagcccagggcactccagaaggcagagtccccacagagggtggagtgctttgtgacatgccactgtttggatgggccacagtataccattcagcgactgagggacatcttggtttcttccaaggtttggcaattatgagtaaagctgctgttaaaaaccctcgtgcaagtttttgtgtggacctaagctttcaactcatctgggtaaataccaaggggtgaaactgctagattgtgtggtaagaatgtatttcattttgtaagaaactactgaagtgtcttccgccagtggcagcaccatctcacattcccacccgcaatgactgagattcctgttgctccacgtcctcacctgcaatgactgagattcctgttgctccacgtcctcacctgcaatgactgaggttcctgttcctctacgtcctcacctgcaatgactgaggttcctgttcctctacgtcctcacctgcaatgactgaggttcctgctccacgtcctcacctgcaatgactgaggttcctgctccacgtcctcacctgcaatgactgaggttcctgct

SEQ ID NO: 6396 - DNA, 289 bp, Homo sapiens
tgagggcgagccccacgggcgacagacgcagccgcagagctctcggtgggaaaacaaatcaagcagaaggatcaccttgtctcgctcctgacggtccagtcgaaagtgcttgttgagtacaatcgtaaatggacaagaggaggaaagtgttgaggatttgctgaaattgggtgacgggttcaagggatttgtttctgcgttgtttctcctttgtatgtttgacaacgtctgtgattaaaaatagccataaaatataaggcaggtacactttggctgtactagtgcgtat

SEQ ID NO: 6397 - DNA, 2156 bp, Homo sapiens
cctggtgggaggatcatggccgttttagtcgttagtgctactgtaacaaaataccgcaggctggggggcttgcaagcaacagaggttcatttatgcagttctgcacgctggcaagtcggagatcaagagcatcagccgatttggtgcctggtgagggttttgaatcagccgattcggtaactcgtgagggttttgaaggtgtcctgcaaatcgctggaggacaatagtaagaacagcctgggccccaccttgacccgaggctggcgtcggaggcaccgccgctcacaggtaaggagacctctcagtggcacaggggcctgcgcccgccagtcaggagctcaacagactcacgcccaggggggccccttcctcccctctcccaggttcagtcccagagccttctcgtcaccaacgctgttcccctccctgctgccatggtccacccaaggccataggagcctgcacaccagccacaggccagcctcccagactcacggcccagcaagaggcagacatagaagtccacgctgtgtggtcactgggtgtggtggctcccgcctgtcatcctagcactttgggaggctgaggcgggtggatcacctgaggtcaggagcttgagaccagcctggccaacatggtgaaaccccatctctactaaaaatacaaaattagctgggcgtggtggcaggtgcctgtaatcccagctactcgggagactgaggcaggagaatcgcttgaacctgggaggcagaggttgcagtgagccgagattgcaccactgcacttcagcctgggcgaccagagtgaaattctgtctcaaaaaaaaaaaaagtccatgccgcgtggttccacttaggaaagttggacacgtccctcaaggcagaatggcatcgaaagccgggtcactgggtgccctccgggacggtggctggaggggcacagggcgctggttccaagagtccactctgaaacctgcccttctgccatggctgctcttccacgcttgtgccctgctgcagcccagagctgataaacgcacaggcatgtccttccagcacacattggcacgggaccaccctccccacaggtcatctgtcagctcctcagattccatgtgtacaagacagagctcctgcttcatattccctcccatgctctgtccccatcgtgccccgtcggggaggggagcaccaacacctgcccacaggctcagcccaccttcctgcaacctcacatccacgatgcatccccttcttgtgaggccaggccccctccatctctctcaggtcgatgtaactacccggttcccacctctggcccttcctaccctcctgctacccttccggctgtgacccttcccatttgctgacacgtcctgagcacccccatcattccctctgcccctggagggggctgcacccctcagtatcccaccatgatatctcctcctcctgatacttcatggggtttcagaggccacaagatacaaacctacaaggggtcatgtcttgtacccactgagtgtccccaggagccggtgcagcactggccactcctcagctgaggacacaggagtggggagtgggctgtggcctgtccagcccagggcactccagaaggcagagtccccacagagggtggagtgctttgtgacatgccactgtttggatgggccacagtataccattcagcgactgagggacatcttggtttcttccaaggtttggcaattatgagtaaagctgctgttaaaaaccctcgtgcaagtttttgtgtggacctaagctttcaactcatctgggtaaataccaaggggtgaaactgctagattgtgtggtaagaatgtatttcattttgtaagaaactactgaagtgtcttccgccagtggcagcaccatctcacattcccacccgcaatgactgagattcctgttgctccacgtcctcacctgcaatgactgagattcctgttgctccacgtcctcacctgcaatgactgaggttcctgttcctctacgtcctcacctgcaatgactgaggttcctgttcctctacgtcctcacctgcaatgactgaggttcctgctccacgtcctcacctgcaatgactgaggttcctgctccacgtcctcacctgcaatgactgaggttcctgct

SEQ ID NO: 6398 - DNA, 289 bp, Homo sapiens; identical to SEQ ID NO: 6396

SEQ ID NO: 6399 - DNA, 1773 bp, Homo sapiens
gttttggtttgttttaatcctaagttttgcattgagcaagatactctttttcctcttttctaagtctaacatctgtgggtttgcttttcagccatagtattgattacatgttaagtcttagctctctaagtcgttgtaagctttatgtgtactggctttgttctttgattttatttcatgggaaatacaaacaattcagtgcataaataaatactggaagaagttgagttgaattgcagacactaatagtcgcagcagtgtcattagtgctgcatccgaagacacctcaccagggccctccagcgtcctggcttgtttcgctggtcgccatggttgttagtgcagacataagctttgtgaggctgactgatggcagatggagggacccggctgctccccactctaacctctagcataaggaagctggctggaggataaatgggttaagcatgctttaatgtacatttaatgtacatttctattctcaaaacatgttgattatttttttgccttgatgaaaacaataatcctataaaatattaattgcctgctttagaaggaaaacttctgaactggaagcaactttcgttagctatagacctttaatgaaggcagaatttcttatataaaaaaggagctaggaaagtagaagtgtaaatagaaatatagtttatcaacattactatccacttctgatgtggacattaaagggatattaatcttttaagtccagagactctcctaggtaagtcttatgacccctcagcttaaatctcttgcccagccctctcccctgaactcccaagttgtgtttctgtctgctgacttggcgtcactgatggatagctcagacctgtcatggcacaaaactgaattcctgaccattcccaaactgttctccccacggtcttcccaggttcattagtggcaaatccttccttccatttggccgcctgagatcttaaaagtaatccctgattccatacccaacatcccttgagtcaacaagttgttttgtttctgacttcagactagaacaagaaccttccacctctgagctcctcttctgcttccactgtagcgcaagacctctgaggtagaagttcagccccacagggcaagcacttctctctgtttcgttcatcactgattctcctgtgccaggatcagtgcctggcacatagtagggatacaataaatatttgcccaatgaatgaattcagaaactgactttaagtatataatgttaaactataaattgcacttgaatgattaaaaatacaattttatttctaagcaggactagaattttaagtaattttggaactctagtttgtcatcttgctaataacattatctaccatttataacctgctttccatatgccaggtactgtttaaggtgctataatacttaattctcaagacaaacctagcagataagaagaattttatagacaagaaaactggccgggcgtggtggctcacacctgtaatcccaacactttgggaggctgaggcaggcggatcgcctgaggtcaggaattcaagagcagcctggccaacatggtgaaaccttgcctctactaaaaatacaaaaattagccaggcgtagtggcacatgccattagccccagcttctcgggaggctgaggcaagagaatcgcttgaacccagcagacggaagttgcattgagccaagatcgtgtcatagcactccagcctgggtgacagagcgagactccatctcaaaaaaaaaaaaaaagaaaagaaa

SEQ ID NO: 6400 - DNA, 576 bp, Homo sapiens
tttttttttaattttttaattttttttcttttttcttttttttttttttaattgatcattcttgggtgtttctcgcagagggggatttggcagggtcataggacaatagtggagggaaggtcagcagataaacaagtgaacaaaggtctctggttttcctaggcagaggaccctgcggccttccgcagtgtttgtgtccctgggtacttgagattagggagtggtgatgactcttagcaagcatgctgccttcaagcatctgtttaacaaagcacatcttgcaccgcccttaatccacttaaccctgagtggacacagcacatgtttcagagagcaccgggttgggggtaaggtcacagatcatgttttcatttatctttaagcagaaattactttagcttcccttagtgtgtggtgttgcttagtgatgttaatctggatgttcaggtaggcttttattgtctttctgaaagaatcagtaatttaactgagtattttggaaataacaataccacaccttttcatagagcttaacagtttataaagcattgcactccatcttctcatcactggatc

SEQ ID NO: 6401 - DNA, 4131 bp, Homo sapiens
agtcttgctggaatgagtacctgacaactcggatcgagcagaaccttgttttgaattgcacctgccccattgccgactgccccgcccagcccaccggagccttcattcgtgccatcgtctcctcgccagaggtcatctccaaggtatcccctctcgtctgagagaggctccagtgcagagccaaaggagtgtgccccagggagtgggctgagctatggggtgctgggggcctggaggtgtggcatcctggagagccataccctcacctcgtggcacctgcgtctccacagtatgagaaggcgctcctgcgtggctatgtggagagctgctccaacctgacctggtgcaccaacccccagggctgcgaccgcatcctgtgccgccagggcctgggctgtgggaccacctgctccaagtgtggctgggcctcttgcttcaactgtagcttccctgaggtgggagccccacactggccctgaccctgagcaaggattcacactccttccctgcttaatatccccaccccgccacacacacagactgtgacttgtccttcctcagcctctgccacccagttgagctctgttcctcttcctggagccctccaaatgtgatctgtgcctgctcccctctctcctgtgcacaccagccatgctgccctcacggctcagctgtgtccccaccatgccctcttgccttaggcacactaccctgctagctgtggccatatgtctcagtgggtcgacgacggtggctactatgacggcatgagcgtggaggcgcagagcaagcacctggccaagctcatctccaagcgctgtcccagctgtcaggctcccatcgagaagaacgaggggtgcctgcagtaagaaggggggtactgtggggagccagagggcaaggaggggggaggaggcctggcagaaggaggggggaacgggcttagtgtaaagctcagcaaaagagggtggttcctcagccgcccctcacgtggcagcctccacggtgacttcctggatcttaatgttccttctcccactcgtaagtccacactgactgggggagttcaaaagcagaggtgcattcagcagggctgggtatgactaaggagactatcagggcaggagcagaggccacagcatcaacagcggtacatctgggcccttggcattcctggcacacccctgcccagaggcaggagtccctgaccagccagcttcctccatagcatgacctgtgccaaatgtaaccatggattctgctggcgctgcctcaagtcctggaagccaaatcacaaagactattacaactgctctgccatggtaaggcgctgggcactaggggagggcagaggcccagagccgtcggggaggggtgctgctaccaggtcctgggcagacagggctccttgtgcagtgcagcattctagctgttgggatagaggctcactgtggggaagacagagccacctgggcctgcagatgctggaaagtctgttcacagggaccttcagctccagaacaggacttctcataccgaggtggctacagaaaggctggggagggctgggcactctcagaaggcagcagggcagagcaggaaagagcagggaccctgcatttagagcctggctctgctgcttagcatgtggctttgagcaagttcatttacttctccaagcctcaacagcctctgcaaaaggggtgaataatatgacctactccacacagtcatgaggactgaatgaagataatcgggggaggtgtagaaaggcctccgtgaatgttggcttttccacttattaactccctcctgtccaaacaaaacacccaatagccctcccaacgtatccttgctaggtaagcaaggcagctcgccaggagaagcggtttcaggactataatgagaggtgcactttccatcaccaggcgcgggtgagtcgggaggaaacagcgggtagatgcctgcagaagcaggttggggtggtggggtggaggggggtgggctgaaggtctgaccgggcaggtggtgctgcgccacctgtgctggtactgatacaccttcctccacacaggagtttgctgtgaacttgcggaaccgggtgtctgccatccatgaagtgcccccgcccagatccttcaccttcctcaatgatgcctgccagggactggagcaggctcggaaggtggtagcgggtgggggaagagagcaggggaggggtgtgccaaatgggtctggggggcttggctgctttcatcggacttgcctgggtgaagggaatgaggagagggcaggcgggagagctgatgggagcccctgcaggtgctggcctacgcctgcgtgtacagcttctacagccaggacgcagagtacatggatgtggtggagcagcagacagagaacctggagctgcacaccaatgccctgcagatcctcctgggtgagccacccctgccagccaggccctcctcctgcctcctcccctctgttgcacagcccggcccctcccagacaggtcaagcggcacccttaccttccctctctcctcttcctcttcattcttcatggccttctcactgcctggctgttaaagctcaggtcgaaagcctacattgtaaggtgcccaagggcgcagatgttcgtggatgtttcttggtttctggtctttaccctgctcccctagggagcttcatgagaatgtctagagctgcacctggtgcttggtagacgttccataggtgtttgttggaggaaggaatggatgagaatgagaagggagggagcctctgtgcctgccccctctgcagaggaaaccctgctgcggtgcagagacctggcctcctccctgcgcctcctgcgggccgactgcctcagcacgggcatggagctgctccggcggatccaggagaggctgcttgccatcctgcagcattctgcccaggtactgcccggcccagaccccttctgctcctgcattctgcgggagttgaggtcctcctgtcccagcacagcccctgccctggggcgagtccagaaggaaaggcagcaaagcgggtgaatggatgttagacctgggcgcacatcccggcttttgggccaacctgcctgatgctgctggaccctatcacttcacctcctggggattcctacaaaataaaggggttggctagcccacatcaagggtatttggtcaggtgcctatcagaatcacttggggaacttttccagactgtacttcccagatagggatttgaaatcctaagagtgggcatcaggggattggggtcactggagcaagggctctcccaggctctctccagctctaatgcactgatgctgagtctaaactgtgagtcctgtcctcaggttgcttactgactggtaagtcacatgggcagaaaagacatagattctgtaagctctttaagcacagggtcgtgtgcctcacctggtaccccgtatccctggagaccatctgtgggtgaactcacaaaggcagtgtttcatgaagtgctgtgctgggaggggagcagtcctagcaggagcttggccctcccagagcatcagtggaaggaatgctgggtccaaaggccccatgccctctacctccttctcaaatccttctgtctgctcaccaggatttccgggttggtcttcagagtccatcagtagaggcctgggaggcaaaaggacccaacatgcctggcagtcagtaagtggggtgggcagagccatggaggaggcagtgggacatggcagcctcctctgggctgagtgtggtggctctccctaggccccaggcctcctcagggccagaggcagaagaggaggaggaagacgatgaggatgatgtgcccgagtggcagcaggatgagtttgatgaggagctggacaatgacagcttctcctacgatgagtctgagaacctggaccaagagactttcttctttggtgatgaggaagaggatgaagatgaggcctatgactgagggggcagatgcaggaaacacctagagcagccccagagtcacggggctgagggggcgggagctgcccctgtcatagggagggggattcccagcgtctgtagtgcttcctgtttgctgaataaaggtctctttctcacacaca

SEQ ID NO: 6402 - DNA, 4131 bp, Homo sapiens; identical to SEQ ID NO: 6401

SEQ ID NO: 6403 - DNA, 107 bp, Homo sapiens
caagtcagttttgtagagaagaggctgggtctgttggaggcataagtcagagacaggagcatccggacggtcattggagataagccactggagctgggaggagagac

SEQ ID NO: 6404 - DNA, 300 bp, Homo sapiens
cccaactctttttttttttttttttttctgagagggagtctcgctctgttgcccaggctggagtgcagtggcgtgatctgggctcactgcaagctccacctcccgggttcacgctattctcttgcctcagcctcctgagtagctgggactacaggcgctcaccacctcgcccggctaattttttgcatttttagtagagacggggtttcaccgttttagccaggattgtctcgatctcctgacctcgtgatccgcccatctcggcctcccaaagtgctgggattacaggtgtgagccacc

SEQ ID NO: 6405 - DNA, 107 bp, Homo sapiens; identical to SEQ ID NO: 6403

SEQ ID NO: 6406 - DNA, 272 bp, Homo sapiens
tttttttttttttttttctgagagggagtctcgctctgttgcccaggctggagtgcagtggcgtgatctgggctcactgcaagctccacctcccgggttcacgctattctcttgcctcagcctcctgagtagctgggactacaggcgctcaccacctcgcccggctaattttttgcatttttagtagagacggggtttcaccgttttagccaggattgtctcgatctcctgacctcgtgatccgcccatctcggcctcccaaagtgctggga

SEQ ID NO: 6407 - DNA, 90 bp, Homo sapiens; identical to SEQ ID NO: 5398

SEQ ID NO: 6408 - DNA, 118 bp, Homo sapiens
acctgagaggcagaggttgcagtgagccgagattgcaccactgcactccagcctgggtgacagagcaagactccgtcgcaaaaaaaaagaaaaaaaaaaagaaaaagaaaaacagaaa

SEQ ID NO: 6409 - DNA, 162 bp, Homo sapiens; identical to SEQ ID NO: 5244

SEQ ID NO: 6410 - DNA, 129 bp, Homo sapiens; identical to SEQ ID NO: 5494

SEQ ID NO: 6411 - DNA, 909 bp, Homo sapiens
ttttttaatccaatgcaaatataattttacagatgagaaatgattttgcctgcagttatctgcttccaaattagaatgtatttttaatttctgatgagtcacttttcgtgtgtaatactcattttgactggtattaggtggcatgggttggtttttagtcaattccagaatatcttcttacattgttttaatgtaaagaaaatgaaaatttgatgcttctgatctttcctaatacctctatttagagcaagatggagtatctgtctccttggatcctttatatgtctagctacattgtggatgtttgatagaaataataccatgcagtatagtctccgccccgacactgaaaaaaaaaaggagggaaagtatgtagaataaaaagacaaacagtgtaacgagctttattttataacactggaacattgaacttatctgttgaggtggtactaagtaacataacaacttcaaaaacctggacccggcaggcagctaatttagctacttgaaaatcactggggaaaaggaaatagatgctaagattactgaaaccagcttaacacctgccaagttacatcgcttttaaaaaatgctaggaaggcccaggcacggtggctcacacctgtaatcccagcgctttgggaggccaaggtgggcagatcacaaggtcaggagattgagaccatcctggccaacatggtgaaacactgtctatactaaaaataaaaaaaattagccaggcacggtggcatgcgcctgtagtcccagctactcaggaggctgaggcaggagaatcgcttgaacccgggaggcggaggttgcagtgagccgagattgcaccactgcactccagcctgggtgacagagcaagactccgtctcaaaaaaaaaaaaaaaaaaaaatcccagg

SEQ ID NO: 6412 - DNA, 193 bp, Homo sapiens; identical to SEQ ID NO: 5539

SEQ ID NO: 6413 - DNA, 136 bp, Homo sapiens; identical to SEQ ID NO: 5560

SEQ ID NO: 6414 - DNA, 138 bp, Homo sapiens; identical to SEQ ID NO: 5564

SEQ ID NO: 6415 - DNA, 3098 bp, Homo sapiens; identical to SEQ ID NO: 5612

SEQ ID NO: 6416 - DNA, 368 bp, Homo sapiens; identical to SEQ ID NO: 5252

SEQ ID NO: 6417 - DNA, 338 bp, Homo sapiens
aagacatccaacaaaactggccattactttatacttctaggtctcagtagatacaggagaggtaatttggccatgggagaaagaaacaaagtaatagaatatggaagaaaatgaggattgtgaaagagtaattcgcatttagtagacccctaataaatactggttgaatgaatgaacaaaatgaaagagaaacatactagaaaatagattgggctgcagcggagacttacatctggaaatatcctgttgtggtattgggtcaagtattaaatactggtgtgcttattttagccaggacataatttcgccactgatatagtagggaccgccaaaggggg

SEQ ID NO: 6418 - DNA, 2894 bp, Homo sapiens
tgctctgagatttgacatgaacacaaagttgctagatgctcttgttgacttccagcagatgggatgggggatatacagcagttcttggtaaagtcctttgtaataattgattttttttatttcgagagaatctttcattttcctgtgtatgcttttttccttttttgtccagtttccttatcacttgctgtagatggcttattttgcattcatgcagactatgttgcaagtctgtttcatctagtaaactgaaaattattgcttaatcaaactgtcatttgtcttttatatttaaggcctttcccccctttcttatgagttctaacttagtaatttcaaatgtgaccttttatatctaagaccagtatagtaaacttagcccacagtggcaaatgatgagtaatatcattgtaatatgttccagttgcacctcagtatgttaaacaggtaatgtaagaagttctctgaaatgtcagcaaataagttctgaaacatacatcatgcacgagcaggaataaaacccaagttccccataacgtagctaacttaacactgcataaaaatatgaaagtgtaacccatgaaggacacactttttttttccactgcaaagtagtcactttgctgtttttcctcttttttaaactttaaaaaaacactcttcccagaaattggagcaataatggggtacaccacacatagattaaatatttgtagatattttaagtgacttttgggcaaaactagaatgtatacttttaccttgttacaaacgcctaagaccagtaatttaaaaattactaacaggtttactttgttcattaataaagcatgtaaccattcaaattatatgcaccttttacctagttgaaaaaaatacacattcctgttttcacattatagcaactgattaagctgaagctataagtcattttttatagatgtgtgatccacacctccatcaattagaacactgaaaaatatgttttataaaaaaggtatttaattttgtttgtaggattaactcatgcaaataataaaaaagataccctgttggttcaatagtacactgtctcctttaaggaaggaagcatgatgaatgaatgatgtgtagacttgagggatggactattaaagtggatggaggatgaggacaaagaacctacagattacaatgaatgtaaacttaatttttcttcatgtgtaagcagtgtgctcgctgatgatatctagatcctaacaagattacttggttagctggctaggaccagtaactggattgcaaccactatgataatattttgaaccaaatgttaatgcttgatgcagaattgtaaagcagcatctggctcctatatagccttaaggaataattttagtgatcctcaaggaattaaatagggaatttaagaaatgtagactgcaaaggcagtatacaggaaaaggtggagtgggttttgtttatgagtgtgtctgaaaactaaaattaagcgggacatcttggtatagttggacagtattggtccttcacgctttggccatattgtataatggagcttttaccaaagacgtatgagaagtgtaagactataaaaaaaatgaactatttaaagtaaaactcttgacaaacattttacttaaagcagatgcaaaaggttattctcatgtaggctcctgttggtgcagagggatttttgatttcaagatgcaactaaagtacgaagttctcagtttcactttagtagaaatagttctagaaataaggctaataaacacatctaagaacactggttgctttctaaaattcccaaagttccaccataaatgtaatccttagtgttttaaatgattgcattttaaggtatataaatatgggttatccaacatcaatgctatagtaacatcctgaaacaaaacaagcacaaaggtataaatgcctaaaccggaggaaacttgaaaccctcatgttaaatcttttttttttttttttttttttttgagatggagtctcgctctgttgcccaggctggagtgcagtggcgcgatctccactcactgcaagctctgcctcccgggttcacgccattctcctgcctcagcctcccaagtagttgggactacaggggcccgccaccacgcccggctaattttttgtatttttagcagacacggggtttcaccatgttatccaggatggtctcgatctcctgacctcgtgatccgcccgcctcagcctcccaaagtgctgggattacaggcatgagccaccgcgcccagcccatgttatatcttcaatgtagtatttctaacttgtgaagacagattggtaggcagccacttttttgtgtcttaaaataactgggagcatagttaaaattttatacatcaagtgattgctattattgaatgttgcaggtgagatgtggttatttttagtttatttgaaatgtctgactggaaatgggggagggggaaggaaatatttgaaatttggaaaactctaaaccttttggtaagaaattgtaattttcacttaaaattttctttaaggatataagaggtttataattgatgtagttaaattgaacaataatcattggtgactggagcaggtaattatagcctgcagaaaaaaattataatctaagaattgaaaaaataagatcctgaagttgtttaattgcatcagtttctgtatttatgtgaatttataaactgcagtatgttttgaatgaggttaatcttgtttaatataagtaaatgagtctgtagactatgatcgccccaaactaaaaagtacagtacctgaaactgtgttctttatggttgtagtgttagtaaagcactaatatgcagaaaataaaggaattacacagtgaaaaaaaaaaaaaccaa

SEQ ID NO: 6419 - DNA, 2673 bp, Homo sapiens
agttactgttctacagtttggcggggacggggcttgggggttttctcttttgtttgtttccctttctttttccttttttttttttttttttttgttggctttgcgttaggatgctctgatctgacatttgacatgaacacaaagttgctagatgctcttgttgacttccagcagatgggatgggggaaacacagcagttcttggtaaagtcctttgtaataatagtttgatttttttatttcgagagaatctttcattttcctatgtatgcttttttccttttttgcccagtttccttatcacttgctgtagatggcttattttgcattcatgcagactatgttgcaagtctgtttcatctagtaaactgaaaattattgcttaatcaaactgccgtttgtcttttatatttaaggccttccccccccttccttatgagttctaacttagtaatttcaaatgtgaccttttatatctaagaccagtatagtaaacttagcccacagtggcaaataatgagtaatattgtaatatgttccagttgcacctcagtatgttaaacaggtaatgtaagaagttctctgaaatgtcagcaagtaagttctgaaacacatcatgcatgagtaggaataaaacccaagttccccataacgtagataacttaatgctgcataaaaatatgaaagtgtaacccatgaaggacactttttctttccactgcaaagttagccactttgctgtttttcctcttttttaaactttgaaaatagactctttccagaaattggagcaataatggtgttaccacacacagattaaataatttgtagatattttaagtgacttttgggcaaaactggaatgtatacttttaccttgtttcaaacacctaagaccagtaatttaaaaattactaaaaggtttactttgttcattaataaaacatttaacaattcaaattatatgcaccttttacctagttgaaaaaaatacacattcctgttttcacattatagcaactgattaagctgaagctgtaagtcattttttatagatgagtgatccgcatctccatcaattagaacactggaaaagatgttttataaaagaggtatttaattttgtttgtaggattaactcatgcaaataataaaaaagatatcctgttggttcaatagtacactgtctcctttaaggaaggaagcgtgatgaatgaatgatgtgtagacttgagggatgactattaaaggggacgtaggatgaagagaaagaacctacagatgacaatgaatgtaaacttatttttcttcatgtgtaagcagtgtgctcgctggtgatatccagatcctaacaagattacttggttagctggttaggaccagtaactggattgcgaccactatgataatattttgaaccaaatgttaatgcttgatgcagaattgtaaagcagcatctggttcctatatagccttaaggattaattttagtgatcctcaaggaattaaatagggaatttcagaaatgtagactgcaaaggcagtatacaggaaaaggtggagtgggttttgtttatgagggtgtctgaaaactaaaattgagcgggatatcatggtatagttggacagtattggtccttcacactttggccatattgtataatggagcttttaccaaagatgtatgagaagtgtaagactataaaaaaatgaactattcaaagtaaaactcttaacaaacattttacttaaagcagatgcaaaagggtattctcatgtaggctcctgttggtgcagagggatttttttgatttcaggatacaactaaagtacgaagttctcagtttcactttagtagaaagagctctagaaatgaggctgataaacacatctaagaacactggttgctttctaaaatttccaaagctccaccataaatgtaatttttagtgtttcaaatgattgcattttaaagtatataaatatgggttatccaatatcaatgctatagtaacatcctgaaacaaaacaagcacaaaggtataaatgcctaaactggaggaaacttgaaaccctcatgttaaatcttaaatgtagtatttctaacttgtgaagacagattggtaggcagccatttttttgtgtcttaaaataactgggggcatagttaaaattttatacatcaagtgattgctattattgaatgttgcaggtgagatgtggttatttttagtttatttgaaatgtttgactggaaaggggggagggggaagcaaatatttgaaatttggaaaaccctaaaccttttggtaagaaattgtaattttcacttaaaattttctttaaggatataagaggtttataattgatgtagttaaattgaacaataaccattggtgactggagcaggtaattatagcctgcagaaaaaattatctaagaattttaaaaataagatcctgaagttgtttaattgcatccatttctgtatttatgtgaatttataaactgcagtaagttttgaatgaggttaatcttgtttaatataagtaaatgagtctgtagactgtgatctccccaaactaaaaagtacagtacttggaattgtgttctttatggttgtagtgttggtaaagcactaatatgcagaaaataaaggaattacacagtgcag

SEQ ID NO: 6420 - DNA, 754 bp, Homo sapiens
cggcggcgttgttggctgaggggacccaggacacctgaatgcccctggccccagcttctctgacgcgatggggaaagtgctatgcaaaatcttcgggaacaaggaaatgtggatcctcatgttgcgcctggatgcggccggcaagacaacaatcctgtaaatgttgaagctgggccagtcggtgaccacaattcccactgtgggtttcaacgtggagacagtgacttacaaaaatgtcaagttcaacatatgggatgtgggtggccaggacaagatccgcgctctcgcggcataactacactgggacccaaggtctgatcttcgtagtggactgtgccgactgccaccgcaccgatgaggcttgccaggagctgcaccacattatcaatgaccgggagatgagggatgccataatcctcatcttcaccaacaagcaggacctgcccgatgccatgaaaccccacaagatccaggagaaactgggcctgacctggattcaggacaggaactggtatgggcagccctcctgtgccacctcaggggacggactctgtgaggggctcacatggttaacctctaactacaaatcttaatgagcattctccacccatcccctggaaggagagaaatcaaaaacccattcacaggattatcgccaccatctcctctttcaattgccacttttcttttgaatttgaactctggagttactgttctacagtttggggggagagggcttgggggtcttctgttt

SEQ ID NO: 6421 - DNA, 101 bp, Homo sapiens
tgagacggagtctcactctgtcccccaggctgcagtgcagtggtgcgatctcggctcactgcaagctccgcctcccgggttcacaccattctcctgcctca

SEQ ID NO: 6422 - DNA, 424 bp, Homo sapiens
gttgctttgccaaacaaaagttgccagactagactagtgagctgaacaggcaaggaacacagaggtgagatcaaggaaggcagaacaagaatggagcgggatttaggaattaaagcaaatctgcaattaaatataactgaagtaatggtaaatttcaagagaactagactgtaagaactaacctcacattgtgggaaaataaaaattttaaccttttccccctttatttgaaatgttctatgactacttgaaagaatttaaaaatgaaagtatttgtcagttttgtccttgaatatctttcatttgtcatagaatacatattttgtccatagtattttgttttataagtgtgagggtagatttttttattgagagcctactaatatgcctggcactgttgaggtgcaggagatcgacagtgaaa

SEQ ID NO: 6423 - DNA, 1690 bp, Homo sapiens
gcctacctcctcctcaccagctacctggcaacttttgacttgttccttagaactctctttagttgtggtcaagtcatgaagcttttcctgccccggcctctctctgcagcgagagttaggggacttctcttttgcatcttcattgcactcagacatctggtactctgtgattatcacacttattaatgctctcaagatagagataaaatcttattcatctttttgctctcaggcattagcacatggggagttctcagaaaatacctgtcttataccaggaattaatgaataatcagtaggaatgagcatgacatgttcatgggacgttggagggtagtgcatggctgcagaggagaatgggaaatgaaggtcagataagttacgtgagggatctctaaggccaagagaagccatttaggtttgatttggttggaaaatgagcttattgaaagtttaaggcaagggactagcatcatgaacacatctttttagggaagtgtgtcttgtggtaagctgctggctggtttaaatgcagcagaatattccattggggatgccagctgggagacttgccacagttgcagcctgcagcagaaagaccctgggccagaatgggttgtgccatctgtcaccagatattgccaaggtagatctggctgactttgtgggacagcttgtttctcaataatcactttgcaggcactcttgaggctgtgagcatgctcccagaagatagcattacttctctctcagagcaggctcctttctaaggaaatgcaagtctaggcctgccctgctgtaatcttcatgtggaaacagcactctagcaaagaacaaggaacctgatgagcttttcaaaggaaaatcgagtagatacaggaaaccaagaattttctaatgagcagatagaaaagagcaggtaggtgagaagttggtattagaaaaattaaagatttgaagggcttgaggacagagatgattgttggatgtttcatttttccaggcaaaatatgtggagcaaataatcaaatgacatggacttaccccacaattagggacggagatgaggaagggttaggaatagtttctgttagaatggtagggatggaagacaattgaaaattaaagagaaaataaatggagaggaaatctaggcagcagccattcttcattctgggggaaggtggtcaggaaaaggaaggaagaaaaatgtatagcatagtagctagagtggtccggcgtgatcaaagtgttttcaatatcatgttgactgacctgtttacgtttgaaggcagagaagatagagccagtagaaggagagaaaaatcaaagctgttttacggagttgtgaaagagctggataaggacaagactaaatgagttatttttaggccaggcgtggtggctcatgcctgtaatcccagcactttgggaggccaaggcaggtggggcacctgaggtcaggagttcaagagcagcctagccaacatggtgaaaccctgtctctattaaaaatacaaaaattagctggacatggtgcatggtggcaggtgcctgtaatcccagctactcaagaggctgaggcaggagaatagcttgaacccggggggcggaggttgcagtcagccgagatcatgccagtgcattccagcctgggcgacagaacgagactccgtcaaaaaaaaaaaaa

SEQ ID NO: 6424 - DNA, 6249 bp, Homo sapiens
aggaggaggaggaggtaatggagctggtggtggcagcagccagaaaactccactctttgaaacttactcggattgggacagagaaatcaagaggacaggtgcttccgggtggagagtttgttctattaacgagggttacatgatatccacttggtaagtacaattttagcaatgttatatatggctggaagtcacttccctatgaataatcatcaaactctgttgtcattgatgactttcaagttgtggttaatggaatatttgtttttaataatgttttaataaatattttattttaaagatcaaggcttattaatataaattacggtatcccttaaaagaagttgatagtaattccttactgtcatcagtagtcagtgtttattgcattatatcttgtaactggtgttttacagttggtttgttcatatcaggatctaaagtcttcacattgaatttgcttaatatgtctcttaggccttttaatctacaacagtctcctcccacctcttttttacctactatttgttgacaaaccaggtcatttgttccctagaattttccacattgtagatattgcttgttttatccccagggtgtcccgtaatgtgttcctctgtctctaatatttcctttaaaatgttagcaacagaggcttaatcggattcaggttcagtacttttggcaagaatgtttcattaggtggttctgtgttctcctgtggagtcacatcccatctcaggctggctggctgtgtctctctcattgtaatcctgacgaccagtgggcttagagggtgtcaacctgatccacccagtaaaagttcccctcttatatcatggtttgagctcccaaaaatagttttgcactgggagggaggatcattgctcagatcgttatttcactaaggattgctattgttcaccttctaattctatcatctttctgcttttatcgaacttttctctcaccagctctttagtgccctgtaacacagttcgtacaagaaaagcaatataaatatctacattttctcctttacttaacatttttccaaatagtgagctggttccctaggggatcttctagaagtgactaggaatttgtttttttaatttgtttaatgtcatttagttattatgaattttttggaatgccttattttaaggtcattgaagtcctcattagttcacgcacataagcagctttttagaaaaaggaagaaaagcactactgtgttattactggttaatccagtaccaggaacttctagtacagttctagaaaggtgctttgcagcatgtagcttgtatcttttgcttcccctggaatttaagcttcaaggccagcacactctggtatatgtgctgagaaacatgtgatggggctgcccagccacgtcggggaaagaaggaagatgtcttgaggtgcagtgagcttgcccactagtaattattgtctgatcagtgtcctagagtctgactgtgccttttaggcatggggaaaggtagaagagggacttaagaagagagctaaagctcctggtagatttgtggggttttcttttgtttgcctggtgtccttaaccatagcctgtcaagagaacaaaggtggatatatttttcagtgaacacatacatgtttaatagtcattctggaaaatatttctaataccttctttggaattttctcatgctataaatttagatttttaagaattggtcatatcgcaccaattttagactaagaggtgtaggatcgtcactgcccccccatggtgcccaccatgtggctactaagtggggtgcacattaaatgcggacaacttgcttaattatttatagggtctgcaggagcacactattcctgcttttagcacagcactcatataattttttttttcccctccagccttccagaatacattgtagtgccaagttctttagcagaccaagatctaaagatcttttcccattcttttgttgggagaaggatgccagtaagtgatttctgttggattttatgaatgctgacgtccattgtttctacacagtgaagtaaggattctacctctcccctagctctggtgctggagccactctaacggcagtgctcttgtgcgaatggccctcatcaaagacgtgctgcagcagaggaagattgaccagaggtaattgagaaatggtcattgtcactttagatagttttacttgttgtgtaactacagtgagttccctactaattgaaaataacaaaatgcatagtcttactaattagttagcaccatgttttatataagaattgccattttgaaaagaatgtgataatattaaaattaactgacattggagttacactaaatataatttaattatttggtttgtaagacacttgtggatcttacattgctgacatcttgctatagcatttcctataacatactttcaaagtgcagtgatatccagttgagacacttcaggataaatcaaacttttcttgtagatctgatgtgtcttatttaggtctacacatttgcaaatagcctagacagtgcttttaattagccaccacagacgagtctggcatcatctgctgtgggtcatagtaactccccgtcattaaagtaggaggcctttctcagttgtgctcatagcagtgagcaatactattgatcactctctccttaaacccgcctgggccctcagcctctgctcctctccactctcctgaagctcctcttcctcactggcactccgtgccttctgcagacccatcctcttctctccagacattacacagattctaaggccgcttcctcatgttctgtattcttttcctaaagaagtttccccaagaatgtggctttagtgaccaacacatttatatcttcagtctaccttgacttctacatggaggtctcaaagaccccttaaactcattatgtccaaaaccaaactcaaggatatggcctccatgccctcccccagcctgctctcagaaaccggggggtcatcctggatgccttcctctttctttcccttccccatcaccaatccctcctcaggttttctcacttcacttttcagacaccttgcaaacccatgtgcttccacaaacccagctccacctctgcctgtgtgttataagtgctatcatttcctccttccatgtctcctccacccctgggctccagccccctggactttccctggtgttttcaacctcctgacattgtccagcgctcttcccttctggactgccttctttgcactcatctgggaacactctccacgcttacccacttggcactccttgtttctttttttttgagacagagtctcactctgtcacccatgctggagtgcagtggtacgatctcggctcccgggttcaagtgattatcatgcctcagcctcctgagtagctgggattacaggcacccaccaccacatccagctgatttttgtatttttaatagagacaagatttcaccatgtcggccaggctggtctcgaactcctgacctcaggtgatccacccgcctcggcctaccgaagtgctgggattacaggcgtgagccactgcacccggctcactcattctttatatctcaattcaaacatcatttcctcaagataagccttctctcccctctaaagtttgatcagacctcaaaagtctatgttcttagagctcctgagtttttaacatttatttcagtttttaattatatatgtgtgtgttacagtttgattaccgcctgtcgtttttactccatgagatgagggactatgtctgttttgcacaccgttatatatttagcacccaggaagcatatatgatatttattcaatacttgttgaataaatgaggagtaaatgaacagatcttataaaacaggcttatggagcctcagaaattgtgtatcacagtcctttttggtacagccagagtgtagggtttttccactgtaccgtaactgacagagccatattcactgaagcaaataaccatcaagtgaccctcaaatgaccttcagttttctggaaaggaaggtgactatagttcacacgagtccgtattctctgtggattttgatttacctgaactccatttggaattaactgtctgctgtgtcatactccaagccttgttttcattagcatacatgctgatgaagtgcacagttaggaattttgctgttaaagggacaattgtagcattgttgggtgagagttagttataaaaccttataatcagtggcagtttcagtgatttattaagctgaaaattactttaatgccttttgtgttttcagctatcctattcttcataagtagaacagatcctcttttttgtccaacctcgtctcctaacctttttccctcaggtgtgtcatctagccccactggccttctttaggtttctcagcagccatgcttgttacctgccacagggcccttgcactagctgccctctgcctagaacattttcaccccagatctttacattgcttctctattcatttaggtttcggcttcagtaccatcttcacagagcagctgtttttcaccatgtgacctaaagtagcctgtaatctcatgattacatcatccatggcattcaccacagcccatttatcttatcatctaccccaccccacgaagaatgtcaaccccccacttgcttgggcaacaccagtagtaaaattggaatgatacagggaaggttagcatagcccttgcacaaagatgacatgcaggttcatgacacattacatattttaatgaaatgggagcatattcttgttatttaatttttaaaaatcagtttatcaagcaaatgtacagcgccattttatttttcatgcctacattaaattccatacacataaaggtgcatagaggaaacctagaaagattgcaccaaaattttagaattctgagtgattttgtttttcttatcttttctaggtgtttttaaacattccacactaatttatattactttttctattcaggaaaaaaaaaaacaacagcagggttttgttttgtttttttaaagtggtgtggaagttacccattgaatatagatgggaatcccagtcctggctgtttcctttgaaaagatctagagaccccatggcacatatttatagtagcccattctctcctaagaatagaggaagggtgggaggaattttggtgaatgtctgtacttgcagtttatcctacagcaaatcgttaagactgtgggaataggtgctttgcattctctagagctggagaatgtgcatctggtttgccatccttctgtctacatcatgtggaaagatgtgggagtgtagggtctccttaatctaaatgcagtgctgccccgccccccccttggcagtgtttctgtttcccaggcaagtgttccaatggatgtgctttattttctcccatcagaaataagggaatgagcccgggcgcggtggctcacgcctgtaatcccagcactttgggaggccaaggggggtgaatcacaaggtcaggagtttgagaccagcctggccaacatggtgaaaccccgcctctactaaaaatacagaaatttagccaggtgtggtggcgggtgcctgtaatcccaactactcgggagggtgaggcaggagaatcgcttgaacccgggagggggaggttgcagtgagccgagatggtgccactgcactccagcctgggcgacagtatgagactccgtctcaaaaagaaaaagaaggaaatgatctaatttgttctgtgcactgcacgtgggggtggcagtgaggtgaatggcagcattctgcagtagtcaaagccagatgggtgggagaagttgggtgctaagagggaaacaaagtttacctgtcttctccttgatttcactctcagttttatgagaatacagaaaaatcatgcagagaaacctgatggaatagtctctaaaactaaaaaataagataagcaatggttctgtcttaaaaaaaaaaaagtaaactccatgaaggcagagaccttacctgtctcattcctctctctatcccctggtctatagtaagggttaaataaatatatgctgaaatgaatgagtaatgactaaagtatttttgtctttattaggatttgtaatgcaataactaaaagtcacccacagagaagtgatgtttacaaatcagatttggataagaccttgcctaatattcaagaagtacaggcagcatttgtaaaa

SEQ ID NO: 6425 - DNA, 33618 bp, Homo sapiens
ccaaagtgaatgatgtggttccatgggtgttggatgtgattttaaataaacatatcatcagccccaacccacacgtgaggcaagcagcctgcatctggctcctttcccttgtcaggaagctaagtacccacaaagaagtgaaggtgagccatgctgtatgtggtcagccctgttggaaaccacagtattataagtagcaaggaaagcatatgagggtgaaggtcattaaccaatagtaggtattttgaaatacattgtacatgaaggaatgaaggatggtggcctgatgtatataggctggaagatgattctagccttgaaggaataaagtcagaagtgcttgagataggaaggctcagttggggcagtggtcagcttgcatgtgttagactacgtgtaagtggtgcagctccaggtgatttgggccacctgtaaagatgagagcaaaacagcgattgtaactggcttggataataagactacaaattttgtacacggtgagagcaagactcttattctctcaaagaggtagagtttcagtgttctaatgccttttttcttctttcagtctcatcttaaagaaattcaaagtgcatttgtttcagttctatcagaaaatgatggtaggttgttaatatttgatttctaaacttaattgaacttgtattttaaatgttcaaaaacctggattaatgaacatgaaagaaaactttcttgagctgtgtgattaaaacaattattaaaccttatttgttagtagtaaggataagcattatgttaatgtttagaaaccaaaatttctagttaggatacaggaaacttagattctttctcatttattggtttatacattagaacatgttcctcaactctgcattttaaaatggagccgaggccttctttaacattagtatctctcctaatagcttttttctgcctctggttacttttcctctctgatttaagctaggagagagtgaacgtatatgtgttaaatctttcagtactaagctttgttttataacttgttttaaacatatggtcttgcattgacttttaaaagttaggtctgagtgtattgagatcttgtgaggctgttttatctctgatgtatgacttacagcccatggataatctgtcgctgcactgtccagtgacactgtataggtccatcagtattgtctagatttgtgaactggatcttctgtgaatgtggttctcatttacagtaacttgtgtggtgccatgtcccctgaaatgattattatttttaacaaaataggcatattgattctgtttttatatctttactttgatatcattttgggtcagtgtcaacataactttaaaaattttgatttcatagcaagtagacaaaattttttttaaagtgatacaatcttgtctgactttcttgtagaacttagccaagatgttgcatcaaagggccttgggttggtttatgaactaggcaatgaacaagatcaacaggaattggtttctacacttgtggaaacacttatgactggcaaaaggtatggtgaacttgaaaattttagattcaagcccatagaggaagtctctacacatagtgagaagatgctggagaaggaagattcggctttccatgttttggtttatgaagccttttctaagttgcgagtccataattgttgtgctgtggatagcacaattattccagggtatactgttaactttaggagcatgccactaggtcaagcgtcgaaagtttaatggtctcagataatgtattgggttagaaaaatgccgtaattactgttggctaaatggaagttaagatacggagaagaagcttgcatatcattcatagtctaacccgtgaagagtgtgaggggaaatcatctgtgtaagggattgctgcttcatgttgcctcccttgtaggaaggatagtttttcatgtgctaccacatttaattcagtggaaattatgtgaaatgtctttttcatctgttaatttgttcattctgaattcattttataaaatttgcagcctgttggaaagggctgttttttgttgttgttgttgtagtcttgctctgttgcccaggctggagtgcagtggcacgatgtcagctcactgcaacctctgcctccctggttcaggtgactctcccgcctcagcctcccgagtagctgggactacaggcgcgtgccaccatgcccggctaattttttgtatttttagtagagatggcgtttcaccatgttagtcagaatagcctcgaactcctgacctagtgatccacccacctcggcctcccaaagtgctgggattataggtgtgagccaccgcgcccggccggaaaggacttttatatcttgtacacagtaaatgcttgataggaagttttatcactttgtaaatgaatcgtattggctagttgaatgttggtatgaaaagcttgaagcttattgaaattattgttttggtttagagttaaacatgaagtttctggagagacagtggtatttcaagggggagctcttggcaaaacaccagatgggtaagtatgctaaatccattgaatggtaaacatctttaaatatatatatgcatttattagtctggtaaatagagcagtcatgaagttgatttctaccctcttaggaaatgttatctattggtggaagaagaaaacttacatggaaaaaagtctgatgtctttttttttttttttgagatggagcctcacttttgttgcctaggctggagtgcagtggagtaatctcggctcactgcaacctccgcctcctgggttcaagcgatagattctcctacctcagcttcccaggtaactgagattacaggcacctgccaccacgcctggctaatttttgtattttagtagagacggggtttcactatgttggtcaggctggtgtcaaactcctgacctcaggagatccacccacctcggcctcccaaagtgctgggattacaggcgtgagccactgtgcctggcaggctgacgtcttaaattgagtgtcctgggaaacaaactctgagttagatttctgtgtgggaaatttactggggagtgccctaggggtcactctggggggatgaggaggcaggatagggcctatgactgagggaggggcggaactgctaccatcgtttcagtggataccagcctcttgaggagctctgagctggcacaggtggcctttcggagttgttctgctttgaggcatggagcctggccctttatgtcctctcagtgaccagccattggtggtgggctgctgcgtgggagcccatgatgttgggctctcagggcagttgtgggagactgactaggccaacagctgtcagctctcaggcagctgagtcctgcagaacacctggaagcatagctaggtgcacccactgccgctagttttgggtgggtgtaattctttatcttagaggccactactttagcatttaaaataaattccttgagcttgaccgcctttattttatcatgctttatttctacggatcgttaggcaaatctttgctggttgcagggccttgctgtggtgtcacacacgagcctgcttcattgttgtctgcagcaggagaaagctgcagtttgttccatcgttgacgttcccccacagtacactgttatcacatcaaaagttgttttcattgtacttaactctccttgtagactccttctaagtttttaaaaaagtgcttacattttacaaaataacaaaacaattagatatttgagccaatattatttgttcagaggaaagttaacaagactcaatcagaattagggtggtctagcttagaaaagacttagggaagacagatgttgtcttccaatgactctcttatgatcacgtgagattatgcataacataatgaagaattattgagttgcatctccaggtggtgagtggaccgtggctatggacttagaggtgcatttaggtcatttatcagcagcaatgtagaggggcttaggaattgctaatagttgaattaggtgactttttatattcttactaacttgtgttctgtctccatggtgataactcagtattagaaattgagtgaaaatttgattttagtatgtcctagtaatattgatgatgtaattttttaggctggagagagagaagtgtattattgcctacctctttttctttgtttccaagtcagggcctttctacttacaaggaactttgttctctggcaagtgatcttagccagccagatctggtgtataaatttatgaatttagccaaccatcatgcaatgtggaactctaggaaggtaagttgctatcactggacaattatttatttttttcatgcaaaccaaacatgctacattggcagacagtggcaaatggtatgtagtgcattttgtgaaagtctgtgcctgatgagaaagctgaaccccacaaatgctgttgattggaaagaccaataaatcaggctgtatttaggcataagtttggagggagaattttttgctatgttaatattttactataatggtgcatctgagtcacttcagcctattatttttagggtgctgcttttggttttaatgtaattgctaccagagctggagagcagctggctccttttctgcctcagctagttcctcgactttatcgttaccagtttgatcccaaccttggcattcgacaggccatgacaagtatttggaatgcgttggtcactgacaaatccatggtaagtgtctgtgaacccctgtgttaggaaaacactgtagactgtccagggtcatgcataggatttaaacccagtgtccatcttcctttctactttttatgtttacttgtttaaacaaataaattgtctttcattccatgctttcttccttctttcaaggtatcaaagatgtgtatggcaacatttattgaaatctccaaaagggaaacaatataaatgtccactgggaagatggttaaggaaatgattatgtattcacacaaatggaatagtaaatgtggatagggactgttgatggaatggagaatgggtcatagtcccatctccaatgaattcagttagctggggagacagacaaggaagcaggcaattgccattttgttttctctgttggtgtcctctcatctggctgttaatcatgttctgtcccacttttagatattaagatttctcagggcttgtctctgagtatcttttgctctctgagccttctctatatcaatcagttccaaggcatgtaaatgtcatctttattgtgaaagttcccaaccttacacttttggtccagatgtcacttgcactttagacatgcatatgtaactgtttacttgaaaatttcacttcagtgttgtttcagaataccataaacccaacatgcccagaacaggacttaaaaaataaccttccccctctactctcactgtttacctatttgcccaagccagaaaacttggtgtcatactttattttgatctgtgtctcaccaccacccccaattgaatctagtagcaaattctgttgattctgcttccaaagtattccttgaatctactctcttctttccctaattctttactgatgaataggtcatcatcatctttttttttcctctttgccgttcttcatttaattatctacatagtagcaaaagtaatttttaaaaatgcaagttagattgtgccattttgggttaaaatcctttagtagctttacagctcactttaaataaattccatgatccttactatgtcttacaagtccctgcccgtaatgtggccccttcctgtctctcctgtctggtactaggctgaatatgtttctattcttggtggtaggtacttgagggttcagctttgaagactcaatgagttttgcttgctccaggagaacatgtggcacttttgggtcagccaagatctagtaggccagtgggctttgtaggtctgagctcaggacacaagcctagacccttgagacgtgagtgtcatctctataagtgaaaggattaagccacaagtgtggatgagatcatccatggagaatgttgagagaagcagacataggaagacatcagtttgttatttacctctttgtcttggttttcttacatgtaagtaaggataacaaaacctttcctacctacaaaagtggaaaagccgtaaatttttgagaatgtcagcattggtataagactgattctaccattattttgtcattattaccaagttgctaagtgtatatcaaaacagaacagaggcttaaaaagtaaaactcatctttcattctgaacagtcatgaaccaggcactgggtaaggtactggggataaaaagatgagtgagactctgtccctcaataactgcactgatgatgagtgagacactgtccctcagtaactgcactgttgatgagtgagactctgtccctcaataactgcactgacgatgagtgagactctgtccctcaataactgcactgatgatgagtgagactctgtccctcaataactgcactgacgatgagtgagacactgtccctcaataactgcactgacgagtgagacactgtctctcagtaactgcactgacgatgagtgagactctgtccctcagtaactgcactgatgatgagtgagacactgtctctcagtaactgcactgatggtgagtgagactgtgtccctcagtaactgcactgacagtgagtgagacagtgtccctcagtaactgcactgatgatgagtgagactctgtccctcaataactgcactgatgatgagtgagactctgttcctcaataactgcactgacgatgagcgagacactgtccctcaataactgcactgacgatgagtgagacactgtctctcagtaactgcactgacgatgagtgagactctgtccctcaataactgcactgacgatgagtgagactctgtccctcaataactgcactgacgatgagtgagactctgtccctcaataactgcactgatgatgagtgagacactgtctctcagtaactgcactgatgttgagtgagactctgtccctcagtaactgcactgatgatgagtgagacactgtccctcaataactgcactgatgatgagtgagactctgtccctcaataactgcactgatgatgagtgagactctgtccctcagtaactgcactgatgatgagtgagactgtgtccctcaataactgcactgacgatgagtgagactctgtccttcagtaactgcactgtcctgtacaataactgcacccgacccccttgagggtctgcagtatagtgaaatagtacagttattgtatgattttgtgtgatgcttcttcagaaggtgctatgggaacagagaggagagtacccaagctaatcttctctgggaaaggatggctaatatgaaccttgaaggacaagtaggagttagccaagcaagtaggacctgggaaggggattgtagggagaggtggcatgtgccaaggaatggaggtgagacagaatatggtacttttgggtctggatgagtcatggaaggctttgtgtgcatgcctgggtgaatggacttcattctcatgcactgaggaaaataaaagcatcaaatgtacattttagaatgatcacctggcagctttatagtgaccaaagtgggaagagatttgtgggctgagtggcctagagagacatggaggccgtaaaatatagaaacatggtcagtgtggttaagtgtggttaaccagtgtggttaagagttgagtaatttgattattgatggattttgcattttaaattttatccttttgctttcattaggtggataaatatttgaaagaaattcttcaagatttggttaagaaccttacaagcaatatgtggcgagttcgagaatccaggtaccgtttttaggaatataagtttagtcaaataaaactgaatttttttcccttcaaaatttctaggttttatactttgtgcaaaaggaataaattaaaactactaaaaagctggccgggcgtggtggctcacacctgtgatcccagcacatggggaggctgaggtgggtggatcacctgaggtgaggagttcaagaccagcgtgggcaacatggtgaaaccccgtctctactaaaaatacaaaaatcagctgggcccagtggcatgtgcatgtagtcccagctacatgggaggctgaggcaggagaatcgcttgaacccagccagggggcagaggttgcagtgagccgagattgtgccattgaactccagcctgggcgacagaatgagatgagactctgtctcaaaacaaagcaaaacaaaaaactaccaaaaagcatatttcttgttggctacattagttatttttctttaactgtttaagctttggtcaatgattttcctaaattgtcatagtttatgtaagtatgaaatcaaagaagttgaagattacctgttaaattggtagacaccaagatgtattttgtattgtcatgactttatagtatagcatttctgtatacaagttagattcattcggtgcccagtgtgtatgtggcagtgtgctaggccttggaggcacactggtgaataaaaaacgatgtgtcatctcaaagggattgtattatagttgtgggaaacaagcattttataattgtaaattacatatatatatggtatatttgagggacctggagagaagtcattgctgttttggggtgaggggatgagaactcgaattagaggcagaatctgtattcttttttagtataaatgtttcatagtaaaatactgacctttttcatcatatattgaaatgaaattttgattttcagctgtttagctttgaatgatttattgagaggaagacccttagatgacatcattgataaacttccagaaatttgggaaacgctttttagagtacaagatgatatcaaggtattatagaaataaatcagcatttatatatacaaaaagttaaattggaattattaaaatatttatgttgtgtatgtcaaaattccatttccagataattttaagagaccaacgttttcccccaaagtttcagtcttaatgtgtctgtgaagttgcaaggttgggtatccttagatctaaattaaatagacttagggaaaaaaaaggtggctgtataccttctttcaatagagatctcatgattctattggattagggacaaataacagttttggacatagtaacagtattttgatcagttctgtaaatgggattaattattctcaagtaatgtggccaattcctctgaatttttcttgggcaatcttaattttaggtattttggtattttaccattaaaattaggcacttcagttttacctttctttttgctttatttattggaggcttttaagtgtttcagaattctcacatagatctttatgtatttacttttataatacatttagtttctcaactgttaatagctaaattttttaaggtcaaaataggttacagttaatgtttaaaaattaatagtatggcatggtaatgtgttccttgatgggcagagagtctgatgagataccaatttttttaacatgatatgaaatgtaagattttccaccaaatctctgtagggcctgaggcaattaaattgcaaattgtagagtagatgatagtgaaactctctaacttgtatgatgtcacacttttgtcatttttaggaatctgtacgaaaagcggcagaactagctctgaaaactctgagcaaggtgaaaaccccgtcttacattgggaatggagtggagcagggttctgggtgaccatgacaatgatttacttactgtcataggaaaagacatttagttgcagtataattggcttcatgttgtagttcactgctcttagaatgaatgagaaagtgagtgctgtaaacactgcagtactagtgtgttgaacagagtatactgtggtctctttaaatggtgaaattaagataaaacttcgacttaaccctgaagagcacatcactcagatcaagcaacacctgtcttttctcttgcttttgctgtgtttatatataaagctacctttcatatttgtgaggttggaaagctttttgaaactaaattatctcccacttgaacttgattttgtgatatatcaggaactttacattctagttgcacaaaccttgccataggtcacataaatagtaaaaccaggttttaaatacaggtgttttcctgtttcacatgtgatcttgaccactatattgtgctgtgacccagcgttattgatgatgatgatgatgatgatgatgataacacttcaaaacttctttatttaattttttattttaatttttttttgagacaaggtcttactctgtcacccaggctggaatgcagtggcgtgatcacgactcactgtagtctcgacctgccggggtcaggagatcctcccacctcagcctcctggagagctgggaccacaggtgtatgccaccatgcctggctaatttttcatactttttgtagagacagggtctcttcatgttgcccaggctggtctcaaactcctgggctcaagcaatccgcctgcctcggcctcccaaagtgctggctttataggcgccggctactgcacccagccctaaaccttttttaaagtgctttcttacatatttcctggtttgatcatcatctgttttgttctgtatttcacaaattggaggaccagtgcttagagagtgaaatgcattaccaaattttctgtttagttcttggcagacctaggactcaatctccgatctcattcctctgtgtctctgtagtgtcagagaaagtagattcacttattcttccctgtagatatgtgaagtagaaagtcttttgtcagatgaattctttattggatgcgcggtcactttcactaacgtccatgctctttgtatgtgaggtctgtgtgaaaatgtgtgaccctgccaaaggagcagctggccagagaaccatcgctgcccttctgccttgccttctggacaaaggaatgatgagcaccgtgacggaagttcgagccctcaggtgtgcatccgttgatgaaatgaatgtattggatttgctcagttcctagaaattgtgtttctttcaaggttagattctggaaaatatggagaaagaggtttaggagaatgacccttgggtcatttgtgaaaacttgtgagtcacaatattttcacagaaacattctcatgagaccttatttttgcctagcattctgagtcaagcgtgttgttctgttgtcatcagcctctgctcccaacaagcacgtcttcctgttacactgtaggtcctcaggagcatgtttgttcattataatatttagtaatatttcacagattattagatttaagagaagctgtttaccacctgcaacgatgaaatattcaaaaaatgtacttacacgttttgatataatatatgactactttaagttaaaaccaatagtgtaggattctagtttgtatgttttgtttgtttttaaagtacagtgctgtctaggaactttatctgttccattgttatttcactcttaagagtagaacaaattattaataatactgccagtggtatttcatggcaagtagatagttgatgaaagagttttttttttagaaggactcacctaacaaatgcaaaggcatgacgcaattaagagtgtcactttggctgggcctggtggctggtgcctgtaatcccagcactttgggaggccgaggtgggcggatcacttgaggttgggagtttgagaccaacctggccaacatggagaaaccccatctctactaaaaatacaaaaaaaattagccgggtgtggtggtgcatgcctgtaatcccagctacttgggaggctgaggcaggagagtcgcttgaacccaggaggcggaggttgcggtgagcccagattgcgccattgcactccagcctggacaacaagaacgaaactctgtctcaaaaaaaaaaaaaaaaaaaaagtatcactttttgctctcctcagtaaaataatctaagtagtgatcattagatgcccctaaatccactgggtgaatggctgaagagaactttataatgattcagggcaaccagacctgaacctaccaatcactccttatagcacaaaaagacaaccagtgcatggtgatgtgatggaataggaggaataggacacacagcattgcctaggaaggattctttgtgtgtgtgtgtgtgtgtgtgtgtgtgtgtgttttacaaaattgaacgtgaactcagtttagcctgtagatctgtgcaggggaaagaggaacatgttaaatgacatgactggaatacaatcaaagaggacgaagaagaaaaaaagaggagagtggagactgttaaaaaagatttaagaaatgcagtagattgcaatgtgtgagtgagcttggatcctgattcaaacatgccaactgtttaagaagctaatgaaacagagaaatttggatacttgatatgaaaaaatcattaatatttttaaagtgtgaaaatggtattatgattatgataaagagcctttgcttttagatattcatagtgaagtttagttaagggatatgctttcaaatgcagtcacacgtcacttagtgacaaggatatttctgagaaatgtgtcgttaggtgatttcatggttgtgcacacattaacatgaagttggaaaaatggtgcagttagattgcttgatgcagggttgccacaaatctgttcacttcatatctctatgtcatattttggtaattctcacggtatttcatactttgcattactattatatctgttttggtgatctgtgatcagtgatctttgatgttattttgtaattgttttggagttgtatgaactacacccatttaagatggtgaacttaattggtcagtgttgtgtgtgtcctgattgctccactgaacagctgttccccatctctctccctcttctcaaatgtctcattccctgagacacaacaatattggaattaggctaattaataaccccacaatgccctctgtctaaatgaagggaagagttgcctgtctcttactttaaatagaaagctagaaatgattaagcttagtgaggaagggatgtcatgaaagctgagataggctgaaagctaggcctcttgtgccaaacagccaagttgtgaatgtaaaggaaatgttcttaaacgaagtttaaagtgctatgttagccaacacacaaatgataagaaagcaaaacagccttttgctaacagggagaaagtttgaatattctggatagaagatcaaatcagccacaaaattcccttcagccaaagcctaatccagagcaaggccctaactctcttcaattctgtgaagtctaagagaagtaaggaagctgcagaagaaaagttggaagctagcagaggttggctcatgaggtttaaggaaagaagctgtcttcataacataaagatgcaaggtgaagcagcagttgctgatacagaagctgcagcaggttatccagaagatctagctaagatcactgataaaggtgtctacactcaacaacagattttcaatggagatgaaatagccttttgttggcaaaagataccatgtaggattttcctagctagagagaagtcagtgcccggctgcaacgcttcaaaggccaggctgactgtcttgttaggggccaatgcagctggtgactaagttgaagccagtgctcatttaccattctgaaaatcctaaagccttaagaattctgctaaatctgctctgtgctctagaaatggaacaacaaagtctggatgacagcttatctgttaacagcatggtttactgagtattttaagtccactgttgaggcctactgctaaaaaaacaaaaacaaaaaacaaacaaacaaaaaaataacaacaaaacaaaaaccaaaccaaaaaaaaccccaaagattcctttcaaagtattactgctcattgacagtgtgcctggtcacccaaaagctctgatagagaggtacaaggaaatgaatgttttcatggctgttagcataacacaacatccattctgaagcccatggatcaaggtgtaatttcaactttcaagtcttactattcaagaagtatattttgtaaggctagagctgccattgatagtgattcctttgatggatctgggcaaagtaaattgaaaaccttctggaaagggcttaccattgtaggtgctgttaagaacattcatgattcatgggaggaggtcaaaatgtcattaatagtttggaagaagttgattccaactttcatggatgactttgaggggttcaagatgtcattggagaaagtcactgcatatgtggtggaaatcgtaagtggggcctgaagacgtgactgaattgttgcaatctcctgatgaaacttgaacagaagaggagttgcttcttatcgatgagcaaagaaagtggtttcatgagatgcaagctactcctggtgaagattctgtgaacattgttaaaatgaccacaaaggatttagaatatttcataaacttagttgataaagcaacaacagggttggagaggattgactctaactttgaaagacgttctaatgtgggcaaaatgctatcaaactgcatctcatgctacaaagaattattttgtgaaaggaggagttgattgatgcagcgaacttcattgttgacttattttaagaaattacgacagccacgccagcattcagcaaacaccaccctgattagtcagtaggcatcaccattgaggtaggaccctccaccagcaaaaagataatgactcgctgaaagctgagatgatcagtagcattaagatattttaaagttaactaatgtactttattttagacataatgctattgcacacttaatagactacaatatagtgtaaacaaaacttctatatgcactggtaaactagaaaattcatgtggctttctttattatggtggtctggaacagaacctgcagtatccccaaggtattcttgtatgatcttatgggactactgctggacattgtggtctgttgttgttgactgaaatgtctcatgcagcacatgactgtaatacagtggcaggggggaatagcggctgtatgtatggaggaggtataaatgaaacaaaattggtcaaatgttgctaattgttgaactgggtggagaatacatggaatttcatgcctactataaattcctaccataaaatttcactataaatataaattcctactataaataaatacatggaacttcattcctactattaatgaaggtaggcttttcctacttcatttatcattctacctacctctatatatgcttcaaggtttctttaataaaagttaaaaaaagtaatgcccagaccaggctctgcaaccatgtgaaaatatgctttaatgcagtgaactgcagaacatcctcatggttagatttgtaggtcttctcacttttgttaaaaggactcaggagttgtgttccatatgtttgtagcattaacacccttgtgaagatcagcaaaagtgcaggagccatgttgaaaccgcatgcaccaaaactcattccagctctgctagagtccttaagtgtattggagccccaagttctcaattatttgagcctccgggcgacagagcaagaaaaggtgagtggatagcgcaggcatattggtaagtatcatgagggaagagccctgttaagataccaaggttcatttgaatgacactgtcactactgttaccagaactcaccctctgtcaccacatgcagtgttttactgtttttttggagagaggttgtcagctcatacactgtcttgtgaattggatgaaaactgacacttccatctaaaaaatgaattaacatttgtttaacatagttttttgtatatttcaattttgttagggcttggatctataccttcagagtccttccatgggctccctcgccctgtaagcaaagagtatttgcacctagactttggcatatctcaaaattgttctgctttttaggtgtaatggagtcacctggtctctgatcagggtcatttttatttttatttttatttttatttttttggagacggagcatcactctgtcacccaggctggagtgcagtggcaccatctcggctcactgcaacctctgcctgccaggttcaagcgattctcctgcctcagcatcccgagtagctgagattacaggtgagcgccaccacacccagctgattttttgtatttttagtagagacagggtttcaccatgttagccaggatggtcttgatctcctgacctcgtgatccacccgcctcagcctcccaaagtgctgggattacaggcgtgagccaccgcacccagcctgatcagagtcattttttaaaacttcagatgaaacatatttattgtgaaaagttaatacagaaggatagaaagtaatcccatagaaggtctcccaatcaccacagtatcattccctgaggagcacctgctgtcaaaagtttcctgtgccttctctcaaattcctttttagtcataggctaccaaaccaaacaaacatactaatttaaaaatagtatcagaccgtgaatgttgttctgtgatttgttttttaaattaacagtatatcgtgtctatatatacacttattctttttaatgtatgtatagtgttctacagtgaggtgattttgaatttttgatggagaggttttgcaacatcaaaggttttaagtgttctttttttctccgtacctttggcactgttgaataacgtatgtgtgataacaagaatctcatttttctgatttgcactcttttcctagcattgtccattgccttttcaatattgtattagtcgtttatatttcttctgtgattgtgtttatgttccatgtctatttttctatttgactgtttttttaatttatatatttttattagaactgttaaaccctgttatatacaacatgtttcctctgttcactatttgatctttaacttgcctaaacttctctaataacttactctctttaccctttgcctctaatattgctgtttcttcttcattcattatttttccctctttcagcagtagacttgcaccttcctgggtgcccataggatgtttactaagcattgagaatttggaaacataaattctagtctaaactttgtagccctaggcaagtcacttgtgtatgccttacttttctcccttatcatatctggatagtgttaacctctccttcagcacagttgttagattaaaataccttcatagatacgaagggtaattacaaagttaaagaactgcacgtataaaattttctactgcttagacacaattttaaaaaccttagaaatttgtttagtcagttcctttatttagtggatggagaacctcaggctcaagaaggctggatgacttgcccagagccatactatgctgatttcttaactgttatctgaatttctcacctgtagtgtggtgctggttcccctggtaaattgttgagtgtaggtcaaaagaaattagagttagacttgatgtttgcctttgttatagctacggattatttttttttaaagttctttagcttggaagtgaaagtcttttatgggtgtttgtgcggattattcctaattaattgaatgtgccgggtgactttaatttctcttctttaggctgcgatggatagtgctcggcttagtgctgccaaatcttctccaatgatggaaacaatcaacatggtgagtgtcttaaataataatgagagggtttgtttgcttacctgaaagtgtaattcttcaaagtcttcaggctatgttaaatgaagcagagacttatgggatgagtcaagcagctgttgtgactccagttttttcttagtatatttctcttttcttctctgttactaagtggaataaataattccccaaataccagaaacagttggtccaaatttgtattacaagagacaacaacatatcaagagctctctataaatttacatctgtagtcttttgatctgcctatttagaaaggttcagagttgtgcctgtgcctaatagttatctttgggaggaactaggaaagttataagctgtggaggtatttaatgaagtaggtaacataaaggtatgtgaagagattgggcaatgtcgatatgttgttttagtcataggaaggcatttgcagtaaagggctgcttggcattctgaggttctgatttctaaacttcctggagtcttggtaaagttactctgttgtgcattccctgtaatggttagttagctatgattgtgtttactggaaattagtttgctaagcagatctgtacctttagcaggactctgaaggtatagatccaacccctaaaaaaactgaagtgtacaaaaaactatgttaaactggtgaagagaagtagctattttttagtgcctgctgggggagtattaccaaaatttggtctaagaatgttatgtcttagttggattattggggggaaataaaaatttaaagaaataggaatagttagtgaataccatttagttatattcattagtaatagaaaacatgttaattgcattttcaaaaataaaggccagcaatttataggaaaagtcatctaagaagttgactcattagagggggtttggtagggtaggcccactgtagaagatcaatatttagtttaggttttttatactaaacatggattgataaagaggaagtaggcccagaaagattcttcattcttgagtaatcattatttttcttttttagcaaattgatgtttttcatttttttgtttgtttttagtgttgaatcactgatgaataatttttctgtttgtagtacaatagtggttttaatattgaaatcagagcagaagcaagcagtgatttttcaacttcatgtcaaatccagttggtacacgtttgacaagggcagtttttaattgaagatgtggtcctgacttatttgccaaggcttacctttatatttgtcctttttcaaaagtgcctgcaataccttgatgtgtcagtgctgggcgagctagttcctaggttgtgtgaactgatcagaagtggtgtaggtcttggaactaaggtaagtgtactttccacaagaggaaatgtgcatcttcattagttctggccataaggatataacagccatcatgtttgaaattcatgttttaccacaaaatctaatattatacactaaccattttatttctgtggttgcactgataactgaaaacatgtaactggttcaagaaataaaacatctaactgttccagtaagtattaacttatttagtggaatcatttctgttctctggttgccgtgtacataccctctgggttgtcattcattagcagttcatggaaatgcacatccagttattagggcatggattgttttaggtggcaattgcatttttcacagaggggtcagcagtgtttgaatagaaaaatgtcctagttttcaagatctttgaaggatcagacacccccctaccacccttttaacaacaaattaataactcacattttttcttatgacaaaattaacacttgctggtattttaaaattttagcatttatagattaggagaaagttaaaataaaaattgtccagaattttgccatacagagataactgctgttaatattttgaagtgtttccttccagtcttttctgcacatgtatcttctgcagtgtcctcttctaatggccgtatgatactccactgtatggatgtaacatcatttattttactccatcaaggaacatctgatttgttttcagtttttgaaaaaaatagtaaagcactgtgatgagtgtcttcaggcacacctgaagatatttggttaaatttctggaaatggaaatgttagcacagtgatggacaagatgacatattttgcttttccagaagattgtaccagttttctttctttttcacaatgtctgagatcacccatctttctcttggaggtttaaaaaaaatcgctgcattactagtttaagagtttgcctttttctatattgagtcctggagggggtattaggcttcatgtattttatatgtttaaatttttggcacctaagccaatggtttggtaggtagaacattgtgaccatcagatttagacctttgcttttgtaaccctgtagggtggctgtgccagtgtcattgtgtcattaactactcagtgtcctcaggacctaacaccttactcaggtgagtttgtcaagggatgtgtggtgatatttttgcacagccctgtcttgtgtgacagagttttaaaaaggaaaaatacttatcattcagacctgcttgtgatgctgtgtgccttttctcccctcagtcccctgactccttcatttctttgtctgcaggaggtgcagagtttatcaagtttagcagcttttcactgttcataaacatttgattattccttagtggtataaggaggtaaaagtatcctcttttccacaggacttaccattgatagctgattttacatcagcatttttctcttcttagattggcttctagactggactagtgttctttatatacctcgttcttattttgcatctttttccacgatattctagtttaattttaactttatatcatgtaaaaggaagcaaatggatatataaatataacatccagaaatctaaactactgtggagtaaatcagatgttaattacagggttaggtttgtttgggttctgggaacagagtggaacatttggtcaaccaagtatcagatttttttctctttatttctggtaggtaaacttatgagtgctttgctgagtggcctgacagatcggaacagtgtgattcagaaatcttgtgcatttgctatgggccatttagttcgggtgagttaaatttcttgcttagttaaataaaactctttgacagttataaagaaatacttaggattgtttctttttcagacctcacgggatagcagcactgaaaaactcctgcagaagctcaatgggtggtatatggagaaagaaggtacctttctttttctattttatgtcattttaaatttagatgttaacagcccagtaaaacagtacaaattaggtcttaccctccatgattttatgtgatttgctagaaacatttgtttcttttcttttctttttttttgagatggtgtctggctttgtcgctgaggttggagtgcagtggtgctatctcagctcactgcaacctcagcctcctgggctcaagcgattcttgtgtctcagcctcctgagtagctggaactacaggcacgtgccaccacgcctggttaatttttgtattttttgtataggtggggtttcgccatgttgcccaggctggtcttaaactcccgagctcaagctatctgctcaccttggcctctcaaagtgctgggattacaggtgtaagccaccacaacccagcctgctagaaacatttctaattgattttacctgtttgttttgctattatatgagttgaacaatagcctgtttagatcagttacccttaaaaacaataaatatcgtaaagattttggtttctccttttcagaacctatctacaagacctcttgtgctttgactattcatgctattggacgatacagccctgatgtattaaagaatcatgcaaaagaagtcctgcctctggcatttttaggcatgcatgaaattgctgatgaggagaaatccgaaaaagaagaatgtaatttatggaccgaagtgtggcaggaaaacgtacctggttagtagtgtggcctgagttaaacctgcttcttaggaatcacagctagaattttttacttgcattcgttattcataaactcctctgaagttactttcccaggaccttaatatgcatcccatttagttttaaacccatccaaattgctcatcccatttagttttgaacccatccaaattgctgagttctcaaggttggcactcaggatttttgtctttactcattcatcactgcccacatgagagaatataaaccctgtgagcaaggagagctttacatttttaattaagagtgtgattttatgtggccttagagtattttagagtagttttctaaatgtgtttttcaccttgtcgcatattaattgatgatgcccatttgtgtgatacgttcctgtgggcacccaagttcgtaaagttctactattgtgagaataagtcacaacaccaacacactttctctccctttgagagagtggtgtgttttaacagttgagagtcactgcttttagactgttggtcactgactttttttcaggtttagaaaaatcagttaatttttcttgtcacttaaaagttgttttaattttgctttcctaggatcctttggtggcattcgattatacctgcaggagttaattactattacccagaaggctttgcagtctcagtcctggaaaatgaaagcccagggtgcaattgccatggcatcaattgcaaaacagactagctctctagtacctccatatctcggaatgatactgaccgcattgctgcaaggcctggctggaagaacgtgggcaggaaaggtaaaggaaccattcatacccagttaaagggattctgacttcatctttcattttgcataatagtaacgatctggttttgtgtaacttttccaatggattatttttgtgaactagatttcctagacagtggaagctttgggtaaaccttgcctgattaactgtggtatttcctctcaaactgcaacccgtgtggccttgcataatggacagtaatgctggagatagatacattttccatattcagccttccaagttacgtcttaaaccaacttgtcagcattttgtacctgttgacctcatgaacagatcaggattgggcatagaaagatcaggattgggcatatgtgaaatagagtagcaaggtagcctgcctctaaacctggggctgaagatgcccatctctgggacctatgaattagtaacagttatttttttacacaagagctttagtaggattcttaacagtgaacactcagtggggaacatgagattgtggtaacctaatgatctttatgttgtaaaggtcaatagtggcccatgcaggaatgaagtagtaccggactgggagtcagacatcattccaattctgtggttgacactgttttctgtgagacctgggtcgaatcagttctttaggcttctatgaaatggaggtgaagataattatcctacatccatggtttggagtaaaacttggtggatgtgcttaaaattatgcattaaagataaggtgactgttgttaatttttgttgtcatagttatcaaaaattcctaaggtaattgtaatcatggtttagacagtgtaaatgacatgtttgggcttaatagtatttcctcatctttcaaccccttaggaggagctattgaaagccattgcctgtgtggtgacagcttgcaggtaaatgttctttcaatgaagatgccatttcttaaactggacccgaaaactgcagcctttattaacttctgatgcttttgtatggaccctgtagtgcagagctggaaaagtctgtgcccaatcaacccagcacaaatgaaattcttcaagctgttctgaaggaatgtagcaaagagaatgtcaaatacaagattgtagcaatcagctgtgcagctgatatcttgaaggccaccaaagaggacagattccaggagttctctaacattgtcatacctctcatcaagaaggtaataccacctgtatcctcagttctggtttatactttaaaaagaaaaagttaaaaaattgttttcccctatgtcctgattattaggattagtttagctgcaagtagcagagaaattccaaaatacggccttaaacaagatagtcaatgctatgtttctcacaaagcgttgggagcatcacaaagtgttcaggtattccgtctctttacagctctgaactctgccatttctagggtgtggtcatcatcctcatggtccacagtgtgtttgtgttctaggcaggaatgcagaggagatgaagcaaggatgaaggatacagtgggcatgccatgtctctcttgaggagagttcctgggcaccgctagatggcactttgacttatagccatcctgttggtcagtacttagccacacctggcagcagactgagtcttcattctgggtgtccatttgccctccatgggagaaggggagagtggatttggtagtgaatgaacagtttatgtcataataagctttgccttggctaataagctaagccaccccagccatcctagagtaaaggcaagaagctcagtgtgccatgtgaattgcctctgccatatagtggaggatttgggtcaaaaaaagactcaagtttcatgtggaaaatggaatactcatttttaaaagttgggcactggtcccccccccaaaaaaaagggtgtggtttccctgtttatttgtgaaacatgaaatattttaagtaacattcttatttcttattgctcctaaattgcagttgttttctttcagtaataaggctatttaaataatttccattacaaacatagtgatagcatatggatttgggagacttgtgttttaagttgattacatcactagcaagctggaccagttgcttctcttagcctctgtttctctatcaagaaagagtttggatttagatcattactgagtttcttccatctttaaaatctgattctaatgcaagtcttttcatgttatgctcaaaagactacatatgcagtattttttagcttttgtttacagatgcctgtaaagtattgcctaaatttattagagatacagtattctggttataaattcttgttgtaaatagggaaacttatggtagagaatttatcatttaactcttggttaatatctcctgccttggttggtaccctgatagctttaatagtatacctgtaactttgaagaagaaaatattacattttcttttctttgatatatcctagaactcacttgaaagcagtggggtccggacaaccaaaaatgaagaggagaatgaaaaggaaaaggagctccagctggaatatctgctgggtgcctttgaaagcctgggcaaagcctggccgcgaaacgcggagacccaacgtaagcaccagaaactgcatttgaagtgctgtaaccagaggttacttaatgagagcgaagaattttctctatgacaaattatagttattgtttcttatcgagcctgattgattaataatgagaattatccagtgaaagttttttgtctacatgagtctgtgatctcactgatcattgtaccgctgtagctagggctgctgtaagaaagtatcacagactgggtggcttagcagaaatttattttctcacaattctggaggatagaagtctgagatttcgagatcaaggcgtcagcagggttagtttctcctgagacctctctccttggcttgggaatggctgtcttctccctgtgtcttcacgtggtctttggtgtctctgtgccctaatcacctcttcctataaggacaccaggcacgctggattagggcccactcatatgacctctttaaaggctctgtcttctatttaataataatacagtcaaattctgaggtactgggggatagtattttaacatacgaattttgggggcacagttccacctataataaccatgatacattttatgcagatagtttgatagacgagttctactgatcttcttgatgatcatagctctattcagaggaatgcacaaagtttattagcagggtctctttatcctgaaatgaatggtcttgttaccaagtgttcagtaagcaactgaaatccctgtttcagtgaaaaactcattactatttggacaattttcagaactggacatgtatttcccaaagattaaatgaacagtaaacctctattattggatgaggttgcagttagtttggagtcccctgacagggccttaaccttgggatgatactaccctttacacttgatcttagccaaaaggccaagaagtgatgatgctaccctttaagcttgccttgtgttgggtcctacagtgcatcctgctgaagatcttagtattcgttttttttttgtttgttttttttttgagacagggtcttgctttgttgcccaggctggagtgcagtggtgcagttcttgcagcctttacctcctgggctcaagtgatcttcctgcctcagcctcccaagtatttgggtctacaagtgcatgccacgacacccagcaaattttttttgaagaggtgaggtcttgctatgttgcccaggttggtctcaaactcctgggctcaagtgatcctcccactttggcctccctctcaaagtgctgggattataggtatgagcctccatgcccagcgacaatattattgaatgttataaaaagtactgttgattatttgtgattggatatgtctagaatcagttaaggttctctttgagccctgtcatcctttgtgtgaacttatatatttgctatgtttataggaagggtttcccagaagatacaaatttgcaggtggttttatttcttaatattatgttatagactgccatggaagtccactaatatgatgccataaagagtattaacttttccttgataggtagagaaagctaaagtagggaattatatgagaaagatgatacaaacataaagcagtttattttaatataagacatagaaggttgttaatagaaatgtgcatttattgagaaccaaggccttttctttaggaacttaactgttacacattggcttctcatatatatctacaatttctgggttttgtttctttaaaacagagaaagaaatttcaagctcttatgagacaatcctagtgcagaattctagattttttattgcctccccccatttttacatttgtttgagccctactaaatcctacagtaattaaaaataacttcgttgttgagttttctgctgattcatcagttggcataatattaattatatagttataattacagttgcagttggcataacaggtttataataaagcactgttgactcttggtaaacctgcaatttgcagaagcttgtgagcatctagagaggagcttctggcctccagagttctttctgtggctgtcattcagggagttttgaggggcaaagggagtgtggttaaagtgctttctcagttccatggagaaccatatgccttgaaagtgaatatttgtgaacaattatattgcacctttgtgggggcagtttctgatcaaggaaatttgtttggggattgagtacaaagtcatgctgaagtttttggggaaatttcaatggctttaattaaaagtatttattgttttatttctctttttcctgcttttctctctcttatcctccccaccttctctctttctctttccctcttcctttctcttgctctctctgcctgtccctcatttattccatctcttgttcttttatactgtctcctgctctgtcccaccttgtctttttttcccaggttgttatcgtcaggagctgtgcaaactgatgtgtgaacggctaaaactcagcacgtggaaagtgcagctaggagtcctgcaatcaatgaatgccttttttcaggggtaaattgcttcatggctcagttttttattttgttcctccccgcagcattttatgtataatcaatggaatttttatacatttaaaaactggtagctaaagtgacagtgatacatacagatagaaattgtgacaggaaagttttagactgtttcttaataattggcatttgtaccttgctttctgatttgtataggttaatgcttttggaagaagaacatgccgatcctgaggctttggctgaaattctgcttgaaacttgtaaatcaatcacatattctttaggtgagtgtagtaaactaaaactgatgagggagtcctaattttaaagctaaggagctgagcttcaaatatttcctactttgtcttaggaactaaatttctgaaatagctactggactctgctacttattatactccatgtgtaccccttaactggaatatttaaatctggaactataacaggattttagcatctagtttagaaaaaccttcgtgacaagtatttttacaaaattgttacttgaaagtaatttcaaacttacagaatggttgcaacgacagtacatgtaatactctgcaatatgtatacactttatgcagaatcatttgttaacattttgtgccatttgctttgtcatttggacttctatatacatgtttttctcctgaaccatttgaaagtatgttgcttacttcaggcccccttgttcctcaattatttagtgtgccacggtacagttgtcaactttaggtagtaaacatggatgcagttttttaaatcaaatgtttatcgttcatattctagtttgttcagttgattcggtaatgttctttatttttatttttattttttttgagttggagtctcgctctgtcactcaggttggagtgcagtggtgtgatctcagctcattgcaacctctaccttccaggttcaagcagtcctcctgcctcagtctcccaagtagctgggattacaagtgtgtactgtcacgcccagctgatttttgtatttttgtagagacagggcttcacgaagttggccaggctggtctcaaaactcctgagctcaagcagtccacctgccttggcctcccaaagtactggagttataggcatgagccaccacacccagccagtaatgttctttataggattttttccccctcccctccattagggaatccagtccaggtgatgatgatgatgatgatgatgatgatgatgatgataatggttattattatttttgagacagggtcttgctctgtcacccaggctggagtgcagtggcgtgatcttggctcactgcaactctgccttctgggtttaagtgattctcctgcctcagtttcccaagtaactggaattacaggtgtgtgccatcatgcctggctaatttttgtatttttagtagagacggggtttcaccatgttggctaggctggtcttgaactcctgacctcaagtgatctgcccgccttggcctccaggattatttattgaattttattgtcatatatttttagtctccttcaatctggaatacttcgtcagcctttctttgtcttaggacattgacaattttgaagaataaagtccccccgacttccctttttgaaaaaacagaatgtttctcatttggtgtttgatgttttctcatgattatatccaggttgtgaattcccagttgggatacatacataagtgatgtgtcctcacattaagaggcacacagtgtccatctgtcatcatttgtgatgttaattttgattacctggtcaaggtactatcagtttttctctactggatagttactatgttttctttttgtgtctaataagtagcctgtgggaacagatcttaagatcattcaagtaatttgtttctcttctttaaaatttcttctctatatttagcatgcattgatgattcttccctgaaccaatttttactaagatgattttgcaactctagcactttgtccacattcaccatttgatagttggaattctgttgtaagcaagattcttctcttctgcccatgtttttatttatctgttactggcattgattcatggaatctttcccccttcaaatggtttataatttaattttttaaatctaattcgttattccagttgtcccagatttggccagtggaagccctttcaagctgcctcctgtgtccttttgacaggtcaccgtcactctttgtagcacttttgtactttgtagcataacaagatgataaggcccatctcatgcctaccctgctttgggcttggttgtgtgttgatttttttggtagacaatttcaccatgaaccagacgccgtgtcaaagagtggatgccaaggaagcatgtttcattcgcagttgttggcagcagcatccttttatggataaagaacaggcagccaacagacctctctttgctgagttccaggtgtccctgatcggcttaaacactgggtcatataatgttctttggtaaaatgaggagggtcatgtagacctaaggatcgttcttatccgtgatacgaagatgattttgtgtttgagatagttttttcatctcccacttctaaaatggatcatttaaatattgccatttgttgtggtgattggtatacttggctgacaggtttttgtttttccaaagtaaagactgtggacattagcacacatttcaagtatttgatacttagcaaagggaagcttcctttaaaaaaaaaaaatcagatatacccttccctagagttgtaatttctggacatctttctttcagcaacacaaatttaatcttggaggttgtgtttttcaggcaggccatatgaactgtatgatatttctttttagaaaataagacctactcatctgtgagaacagaagctttatctgtgatagaattgctgcttaaaaaacttgaaggtaagttgttgttagttctgactgggggaccataaagccatgtggcatatgttttagaaattttttgtttcgtttttgcttatactcttaagcatatactctgaaatacaaatcagtatgtatgcacatgcaagaagaatggacaaagccaaaactattaaattttactaaatatttaaatttgatacacttttatatatttttaatatattattaagctatagttgtcttaaagtaataaagtttttgttttcatcgtgaatcctgatttaatcttggttaattacaggaattggttgacagtggcatgtgtacatgtaaataagcagaacgacacactgaaaagtggagttggaaaaacatttttaacagttatctacctgagtcatcaaatctgacagtagcaattttcttaatcctatttcttctcccctaacctctttttcttctaatggtctatcagtgggtggggtgggggggaactgttagcattttctccagtggtgtatctgttactgacttcagaaggaggaccctcttcttttttctctctctctctcaaattgttttcacggattaagaatgtagaagatggaaacgtttttcctgcaaccttgtgtatttgctctttctacttctctatctttgcttagcaattaaaacacctctcttagggctccatcaaacagaacttttagactgagtaacgctaaacatctcctaatcccttttttccttgttgagataaaagagctaggcacttagtcgtattaccgaattctcagtttgccagatatgtactaatatagtccagatgaggaaaataaggctgaaggcaagctaaacttgcctgaagccacattgctaggaagtgacagaaccttgtaaacaagatttaagatttgatatactttcttattttctaaaaatttcaatgtgcatgtagttctcagatgctttcctcgaagaaaagggagtgtcatctatttatctgaccttgcaattatgacatttcttagaagttttttttttttaactgaccgtatcttatgaaatggtcttgcgatggtgttgttgaaatgacttttttgctgcagtgtgccttgccctgataattccttcttcctactatgcttcagtgtaattatttctcttactcccactgatactgggggaaggagaggaaactccctgatgtgcctctacgctactgtcaagaattaggttttgagacacatattgacagtatgtaatgataattatatactgatctgttatcaagaggttgctttgcatttatttgggggataggatatttttaaatttttttcttgcttgttctataaggattctttggggttttttctttttgctttgttttttgttttttttgtttttgttttttttttttcatgcagaatctaaacagtgggaatgtttgacatctgaatgcagagtgctcctaattgagtctttagctactatggagccagacagcagacctgaactgcaggagaaagcagcgttactgaagaaaacacttgaaaatctggaataaattagaaggggaagaaacaaacaagtgccatgttcattgggggttgaagtggtggtgttctttgaaaaaccaagtgggaaaaagtaaagattaatctgtagcatgcatcattccttggctgaaataaaaagaaaaagccttaaattttgttccttattagctttattttactttatgtttttaaagtatctgggctgagtgagcttaatggaaccttggatgtttgaggggtggttgtaaaggaaactggcagaaatagttactaaaagagttcaagctgttattaaaggaattaatagacagagttgcagagcaagctggataaaaatcttagaactgcattcaaattagttatttcaggaaggggccctataaataacttattttaacctccctcttacacctgaagaaataggaagctgtgtcatctcagaggctttctgaggcctgtgccaaagtcagaacccaggtgtttaatgtctggccctggatactttcttttatggccatctgccaaatcagtgctaaccccggcttacccaagaaacttccaagatgaggtacgtttagggtggcacacagcagtctttgtgccagaactaaactgacccttaccattgggtttctgaaagccagaagctaaacattgtcttgtcatgtgtttaggtggttgatttggagaaaatgattgtttagcatctttacagatggagaggacagagtcagtctccttcggataattccaatcgtcttccttttacaggtggataaagtagattaggacaagatcacacattctatctgtgtctgtggctgcatattttgcaaaaccagaaacaaaatcgcagactgccgtggtttagaccatttataatgtcaaaactgtaatgacaaatttctgttcacttttatgctaccagtatgactttataggggagaaggaaagccttttaattagccacctgggaattactcttttaaaaaatgccttttctcaaaagaacatgataccactccaagtaaatcattgccactaggggttttcctccttccttctgttgcccatgcccctgcctgaaagtgtagggtaagaggaaaaacaagtaaaaccttagtgttgatggtaaactgagaactctgtagcttaccttggattccagagcagaagactggtttacattcagtactcatccttattgacgttaacaccaggaatctccatgtttattatttttcgtggaaactccatgtttattatttttggtggtctctattgaccaatgtatttcaaacttttttgactgcaagtcataataaaaataactttttacatcacgacccagaa

SEQ ID NO: 6426 - DNA, 205 bp, Homo sapiens
gggatttgtttctgattgaaaagggagtttacaaataaaaatttaagtgtttattacaaaaacatcctctttgctgatactgaacgtcagttttagtagcatcatgaattttaaggaatctatctcggattttcatttgagaatggctattgcttggggaaaaatcaacttcggatgttttttagaaagcttatggcgtctttta

SEQ ID NO: 6427 - DNA, 427 bp, Homo sapiens
caaacctgaagtgggaattttcaggttgcatgtgagaggtggtaacagaggcttgacaacagggagggctcacactgaggagtgggtttgctgtgagaggcatgtttttgactccatgggttttttacctagtgacttaagcaagtagaggttagtagagaggcatctgtgccagtcttcatcctctgaactcttgtattgcctcaaactcttcttggaagattgcatcctgcttggctttttactcatgcaaaggaatctccaattgtccattaaatgttgaagttctatttttgtctgttttgggaaaggaaaacataaaatattgtggagaagggagggatgatgaatctctgacgtgaattttgatcatgcgtgttctatgtcattctcatctgagtgcttcttagcctttggatgtcattgt

SEQ ID NO: 6428 - DNA, 6452 bp, Homo sapiens
ttccagagtgctgggattacaggcgtgcaccactgtgcctggtgttattggtttttttttttttttaaataatgagcaaatgtatacctattataattaggaaatttagtttatggaggaaaatctcatttttctatctgtcacagaaatatgatctactttgcatgcttgtttgaatgttggaaagagtgaattgatctattaagttaggaaaagcatttcaaaaatacttgtactataattataaggtggtggtaatagtgtggccactacttctgtttcattattcaccagttaataaataaacaccttgttttttagagaggacatgtactcccaggattccatagatctccttgctaactcaggactacagtttcagaagcatgaagaggaagggattgacacactgcactttgcagagctgcttatgacatcaggagtggttctctgtgacaatgtcaaatggctttcatttcataggtcagtcctagggaatgtgtatttctctctcactttgggctacactgaagcagggaattgaattcttagtcatttttgcagtcctagtgactgttctgttcagcagcagcagccagaagttgaattggtgcttgttgcccatgtttcagtttttcacaaaacactggggctcatatactggtttgtttcacacagtatttggctctatcatgtggctatcagtgggtttaattccaagtgggaatatggtgggtgtagagggtcacagtacttggttatcttttaaatggctgtctcggagtttcttaggtacttgaaagccagattctccttattttaacttctcagtacttttggatttttggtgaatcgaatctacaattaaaccccttgggtacttttttatatctcccatattagtctgttaggttgttattagaaagttcagattataggccgggcgcagtggctcacatctataatcccagcactttgggaggctgagaaaggtggatcacctgaggtcaggagttcgagaccagcctggccaccatggcaaaaccctgtctttactaaaaatacaaaaattagccaggcatggtgacgggtgcctgtaatcccagctacttgggaggctgaggcagggataattgcttgaacctgggaggtgaaggttgcagtgagccgagatcgtgccattgcactccagcctgggcaacagagtaagactctgtctcaaaaaaaaaaaaaaaaaaaaaagattcagattatagtacgataaactactcagaaaaagtgaaagttcctaacatgaagtagcatttacaagctttgagaaataaaatggttgaacactggggcctgataaccactgcttttttaacctctgtggtttattctcttgtagtggctatgattttggctatatggtaaagttgcttacagattctcgtttgccagaagaggaacatgaattctttcatattctgaaccttttcttcccatccatttatgatgtgaaatacctgatgaagagctgcaaaaatcttaaggtatatgatgtttttcttaataccagtaacaaaaagaaggacagaaaaaaagctgactttgctttattgttacgtgttcagcatgcatttttgagtactagatgctagtgtggtggtagacagggtataatataaagctgatttggtcagatatttgtgtggtaacgatctttaacctggccatgaagggaaccctctgcttctgtcatcttaaggcaggcattcttcactcgagggccatgaacctaatgaaaaggtataaatgctgtttgttagggatggggtctgtggtataacagattcttagaggagttcttaactctagaaagttttagaacttggtaccgtaataaattgttgacatagagctttgctgtctagaattagagtgggatttactatttcctcagccttgcaattctgattttaatggcagagttctggaaaaattaacaacatggaaaggagcaaaatgtaggatgtagcacaatatagcgtctggaaaaagggaataaaagagctaaaaagaggttactaaggcctgttaaataaatggcctgtccccacttcttgctagaattcagtgaactcataactgcacttagttgcctcaagaaggggatgctgggtttgcataatatctttgttctccatacatctccaggaggtcttcaggaagttgctgatcagttggatttgcagaggattggaaggcagcaccaggcaggctcagactcactgctgacaggaatggctttctttaggatgaaagaggtaagcttccttgaatgtgatcacaggcctctcggcagtaacttgctgaaggctaaggaggtagtggatggtctgttatgtgggctgaggtttgttgaacatttattttttatttatttattatttattttttttgagatgaagccttgctctgtcacccaggctggagtgcagtggtgcgatctcagctcactgcaacctccgcctcccgggttcaagcttttcttctgcctcagcctcctgagtagctgggattataggtgcccgccaccatgccctactaatttttgtatttttagtagagacagggtttcgccatgttggccaggctggtttcaaactcttgacctcaggtgatctgcctgccttggtctcccaaagtgctgggattacaggcatgagccactctgcctggccgaattttttgtatttttagtagacacggggtttcactatgctggccaggctggtctcgaactcctgacctcaggtgatccgcctggcttggtctcccaaagtgctgggattacaggcgtgagccaccacgcccagccacatagactgtttttttagcaagttgatgtccactttgaaagtggttgttttttgttatggtattctgcatgtcacatgtttgagaggcaaaagcagcattctgacgtgaaagccactttccagtaaccaagtattcttgagcacacccaagtccagaacttcatgttcttgtcagctctaatcctttcagttatttgctttttttctgattcctgtaatagaaatatatttgttaggccacctactgacattatggtaagttctgttaattattattaaataaatactatattgaatttactataaccccttagtaaaaattagactcttaatttcttcttttagtttctttactcactgactcaggttttaaaatatattcaaagatgtagaaggagtaagacgctgctttgaaaaattgaaatattgattttgttgacacttttgaggaccggatcagattaattgatctgtagacatggatctcctttttagaactaagattgtagagagggagagtacatttcctctttgttactcttaattataaacaactgttaccatgtgttggtaaatgttctaggtcagtgattctcaactggggatgattttgccctggagggtacatttgttaatatctgtagatgattttggttgtcacaatctggtgggggagagtggtgtgctacctgtcaggatgctgctaaacatcctgtgatacactggacaagttcccccaaataattatcctaccccagtagtgccacagtggagagatcttgcgttaagtgcttactgttcgttatctcattcctcataataaccctattatcctgttttatagatagggaactatggcttaaaaggagtttaaatgactttgccaaggtcaagtgagtccggctgaatccacagcccaagcccagcccattgctctgcctgttaaagagaagggagcagttgtgttaaacagcagcagcacagagatactggcagtaaaagaatacatggaaagtatgttcagataggagagcctttctcctatagagaaaggagcatgaaaagactgcattaaaaggaaaggtttaggccgggtgcggtggctcacacctgtaatcccagcactttgggaggccgaggcaagtggatcacttgaggtcaggagttcgagaccagcctggccaacatggtgaaacctgcctctattaaaagtacaaaaattagtcaggtgtgatgacatgcacctgtaatcccagctactcgggaggctgaggcaagggaatcacttgagcctgggaggcggaggttgcagtgagtgaaaccctgtctctttttctttttctttcgagacggagtcttgcattgtcacccaggctggggtgcagtggtgtgatctcagttcactgcaacctctgcctctcgggttcaaacaattctctgcctcagcctcccaagtagctgggattacaggtgcctgccaccacgcctggctaattttttgtatttttagtagagacagggtttcaccatcttggccaggctggtcttgaactcctgacctcgtaatccacctgccttggcgccccaaagtgctgggattacaggcgtgagccactgtgcctggccgagcctttctatactattagtttttttttctagtttggtatattttcagggctttaggaaggctgggaggtggtgatgtggtagtggtttttttcttttttgagatggagtcttcgctatgttgcccaggctggagtgcagtggtacggccttggcccactgcaccctctgcctcctgggcgcaagtgattcttccgcctcagcctcccaagtagctgggattacaggtatgtgccaccatgcccggctcatttttgtacttttagtagagatggggttttgccatgttggccaggctggtctcgacctcctgaccccaagtgatctgcccgcctcagcctcacaaagtgcttggattccagacgtgagccattgcacccggccagatgtgataatatttatacttgtcatgacttctagcataactctcaccatggttctctgtcccattctgcagttgttttttgaggacagcattgatgatgccaagtactgtgggcggctctatggcttaggcacaggagtggcccagaagcagaatgaggatgtggactctgcccaggagaagatgagcatcctggcgattatcaacaacatgcagcagtgatggcgccaggctctgcagggtgggcctgatcccagagtggtgcttactgtgctgactgtgtacttatcttccccaagagaaaatgcttcttttgagcacactgtacctaccatctgcattgagcagaaagacttttgttttactgaagacaaaagatgtttttattttagacccagaagagaggagtttgctctgaatttgtaaataagtcttccccattcctcatactcgagcctctcctctctggttgcctcctgccaccagcatccatggctcatttgacacctttttaaatatcaggacaagtctgaaacaaagtagtaaaatgtatataactcttacctgttgtcattctttttcttttaaatttgttgctaatctctgataatgaagattcttactctgattctcagctgagctgtgagggcttccagggaaaatggaacaaaatggtgttcttaggtaatgggttgtagatactgagtcttcctttccttttctgacccttctcgaggacatttgctttcctcacacttttgtagtctctctttacatattactatatggaaatgaattgctctgtgctgaaatttgaagaccagataatgaaactgaaaagcaaacaattttactgaatctgtctacccttcattcatgagaactccagaatgagtgttgaccactgaagcatcttttaagtctgtgttccattgtgccattcaggtttgctgtcacatatgcatcatctgaaatcatttgaaatttttgtacaataaaatatcctggatttgatcctgaaggaaactagtaagatcagatttttgggtcatgtctgttgtattttcagtaatgtgatttcagatggtcatctggattctcccacttctctactccattatttctctacttttccttccagcaaacctgaaacgtgagggagatggattaatgtgagtaacaggaatgtgtctttaaaaagctagagtggttacatttaatcaggcagtaagataatttgggttcttgagttgttttggagtaatatcccacaactggggtaggaagctcaggacttttttctttaaagctagtcatttcaaaagcatattgtatttttttgaatgactacagtatggacaatttcaaaaaccaaaacccactttggattggtggaagtaaaaactggtaactcactcaagtgaatgaatggtcttgcattttaaaagcttatgggaaactcaatttgaaatgattagaaaatgtcaagtattataagctggtatttaagatgcttgtaaatactatttatgtttttaattttgtaaaataaagatttctttttaaccactggcatt

SEQ ID NO: 6429 - DNA, 1328 bp, Homo sapiens
ccccaagtgtagcacagtgtgctgactgagtgcttatcttgcccaagagaaaatgctgcttttgagcacactgtacctaccatctgcattgagcagacagacttttgttttactgaagacaaaagatgtctttattttagacccagaagagacgagtttgctctgaatttgtaaataagtcttccccattcctcatactcgagcctctcctctctggttgcctcctgccaccagcatccatggctcatttgacacctttttaaatatcaggacaagtctgaaacaaagtagtaaaatgtatataactcttacctgttgtcattctttttcttttaaatttgttgctaatctctgataatgaagattcttactctgattctcagctgagctgtgagggcttccagggaaaatggaacaaaatggtgttcttaggtaatgggttgtagatactgagtcttccttttcttttctgacccttctcgaggacatttgctttcctcacacttttgtagtctctctttacatattactatatggaaatgaattgctctgtgctgaaatttgaagaccagataatgaaactgaaaagcaaacaattttactgaatctgtctacccttcattcatgagaactccagaatgagtgttgaccactgaagcatcttttaagtctgtgttccattgtgccattcaggtttgctgtcacatatgcatcatctgaaatcatttgaaatttttgtacaataaaatatcctggatttgatcctgaaggaaactagtaagatcagatttttgggtcatgtctgttgtattttcagtaatgtgatttcagatggtcatctggattctcccacttctctactccattatttctctacttttccttccagcaaacctgaaacgtgagggagatggattaatgtgagtaacaggaatgtgtctttaaaaagctagagtggttacatttaatcaggcagtaagataatttgggttcttgagttgttttggagtaatatcccacaactggggtaggaagctcatgacttttttctttaaagctagtcatttcaaaagcatattgtatttttttgaatgactacagtatggacaatttcaaaaaccaaaacccactttggattggtggaaataaaaactggtaactcactcaagtgaatgaatggtcttgcattttaaaagcttatgggaaactcaatttgaaatgattagaaaatgtcaagtattataagctggtatttaagatgcttggaaatactatttatgtttttaattttgtaaaataaagatttctttttaaccactggcattaaa

SEQ ID NO: 6430 - DNA, 200 bp, Homo sapiens
agctcactgcaacctctgcctcccaggttcaagcgattctccaacctcagcatcctgagtagctgggattacaggcatgtgccaccacgccctgctaattttgtatttttagtagagatggggtttctccatgttggtcaggctggtctcgaactcccgacctcaggtgatccacccacctcagcctcccaaagtgctgg

SEQ ID NO: 6431 - DNA, 260 bp, Homo sapiens
gggcacagtggctcacgcttgtaatcccagcactttgggaggccaaggcgggtggatcatgaggtcaggagattgagaccatcctggctaacacagtgaaaccctgtctctactaaaaacacaaaaaattagccgggcatggtggtgggcacctgtagtcccagctacttgggaggctgaggcaggagaatggcgtgaacccaggaggtggcaggttgcagtgacccaagatcgcgccactgcactccagcctgggcaac

SEQ ID NO: 6432 - DNA, 5884 bp, Homo sapiens
atggatcagacaatggctgccaatgctcagaagaataaattcttgattgatgggtttccaagaaatcaagacaaccttcaaggatggaacaagaccatggatgggaaggcagatgtatctttcgttctcttttttgactgtaataatgaggtaatgaaaatcttcatctgcccacataggctttaagcaactgttagtcaactattagaaaaaacaaaggattttttaacttatattttatattggcagcagtgttttttgaattggtagattggatggacggaacagcactgtcttgctgttggagtattaaaaactatttggcattagcagccttgtggagctaaattttcctttattttcaaaataacaagaatcagttttgatttttaaaaaataagaattgacatacataataatattaggtaatgaagctgaactactttcttaggtagacattattatcaaagagtattttgccttagggtgttgtttactggaagagaaacacgtttctgagaagttgggaaaactttctgttttaaagaaacatacagggctgggtgcggtggctcacgcttgtaatcctagcagtttgggaagccaaggtgggcgatcaccttatgtcaggagttcaagaccggcctggccaacatggtgaaaccccttctctactaaaaatacaaaaattagcctggcatggtggcatatgcctgtaatcccagctacttgggaggctgaggcaggagaattgcttgaacctgggaggcagaggttgcagtgagccaagatggcaccactgcactccagcctgggcgacagagcaagactgtctcaaaaaaaagaaaaaaaaaaagaaacatacaggatagcctgatttgtcttaagagtgaaatgatcttgaaaaaagtaaaaaaatgtacttttctttctggtagttctaataatgaagccagacatacttttgaataactaaatacatttctcagaatcatttaattaaaaagcctgaagtagttagtaccttgaaagaagttggctgttcttaggttgaattgtaaatgtgcccctggtggagaatcttgctgcagcctttgtgttgttttattttattttatttttttgagacagagtctcactctgttgcccaggctggagtacagtggcacgatcttagctcactgcaacctcccaggttcaagcagttctcctgcctcagcctcccaagtagctgggattacaggcatgtgcaccatgcctagttaatttttgtatttttagtagagacggggttttgccatgttggccaggctggtctcgaactcctgacctcaggtgatccacccgccttagccttccagagtgttggaattgcaggcctgagccaccatgcctggccttttgcattgttttaaaacgtaactctcttcttccaaccccccaaaatatgttttcatttacccttcaaagttaactttagaatgttaccacagctttataacaaggaatgtttattcacaattaacaaaggatgctttattcaaatgcaaatatgttgactcaaatattttcaaatttatggaattatcaaaaagcagccaaaaatgaaacaaagtttgaggcatgtaattcatacctaataagttaataatatatctgagatggaatcatacacatacagatctttttattacagtttgaaaaaaaataagcaggaaaaactgagtcatgaatgaattcttattatgctctgtacttatttaacctagtttatataaattgaaccacatgtttacgtttaaaaggactttgcatgttgattaatgaattagacacattgggtttattgcagggtttttttggtcatctctttaaactcttgttttctttgcaggttaaaagaatggcaaattcatatctatatttttaataactttgtatctctttttagatttgtattgaacgatgtcttgagaggggaaagagtagtggtaggagtgatgacaacagagagagcttggaaaagaggtacttggcagtttttacatacaaccacttcaatcccagacctgccttatttggtacaggaataaaagagtcacatttaaacatgtaaaatggcttgtttaagatgttaggtcaatcagtcggggcagatccagtgttctgtgagctctcctataacatgtagaagaaaggatagatacctagaaccttgcaatatttacttcttttgcagaattcagacctaccttcagtcaacaaagccaattattgacttatatgaagaaatggggaaagtcaagaaaatagatgcttctaaatctgttgatgaagtaagtgttcctagcctgtctttaaaaaaatatgtcaaataaaaatgtgattatttgttttggggtaagcaggaaaaaaagaaatactatcacagattagttagtttttcaagacactggaagccagtcatggtggctcatgcttgtaatcccagcacaagtgttcaagaccagcctgggcaacatactgggactctgtctcttaaaaaaaaaagaagacactggggactaaatgaaaaattagggtttttttcctttctgagtaaaacctaaaatgaggtttataacttcaaacttgttcttcatgagaaatgggtggtttatgaattctaaatttgctcccaagcactagaaaactggtattttaagaaatgtgagttggatcacatgaatggcaagtcatctagctcaagagctccaggcttctttcttctgccacagaacaagtagcaccacaggtgaaggtttccatgacttatcacttctctttctttttcataaatagcgatctctaaattgtggtttgcaagcgcaacaaaatttctagtgtctcttaaggaacctaacctccctttccccgattccctgaatcttcatcctcttatagtcataagataaaaaagaaaggcccaggggaagaagattcagggaatctttttttaatccattgacactttgtatagaggtgaggtaatacatgagaaaactgtgttttagaatcagaactaagaagataagccacttcagttatattttatattttattttacattttatttacagtttatattttatcaaattattggtagcctctcaagaatattttgtcctaaaagcactaatcgaatgtaatatagtcataattttatatgtattatttatataatattactgtctaaagtaaaatagatgaaactaagtatgtgattcaaaaaaatgattcattttgaaaattaatgtaaatttgatttttttgtgtgtgaccctgtttggagatggagtctttattttttatattattttatttatatatattttttgagacagtgtctcactctgttgcccaggctggagtgcaatggtgtgatctcagctcactgcaacctccgtctcctgggttcaagtaattctcctgcctcagcctcctgggtagctgggattacaggtgcccgccaccacgcctggctgatttttgtatttttagtagagacggggttttgccatgttggccaggctggtcttgaactcctgaactcaagtgatctgcccgcctcgacctcccaaagtgctgggattacagatgtgagccaccgcgccccgccaaatttgattatttttaataagaacttagctgtatggtattttaacagtacctgcttttaaaattattatcatctttttcctttacaggtttttgatgaagttgtgcagatttttgacaaggaaggctaattctaaacctgaaggcatccttgaaatcatgcttgaatattgctttgatagctgctatcatgacccctttttaaggcaattctaatctttcataactacatctcaattagtggctggaaagtacatggtaaaacaaagtaaatttttttatgttcttttttttggtcacaggagtagacagtgaattcaggtttaacttcaccttagttatggtgctcaccaaacgaagggtatcagctattttttttaaaattcaaaaagaatatcccttttatagtttgtgccttctgtgagcaaaactttttagtacgcgtatatatccctctagtaatcacaacattttaggatttagggatacccgcttcctctttttcttgcaagttttaaatttccaaccttaagtgaatttgtggaccaaatttcaaaggaactttttgtgtagtcagttcttgcacaatgtgtttggtaaacaaactcaaaatggattcttaggagcattttagtgtttattaaataactgaccatttgctgtagaaagatgagaaaacttaagctttgttttactacaacttgtacaaagttgtatgacagggcatattctttgcttccaagatttgggttgggggcactaggggttcagagcctggcagaattgtcagctttagtctgacataatctaagggtatggggcaaggatcacatctaatgcttgtgttccttatactctattatatagtgttattcatgattcagctgatcttaacaaaattcgtagcagtggaaccttgaaatgcatgtggctagatttatgctaaaatgattctcagttagcattttagtaacacttcaaaggtttttttttgtttgttttctagacttaataaaagcttaggattaattagaagaagcaatctagttaaatttcccatttgtattttattttcttgaatacttttttcatagttatttgtttaaaaagatttaaaaatcattgcactttggtcagaaaaataataaatatatcttataaatgtttgattcccttccttgctatttttattcagtagatttttgtttggcatcatgttgaagcaccgaaagataaatgatttttaaaaggctatagagtccaaaggaatattcttttacaccaattcttcctttaaaaatctctgaggaatttgttttcgccttacttttttttcttctgtcacaatgctaagtggtatccgaggttcttaatatgagatttaaaatcttaaaatgtttcttattttcagcacttacatcatttggtacacagggtcaaatagggcaaataattttgtctttgtataatagatttgatatttaaagtcactggaaataggacaagttaatggatgtttttatattttaatagaatcatttatttctatgtgttatgaaattcacttaatgataaatttttcaacatacttgccattagaaaacaaagtattgctaagtactataacatattggccactaaaattcatattgagattatcttggtttcttggaagagataggaatgagttcttatctagtgttgcaggccagcaaatacagaggtggtttaatcaaacagctctagtatgaagcaagagtaaagactaaggtttcgagagcattcctactcacataagtgaagaaatctgtcagataggaatctaaatatttatagtgagattgtgaaagcaaccttaaagttttgaagaagactgatgagactaggtgctttgcttcctttcatcaggtatctttctgtggcatttgagaacagaaaccaagaaacatggtaattactaaattatgaggctttgctttttgtttgcttttaagtagaaaaacatgttggcaacattgagttttggagttgattgagataatatgacttaactagttttgtcattccatttgttaaagatacagtcaccaagaatgttttgagttttttgaaagaccccaatttaagccttgcttatttttaaattatttccattcagtgatgttggatgtatatcagttatttagtaaataatctcaataaattttgtgctgtggcctttgctatt

SEQ ID NO: 6433 - DNA, 137 bp, Homo sapiens
caaaaaagtagctgggcatggtggtgggcgcctgtagtcccagctactcaggaggctgaggcaggagaatggcgtgaacccgtgggcggagcttgcagtgagctgagactgcgccactgcacaccagcctgggcgac

SEQ ID NO: 6434 - DNA, 1671 bp, Homo sapiens
tgaagagatcacactgtactgaaacctacattattttccaaaatctctggatctgcttctgtcttgcaggcagagagctcatccagtagcccttagctcttcccagccccctcctttgatttgtgggtgccactgcggcagctgctgagtctcagtggtttctggtcttcaccaagttctgcccacccagatggtttttacctgtcctcaccagaaacctgcactgtctagattgctgaggctgcttctccttaaccgatctgctatctgtattccaggggcaccccagggttagaggtaaatggcacaggccttgaaatctccaactgctctgactccaggttggtgcacttcaatgccaagtactaaccacacaattacaggatgccaccaaaaccttgatatggggctgctgcatcctaattaaaaaaacagttaatagacattattttttagaacagttctaggtttacagaaaacttgagtggataatacagagagttctcctaggctcccctgtcctccagcacacaattttccctactagtatgttgtattagtgtggtccattcattacaattgatgaaccactgttgatacgtcattatcaactaaagtccatagtttacattagaggtcattctttgagtttcacagattatgggttttggcaattacataatgtcctaaatccccaatacagcatcatgcgaaagagtttcactgctgaaaattccctgtgcttcaccatttcacgcgtcctcctctcctccacccctgacaaccactcaccattttactacttctatctttttgactttccaagaatgtcctagagttggagtggtacagtatgtgggtttccagactggcttctttctagcattatgtactttaagttccttcatgtcttttcatggcttgataacttgttttttaaaatcagtgaatcagatttccttgtatggctacaacagtttgtttattctttcgcttggtgaaagacatcttgggcacttccaagttttggcgatgatgaataaaattgctgtaagtacttctgtgcaggattttgagtgaacttaagttttccaaagtgactgtacccttttgatttccactagcgatggaaagttctggttgctcctcatctttgacagcatttggtgtgttcacctttttgaattttagccattctaaacagcttatctgcccctactgtggaatgatgtgacagacatagaataacacttacagtgattctagttcaaaatgaggcaacatggaagggataaagaagtcactgacccaaaatagtttggaaatggagctgggcaaaatccagcagaagtttcttaattaggatcgacagcctgggaccggcccgccgtcctgtgggtctttgcctctgggctgtctgctgtgcatttcttggaaccattattatttatctttttttctcacacttttttgggtatggcttctatcgcactccaaatgtttttgagattcatccatgttgttctgtgtgtcaccagtttgttcctttagccattccatggaatgagtgtatcacagtttattgatccattcttgtattgacagatacttgaatgtttccagttttttgtattatgaataaaactgctatgaacattcttgtataagtca

SEQ ID NO: 6435 - DNA, 1657 bp, Homo sapiens
tgaagagatcacactgtactgaaacctacattattttccaaaatctctggatctgcttctgtcttgcaggcagagagctcatccagtagcccttagctcttcccagccccctcctttgatttgtgggtgccactgcggcagctgctgagtctcagtggtttctagtcttcaccaagttctgcccacccagatggtttttacctgtcctcaccagaaacctgcactgtctagattgctgaggctgcttctccttaaccgatctgctatctgtattccaggggcaccccagggttagaggtaaatggcacaggccttgaaatctccaactgctctgactccaggttggtgcacttcaatgccaagtactaaccacacaattacaggatgccaccaaaaccttgatatggggctgctgcatcctaattaaaaaaaaagttaatagacattattttttagaacagttctaggtttacagaaaacttgagtggataatacagagagttctcctaggctcccctgtcctccagcacacaattttccctactagtatgttgtattagtgtggtccattcattacaattgatgaaccactgttgatacgtcattatcaactaaagtccatagttacattagagttcattctttgagtttcacggattatgggttttggcaattacataatgtcctaaatccccaatacagcgtcatgcgaaagagtttcactgctgaaaattccctgtgcttcaccatttcacgcgtcctcctctcctccacccctgacaaccactcaccattttactacttctatctttttgactttccaagaatgtcctagagttggagtggtacagtatgtgggtttccagactggcttctttctagcattatgtactttaagttccttcatgtcttttcatggcttgataacttgttttttaaaatcagtgaatcagatttccttgtatggctacaacagtttgtttattctttcgcttggtgaaagacatcttgggcacttccaagttttggcaatgatgaataaaattgctgtaagtacttctgtgcaggattttgagtgaacttaagttttccaaagtgactgtacccttttgatttccactagcgatggaaagttctggttgctcctcatctttgacagcatttggtgtgttcacctttttgaattttagccattctaaacagcttatctgcccctactgtggaatgatgtgacagacatagaataacacttacagtgattctagttcaaaatgaggcaacatggaagggataaagaagtcactgacccaaaatagtttggaaatggagctgggcaaaatccagcagaagtttcttaattaggatcgacagcctgggaccggcccgccgtcctgtgggtctttgcctctgggctgtctgctgggcatttcttggaaccattattatttatctttttttctcgcacttttttgggtatggcttctatcgcactccaaatgtttttgagattcatccttgttgttctgtgtgtcaccagtttgttcctttagccattccatggaatgagtgtatcacagtttattgatccattcttgtattgacagatacttgaatgttttcagttttttgtattatgaataaaactgctatgaacatt

SEQ ID NO: 6436 - DNA, 1669 bp, Homo sapiens
tgaagagatcacactgtactgaaacctacattattttccaaaatctctggatctgcttctgtcttgcaggcagagagctcatccagtagcccttagctcttcccagccccctcctttgatttgtgggtgccactgcggcagctgctgagtctcagtggtttctagtcttcaccaagttctgcccacccagatggtttttacctgtcctcaccagaaacctgcactgtctagattgctgaggctgcttctccttaaccgatctgctatctgtattccaggggcaccccagggttagaggtaaatggcacaggccttgaaatctccaactgctctgactccaggttggtgcacttcaatgccaagtactaaccacacaattacaggatgccaccaaaaccttgatatggggctgctgcatcctaattaaaaaaacagttaatagacattattttttagagcagttctaggtttacagaaaacttgagtggataatacagagagttctcctaggctcccctgtcctccagcacacaattttccctactagtatgttgtattagtgtggtccattcattacaattgatgaaccactgttgatacgtcattatcaactaaagtccatagtttacattagaggtcattctttgagtttcacagattatgggttttggcaattacataatgtcctaaatccccaatacagcgtcatgcgaaagagtttcactgctgaaaattccctgtgcttcaccatttcacgcgtcctcctctcctccacccctgacaaccactcaccattttactacttctatctttttgactttccaagaatgtcctagagttggagtggtacagtatgtgggtttccagactggcttctttctagcattatgtactttaagttccttcatgtcttttcatggcttgataacttgttttttaaaatcagtgaatcagatttccttgtatggctacaacagtttgtttattctttcgcttggtgaaagacatcttgggcacttccaagttttggcaatgatgaataaaattgctgtaagtacttctgtgcaggattttgagtgaacttaagttttccaaagtgactgtacccttttgatttccactagcgatggaaagttctgcttgctcctcatctttgacagcatttggtgtgttcacctttttgaattttagccattctatacagcttatctgcccctactgtggaatgatgtgacagacatagaataacacttacagtgattctagttcaaaatgaggcacatggaagggataaagaagtcactgacccaaatagtttggaaatggagctgggcaaaatccagcagaagtttcttaattaggatcgacagcctgggaccggcccgccgtcctgtgggtctttgcctctgggctgtctgctgtgcatttcttggaaccattattatttatctttttttctcgcacttttttgggtatggcttctatcgcactccaaatgtttttgagattcatccatgttgttctgtgtgtcaccagtttgttcctttagccattccatggaatgagtgtatcacagtttattgatccattcttgtattgacagatacttgaatgtttccagttttttgtattatgaataaaactgctatgaacattcttgtataagtca

SEQ ID NO: 6437 - DNA, 1773 bp, Homo sapiens
ctccttccctccttccctcccttctttcctttcttcctttcttcttcttctttctctctcatgctctctctttttctttccttttcattctctctacttttttgaagagatcacactgtactgaaacctacattattttccaaaatctctggatctgcttctgtcttgcaggcagagagctcatccagtagcccttagctcttcccagccccctcctttgatttgtgggtgccactgcggcagctgctgagtctcagtggtttctagtcttcaccaagttctgcccacccagatggtttttacctgtcctcaccagaaacctgcactgtctagattgctgaggctgcttctccttaaccgatctgctatctgtattccaggggcaccccagggttagaggtaaatggcacaggccttgaaatctccaactgctctgactccaggttggtgcacttcaatgccaagtactaaccacacaattacaggatgccaccaaaaccttgatatggggcttctgcatcctaattaaaaaaacagttaatagacattattttttagaacagttctaggtttacagaaaacttgagtggataatacagagagttctcctaggctcccctgtcctccagcacacaattttccctactagtatgttgtattagtgtggtccattcattacaattgatgaaccactgttgatacgtcattatcaactaaagtccatagtttacattagagttcattctttgagtttcacagattatgggttttggcaattacataatgtcctaaatccccaatacagcgtcatgcgaaagagtttcactgctgaaaattccctgtgcttcaccatttcacgcatcctcctctcctccacccctgacaaccactcaccattttactacttctatctttttgactttccaagaatgtcctagagttggagtggtacagtatgtgggtttccagactggcttctttctagcattatgtactttaagttccttcatgtcttttcatggcttgataacttgttttttaaaatcagtgaatcagatttccttgtatggctacaacagtttgtttattctttcgcttggtgaaagacatcttgggcacttccaagttttggcaatgatgaataaaattgctgtaagtacttctgtgcaggattttgagtgaacttaagttttccaaagtgactgtacccttttgatttccactagcgatggaaagttctgcttgctcctcatctttgacagcatttggtgtgttcacctttttgaattttagccattctatacagcttatctgcccctactgtggaatgatgtgacagacatagaataacacttacagtgattctagttcaaaatgaggcaacatggaagggataaagaagtcactgacccaaaatagtttggaaatggagctgggcaaaatccagcagaagtttcttaattaggatcgacagcctgggaccggcccgccgtcctgtgggtctttgcctctgggctgtctgctgtgcatttcttggaagcattattacttatctttttttctcacacttttttgggtatggcttctatcgcactccaaatgtttttgagattcatccatgttgttctgtgtgtcaccagtttgttcctttagccattccatggaatgagtgtatcacagtttattgatccattcttgtattgacagatacttgaatgtttccagttttttgtattatgaataaaactgctatgaacattcttgtataagtca

SEQ ID NO: 6438 - DNA, 1773 bp, Homo sapiens
ctccttccctccttccctcccttctttcctttcttcctttcttcttcttctttctctctcatgctctctctttttctttccttttcattctctctacttttttgaagagatcacactgtactgaaacctacattattttccaaaatctctggatctgcttctgtcttgcaggcagagagctcatccagtagcccttagctcttcccagccccctcctttgatttgtgggtgccactgcggcagctgctgagtctcagtggtttctagtcttcaccaagttctgcccacccagatggtttttacctgtcctcaccagaaacctgcactgtctagattgctgaggctgcttctccttaaccgatctgctatctgtattccaggggcaccccagggttagaggtaaatggcacaggccttgaaatctccaactgctctgactccaggttggtgcacttcaatgccaagtactaaccacacaattacaggatgccaccaaaaccttgatatggggctgctgcatcctaattaaaaaaacagttaatagacattattttttagaacagttctaggtttacagaaaacttgagtggataatacagagagttctcctaggctcccctgtcctccagcacacaattttccctactagtatgttgtattagtgtggtccattcattacaattgatgaaccactgttgatacgtcattatcaactaaagtccatagtttacattagagttcattctttgagtttcacagattatgggttttggcaattacataatgtcctaaatccccaatacagcgtcatgcgaaagagtttcactgctgaaaattccctgtgcttcaccatttcacgcgtcctcctctcctccacccctgacaaccactcaccattttactacttctatctttttgactttccaagaatgtcctagagttggagtggtacagtatgtgggtttccagactggcttctttctagcattatgtactttaagttccttcatgtcttttcatggcttgataacttgttttttaaaatcagtgaatcagatttccttgtatggctacagcagtttgtttattctttcgcttggtgaaagacatcttgggcacttccaagttttggcaatgatgaataaaattgctgtaagtacttctgtgcaggattttgagtgaacttaagttttccaaagtgactgtacccttttgatttccactagcgatggaaagttctggttgctcctcatctttgacagcatttggtgtgttcacctttttgaattttagccattctaaacagcttatctgcccctactgtggaatgatgtgacagacatagaataacacttacagtgattctagttcaaaatgaggcaacatggaagggataaagaagtcactgacccaaaatagtttggaaatggagctgggcaaaatccagcagaagtttcttaattaggatcgacagcctgggaccggcccgccgtcctgtgggtctttgcctctgggctgtctgctgtgcatttcttggaaccattattatttatctttttttctcacacttttttgggtatggcttctatcgcactccaaatgtttttgagattcatccatgttgttctgtgtgtcaccagtttgttcctttagccattccatggaatgagtgtatcacagtttattgatccattcttgtattgacagatacttgaatgtttccagttttttgtattatgaataaaactgctatgaacattcttgtataagtca

SEQ ID NO: 6439 - DNA, 6070 bp, Homo sapiens
gagacagcggcggtactgggaggcgtaggtgagggtcgcgaggctgcccgagcttctgagcgagcgcggtgcttttgggaacgcgggacgggcgatctgcggcgccaggagctgggccgaggcgcggcggcgcggctgccggctgccctgtgaatgggaagttacgcgaagtccacccagcgtttctgaggtgagggcgccgcgccaggctgggcgggcggtgaatccgggacccgcgggcgcacagctgggtcgaggcgcggccgtggcaagttttgttgcgcgagcgcgggggcgggtgggggctgtggggggtcgtgcaccgccggggcctgagttccccgcgctggattcttcgcctgccgctgccgcccgcagcccaactctcgtgggcgctggggaagaaactcgctggcgggtgttctgtggcatcccagggggtggagggacggagcagcttcgggggcacgtcctcctatatcctgtagaggacactgaccccgcaccccaccctccaggccagaaatccgttccctctgcggacctgagaggcgagcgcgctcgcgcccctgacttgcaaagttggggtctttactggcctccgggcttctgctcctggcggtgtctccaggctggtgatgggcaagccaggtgtgccagctccaggatgcacatgagcagcatttgtagccatcactgaatcacctcctgactagcggggcaagcctcaaatgaaccgcaggatttcgggtagattggattgtggggttgctgtttgcactccaaagagttgctgtgatttccctgcgtctggctggctggctggcttcttagatcatctcatgtggcgtcctttcagcggagagttaaccaagacgtttggcctggcttccttgttttcctcctatcttttgcttagagctgctttcgaaaagaagtcttttctggcagtggtatcttttctttgggttacagtgttgttcatcctttctttgccaaaagaatgaatcccagtgcttcaggaagttaaagaaaagatctgctggtagtgttctgagctgatatgcgttagtagctttttgtttttaaattctattggtaaaatttcactagtgaaccagaagctactttttctattctgaaatgctagctttaagatttctgagaactttgcgtcaaagaaatcttggaaaagttactgaagtatacagaagttcacaattttacatgtgcaggtggcccgggcgcagtgatcacacctgtaatcccagcactttgggacgccaaggtgggtagatcacttgagcccaggatttccagaccagcctgggcaatgtggcaaaaccctttctctactaaaaatacagaagttagctgtgtgtggtggcgtgtgcctgtagtcccagctacccggtaggctgagttgggaggatcaccagagcccgggaggttgagattgcagtgagccgtgatcatggcagtgcactccgacctggatggcagagtgagaccctgtctcaaaaaaaaaaaaaaaaaagtaatgaatttttaccaagtgaaccaccacagatcaagaaattgaacattactagtctggggtatatttgtaggggtggcattgttggttttagaggtatatgaatgataaaactttagtattacatattgttgaacattttcccaaagtagttgtaccatttagcagggatatgctggttaccccacatcttcgctgatacctgtcagttaaaaattattttgccattctagtaggggtgcagtaatatatcagtgtggtttcattgagattgagtatcttttattgccatttatatgtcctcttttgtgacgtgcctgttaaatctttttatccagttttcattgatatgcttgttttcctgttgatttgtaatactttattctggatatgcctcctttctaggatttatatgtattgcatttcccttttttcaatctgtagcttgcgttttcactcttttatggtgttttttcatgaagggagattctctttttttttttttctttttgagacaggatctcactccatcgcccaggctggagtgcagtggcacaatcacagctcactgcaaccttgacctcacaaggctcaggtgatccccctgcctcagcccccaagtagctgggacctacaggggagtaccaccacactcagctgttttctgtatttttagtagagatgggttttgccacgttgcataggctggtctggaattcctaggctcaagtgatacacctgcctcggcctcccaaagggttgggattacaggcatgagccactgcacccagcctgagattcttcattttaatgaaattatactttattaatcttttcctttatggttactgttttttgtgtcctgtttaagaaatcaatgcctaacctaagagtatgaacacatttttctgtgttaaccttataacgattttattttagtttttgctttttttttttttcagacagggcctcagtctattattgcccaggctagagtgtggtggcaggatctcagctcactcaacctccatctcctggctcaagtgatcctcccacctcagcctcctgagtagctgcgactataggcatgtgccaccatgcctggctaattttcatattttttgtagagatggggattcaacatgtttcccaggttggtctcgaactcctgggctcaagtaatctgcccgcttcagcctcccagagtgctggaattacaggtgtgagccaccccacctggctatgattcactttttactacatggatgtgtctgcttgatccagcaccatttattgaaaagaccatccttttccttccgcaccatgtggcactttttttcataaatcgaatgactgtatggtcatctgatttatgaaattagtgtgggtctgtttctgtttctggaccaacttgggtaacatagtgagatcccatctctacaacaaataaaaataataaataaatgaataaaatttaaaaaataagtgcgtagagcagatggagtcataggtgataatttataaatgattgccagtttcttggctacatatgggtgttggtaattcagatgtgttgggtgttcaggcaaaacgtattaagtgaattatatggtgttcagaatgattgctagatgttcattgtgacttgaattagatgttatttgagcctcacagagctacagtttttactcttttatttatttgtctttttaaaatttttacaatcttcctgtcaaggcagtaactcttttatacttaattgttcttaagtatacttaattaccagaaaagctttatggatcatacctaaataagtgttaagccatttaaggggctcacgtgctgtgatataaacaatagtattctacataatagttttaggactacatcaaataatttttttttttttcttgagacagtgtctcgctctgtcgcccaggctggagtgcagtggtatgatcatggctctctgcagccttgatctctcaggctcaagcactcctcccacctcagcctccttagtagctgggtctacaggcatgcaccactgtgcccggctaattttctcctttttgtagacagggttttcctgtagtgcccagactggtttcaaactcctgggctgaaatgatcctcccaccttggcatcccaaagtgttgggatcacaggcatgagccatcacacctggccattttagttttaataatttttatatttttctaatttaaaagatgtactaaaatctcttacagctattatttatgaatatagtattcattgttgttattatgatgattttgtatgtgtttaatctgattttcaatataagctcctggcaattagagattttgtctctttgattcaccagtgtattctcagtacttgaccttgcctggcatgaaacagatattgaataaatatttcttaaatgaatgaatgaatgaacatactaataccatattcaacaacctccgagtatcacagttttcaccatctaacaaataaagtagcttgtatagagtagagtcacagtcaacctgccataaaaggacatgtcaatgaaaaataaaccttcgtatgtgtagctgctaagattttggggcttttgttaccgtagcataacctagcgaaagctcagagagacagcatatacaatatacgtgtacagatagaccagctagaccagtagatgagattccaaagctactttaataagcattaactaacgacacccacactctcttaattccctaacagaaataatggaattcttgttcactaagatctgcctcaaatattacttactttgtgaaaacttccctggctactctagtatttagtcaggactctttatttttttccccccaggctggagtacagtggtgccatcatagctcactaaccgctaactgaaggctcaaggaatcctcctgcctcagcctcccaagtagctgagactacaagtgtgcaccaccatgctcagcttatttttccttttttcttttcccagacggggtcttactatgttgcccaggctggtcaggactgttgattacatatgacagaaacccaaccacctctagttcccaccacctttcaatctgctcttccctgggtcttcccagtctccgtaaatggcagctccatccttcaagttaccgaagccctaaatctcaacgttaaccttgatttctctcttttatctcacaggcaatctgaaggcaaatcctgtttagacccaggcgaaggttcccggtgacccgggctctcaccagccaattgtcccttgccgtcctcctgagggtgcctggagcttaagcactgtgtgctcttggcctccacactggggatgccgctgactcccactgtccagggcttccagtggattctccgaggccctgatgtagaaacttccccattgggtgcaccaagagcagcctcacatggtgtgggctgacatcaagagctgccagatccaacaggtaaaaatcccgaggcattgccagctcagtggggtcagagagtcctctttgtattatgactcagatgtgaagggaagatgtcaaggtccctaaacattgcagggccttgcttggcatgcaacagatattaaataaatatttgttaaatgaatgaacaaatatccacagcatgtgctgcccatgagctgcagtgccgtggtcaggtagaagtgattttacttcaggagaggacagtgttctctccaggacttttccttactagctagatctgcatccctctcctcactcttcccctctcaccccccattctctgcccccatttctctctgtttccaccctgctgtcccctttcacctgctttctgctcttcagctttggtggctcaccccctccctgtccacctgcatcccccaggctaaggctcctacactgtcctgggtggggagatgtgtctggttttaggcagtgccctctggatgtgtccaggatggggaaacatggctcagttgccagtataatgggttaaaagtggccacttttgaaggcctttcccatctcccattccagaatcctgtagacttagaatttatgggccacagtggaattcttggttccccaggaccttgtggtggacgtcttctttcactgagcattcatggggtgactgtgaggtagtaggccctgctctgggctagaggccccacaatgagtaaatctcaggtcactaccccatggaacccactactgcaggcattgagagggggagaaagaaaggggcatggcctgtttgtgttcttctcatgtggtcacccacaggtcctgggggagtaggagccagtgcaaggagagaagtccattgagaaaggcaaatggatgacatcagacccaggggctgaggtccccaactgcagctgggtagcttctggagtggacaaggagcaacagggaagttcgtggcctggtgttctgggatccactgtctcatctcattcttgtgggcaccagaacgtatccaaagacaagactcagtgtctctggcaacagtgagcc

SEQ ID NO: 6440 - DNA, 552 bp, Homo sapiens
gggatacaggacacctgtcatgaccaccaccatgaaattgggattcaggaaggaggctagtcatataaggaatcctgtgaccagcatgagcttctatcaggccacacagggcactcaagtgaacagggcatatggggtcctggggtcatggtgagaaagggtctcattggtaaaaccttttcccttggggaggtaaataaattcttggttccttcttggtagcccttgaagataaggatggtcaaacaaaataatattatatctgcagaaagtcagatcttggtaagatttactagttgggaatccaatgttaatgccaagaagcagctgccagttgggatcaaatgtgagcctatggatcaaggtgcgtactcaaacacagagagctttttgaaagatgctaccagcagtttttccagggcagagatgggtcctttatttttctctctaatctagcccatatgcttagctgagaaggtttcttcatatcactttaaatgatgatgtccttgtacaacaattttcgaaacattctttagataagaattttat

SEQ ID NO: 6441 - DNA, 552 bp, Homo sapiens
gggatacaggacacctgtcatgaccaccaccatgaaattgggattcaggaaggaggctagtcatataaggaatcctgtgaccagcatgagcttctgtcaggccacacagggcactcaagtgaacagggcatatggggtcctggggtcatggtgagaaagtgtctcattggtaaaaccttttcccttggggaggtaaataaattcttggttccttcttggtagcccttgaagataaggatggtcaaacaaaataatattatatctgcagaaagtcagatcttggtaagatttacttgttgggaatccaatgttaatgccaagaagcagctgccagttgggatcaaatgtgagcctatggatcaaggtgcgtactcaaacacagagagctttttgaaagatgctaccagcagtttttccagggcagagatgggtcctttatttttctctctaatctagcccatatgcttagctgagaaggtttcttcatatcactttaaatgatgatgtccttgtacaacaattttcgaaacattctttagataagaattttat

SEQ ID NO: 6442 - DNA, 552 bp, Homo sapiens
gggatacaggacacctgtcatgaccaccaccatgaaattgggattcaggaaggaggctagtcatataaggaatcctgtgaccagcatgagcttctgtcaggccacacagggcactcaagtgaacagggcatatggggtcctggggtcatggtgagaaagtgtctcattggtaaaaccttttcccttggggaggtaaataaattcttggttccttcttggtagcccttgaagataaggatggtcaaacaaaataatattatatctgcagaaagtcagatcttggtaagatttactagttgggaatccaatgttaatgccaagaagcagctgccagttgggatcaaatgtgagcctatggatcaaggtgcgtactcaaacacagagagctttttgaaagatgctaccagcagtttttccagggcagagatgggtcctttatttttctctctaatctagcccatatgcttagctgagaaggtttcttcatatcactttaaatgatgatgtccttgtacaacaattttcgaaacattctttagataagaattttat

SEQ ID NO: 6443 - DNA, 352 bp, Homo sapiens
acacactaccaaaaacaaagtagccaaaaaggaaccagaataacagaatatcagagccagaggaacatttggaggtaattcagtacctcctccttttcaacctacaggagagatagtggaacagaaacagaaatgggcctgcctgctgtgcccaaaattcattggagattgttgtggtgaagaatttcatttatgatgaaggagaaataaaccctgtcagcttaaattcaggcaggtttattgaaaaggtgaagaagcgtcttgcagaagcaaagcatggctgaggcttgtgggctctgtctgggaaaatgagcagctgacagtggctgatgctgcccctgactctggggcc

SEQ ID NO: 6444 - DNA, 552 bp, Homo sapiens
gggatacaggacacctgtcatgaccaccaccatgaaattgggattcaggaaggaggctagtcatataaggaatcctgtgaccagcatgagcttctatcaggccacacagggcactcaagtgaacagggcatatggggtcctggggtcatggtgagaaagtgtctcattggtaaaaccttttcccttggggaggtaaataaattcttggttccttcttggtagcccttgaagataaggatggtcaaacaaaataatattatatctgcagaaagtcagatcttggtaagatttactagttgggaatccaatgttaatgccaagaagcagctgccagttgggatcaaatgtgagcctatggatcaaggtgcgtactcaaacacagagagctttttaaaagatgctaccagcagtttttccagggcagagatgggtcctttatttttctctctaatctagcccatatgcttagctgagaaggtttcttcatatcactttaaatgatgatgtccttgtacaacaattttcgaaacattctttagataagaattttat

SEQ ID NO: 6445 - DNA, 6064 bp, Homo sapiens
gagacagcggcggtactgggaggcgtaggtgagggtcgcgaggctgcccgagcttctgagcgagcgcggtgcttttgggaacgcgggacgggcgatctgcggcgccaggagctgggccgaggcgcggcggcgcggctgccggctgccctgtgaatgggaagttacgcgaagtccacccagcgtttctgaggtgagggcgccgcgccaggctgggcgggcggtgaatccgggacccgcgggcgcacagctgggtcgaggcgcggccgtggcaagtttggttgcgcgagcgcgggggcgggtggggggtgtgaggggtcatgcaccgccggggcctgtgttccccgcgctggattcttcgcctgccgctgccgcccgcagcccaactctcgtgggcgctggggaagaaactcgctggcgggtgttctgtggcatcccagggggtggagggacggagcagcttcgggggcacgtcctcctatatcctgtagaggacactgaccccgcaccccaccctccaggccagaaatccgttccctctgcggacctgagaggcgagcgcgctcgcgcccctgacttgcaaagttggggtctttactggcctccgggcttctgctcctggcgttgtctccaggctggtgatgggcaagccaggtgtgccagctccaggatgcacatgagcagcatttgtagccatcgctgaatcacctcctgactagcggggcaagcctcaaatgaaccgcaggatttcgggtagattggattgtggggttgctgtttgcactccaaagagttgctgtgatttccctgcgtctggctggctggctggcttcttagatcatctcatgtggcgtcctttcagcggagagttaaccaagacgtttggcctggcttccttgttttcctcctatcttttgcttagagctgctttcgaaaagaagtcttttctggcagtggtatcttttctttgggttacagtgttgttcatcctttctttgccaaaagaatgaatcccagtgcttcaggaagttaaagaaaagatctgctggtagtgttctgagctgatatgcgttagtagctttttgtttttaaattctattggtaaaatttcactagtgaaccagaagctactttttctattctgaaatgctagctttaagatttctgagaactttgcgtcaaagaaatcttggaaaagttactgaagtatacagaagttcacaattttacatgtgcaggtggcccgggcgcagtgatcacacctgtaatcccagcactttgggacgccaaggtgggtagatcacttgagcccaggatttccagaccagcctgggcaatgtggcaaaaccctttctctactaaaaatacaaaagttagctgtgtgtggtggcgtgtgcctgtagtcccagctacccggtaggctgagttgggaggatcaccagagcccgggaggttgagattgcagtgagccgtgatcatggcagtgcactccgacctggatggcagagtgagaccctgtctcaaaaaaaaaaaaaaaaagtaatgaatttttaccaagtgaaccaccacagatcaagaaattgaacattactagtctggggtatatttgtaggggtggcattgttggttttagaggtatatgaatgataaaactttagtattacatattgttgaacattttcccaaagtagttgtaccatttagcagggatatgctggttaccccacatcctcactgatacctgtcagttaaaaattattttgccattctagtaggggtgcagtaatatatcagtgtggtttcattgagattatcttttattgccatttatatgtcctcttttgtgacgtgcctgttaaatctttttatccagttttcattgatatgcttgttttcctgttgatctgtaatactttattctggatatgcctcctttctaggatttatatgtattgcatttcccttttttcaatctgtagcttgcgttttcactcttttatggtgttttttcatgaagggagattctctttttttttttttttctttttgagacaggatctcactccatcgcccaggctggagtgcagtggcacaatcacagctcactgcaaccttgacctcacaaggctcaggtgatccccctgcctcagcccccaagtagctgggacctacaggggagtaccaccacactcagctgttttctgtatttttagtagagatgggttttgccacgttgcataggctggtctggaattcctaggctcaagtgataacctgcctcggcctcccaaagggttgggattacagacatgagccactgcacccagcctgagattcttcattttaatgaaatcatactttatcaatcttttcctttatggttactgctttttgtgtcctgtttaagaaatcaatgcctaacctaagagtatgaacacatttttctgtgttaaccttataacgattttattttagtttttgcattttttttttcagacagggcctcagtctattgcccaggctagagtgtggtggcaggatctcagctcactcaacctccatctcctggctcaagtgatcctcccacctcagcctcctgagtagctgcgactataggcatgtgccaccatgcctggctaattttcatatttttgtagagatggggattcaacatatttcccaggttggtctcgaactcctgggctcaagtaatctgcccgcttcagcctcccagagtgctggaattacaggtgtgagccaccccacctggctatgattcactttttactacatggatgtgtctgcttgatccagcaccatttattgaaaagaccatccttttccttccgcaccatgtggcactttttttcataaatcgaatgactgtatggtcatctgatttatgaaattagtgtgggtctgtttctgtttctggaccaacttgggtaacatagtgagatcccatctctacaacaaataaaaataataaataaatgaataaaatttaaaaaataagtgcgtagagcagatggagtcataggtgataatttataaatgattgccagtttcttggctacatatgggtgttggtaattcagatgtgtcgggtgttcaggcaaaacgtattaagtgaattatatggtgttcagaatgattgctagatgttcattgtgacttgagttagatgttatttgagcctcacagagctacagttttgactcttttatttatttgtctttttaaaatttttacaatcttcctgtcaaggcagtaactcttttatacttaattgttcttaagtatacttaattaccagaaaagctttatggatcatacctaaataagtgttaagccatttaaagggctcacgtgatgtgatataaacaatagtattctacataatagttttaggactacatcaaataatttttttttttttcttgagacagtgtctcgctctgtcacccaggctggagtgcagtggtatgatcatggctctctgcagccttgatctctcaggctcaagcactcctcccacctcagcctccttagtagctgggtctacaggcatgcaccactgtgcccggctaattttctcctttttgtagacagggttttcctgtagtgcccagactggtttcaaactcctgggctgaaatgatcctcccaccttggcatcccaaagtgttgggatcacaggcatgagccatcacacctggccattttagttttaataatttttatatttttctaatttaaaagatgtactaaaatctcttacagctattatttatgaatatagtattcattgttgttattatgatgattttgtatgtgtttaatctgattttcaacataagctcctggcaattagagattttgtctctttgattcaccagtgtattctcagtacttgaccttgcctggcatgaaacagatattgaataaatatttcttaaatgaatgaatgaatgaatgaacatactaataccatattcaacaacctccgagtatcacagttttcaccatctaacaagtaaagtagcttgtatagagtagagtcacagtcaacctgccataaaaggacatgtcaatgaaaaataaaccttcgtatgtgcagctgctaagattttggggcttttgttaccgtagcataacctagcgaaagctcagagagacagcatatacaatatacgtgtacagatagaccagctagaccagtagatgagattccaaagataccttaataagcattaactaacgacacccacactctcttaattccctaacagaaataatggaattcttgttcactaagatctgcctcaaatattacttactttgtgaaaacttccctggctactctagtatttagtcaggactctttatttttttccccccaggctggagtacagtggtgccatcatagctcactaaccgctaactgaaggctcaaggaatcctcctgcctcagcctcccaagtagctgagactacaagtgtgcaccaccatgctcagcttatttttccttttttcttttcccagacggggtcttactatgttgcccaggctggtcaggactgttgattacatatgacagaaacccaaccacctctagttcccaccacctttcaacctgctcttccctgggtcttcccagtctccgtaaatggcagctccatccttcaagttaccgaagccctaaatctcaacgttaaccttgatttctctcttttatctcacaggcaatctgaaggcaaatcctgtttagacccaggcgaaggttcccggtgacccgggctctcaccagccaattgtcccttgccgtcctcctgagggtgcctggagcttaagcactgtgtgctcttggcctccacactggggatgccgctgactcccactgtccagggcttccagtggattctccgaggccctgatgtagaaacttccccattgggtgcaccaagagcagcctcacatggtgtgggctgacatcaagagctgccagatccaacaggtaaaaatcccgaggcattgccagctcagtggggtcagagagtcctctttgtattatgactcagatgtgaagggaagatgtcaaggtccctaaacatcgcagggccttgcttggcatgcaacagatattaaataaatatttgttaaatgaatgaacaaatatccacagcatgtgctgcccatgagctgcagtgccgtggtcaggtagaagtgattttacttcaggagaggacagtgttctctccaggacttttccttactagctagatctgcatccctctcctcactcttcccctctcaccccccattctctgcccccatttctctctgtttccaccctactgtcccctttcacctgctttctgctcttcagctttggtggctcaccccctccctgtccacctgcatcccccaggctaaggctcctacactgtcctgggtggggagatgtgtctggttttaggcagtgccctctggatgtgtccaggatggggaaacatggctcagttgccagtataatgggttaaaagtggccacttttgaaggcctttcccatctcccattccagaatcctgtagacttagaatttatgggccacagtggaattcttggttccccaggaccttgtggtggacgtcttctttcactgagcattcatggggtgactatgaggtagtaggccctgctctgggctagaggccccacaatgagtaaatctcaggtcactaccccatggaacccactactgcaggcattgagagggggagaaagaaaggggcatggcctgtttgtgttcttctcatgtggtcacccacaggtcctgggggagtaggagccagtgcaaggagagaagtccattgagaaaggcaaatggatgacatcagacccaggggctgaggtccccaactgcagctgggtagcttctggagtggacaaggagcaacagggaagttcgtggcctggtgttctgggatccactgtctcatctcattcttgtgggcaccagaacgtatccaaagacaagactcagtgtctctggcaacagtgagcc

SEQ ID NO: 6446 - DNA, 966 bp, Homo sapiens
ggagggacccagtgggagaaaactgaaccatgggggcagtttcctctattctgttctcgtggcagtgaataagtctcatgcgatctgcgggttttataaggggaaacccctttctcttggttctcattctctcttggctgccaccatgtaagacatgccttttgccttccctccccagacacatggaactgtgagtccattaaacctctttttctttataaatgacccagtcttgggtatctcttaatcagcagcatgaagaagaactaatacagagaggctgagtaaacaccatgtggggtgtttgcatcactgagtatcacacagccttttcactcatggttagagacggagcagaaaggtggacagacaccccagcacaaagccgagtgaagaactctgaggaaggatgcgtgcttgggaatgatgcctcgaccctggtgcctgaagccgtgcctggtgcgtggggcgtccctgtttgctgaaggaatgtggggacagagcacaggagcaaagactggctgggaccgtgtgaaagcagctctctgctgcctctcatccagcccgctgtgtccttccacagcactcatctcaatttgtggttatttgacttttctcctgtccctctgggccgtccgcccccttcgttagaatgtaaactgtgtggagtgcaggcctcgcctgtgttactgtgccctcatctcaagctcagcaccgcgtcctgccctgggggcccccatgaacatgtgccgaatgaacgagcggaggaatgggggttggggcatttttattagttttccattcgcccaatcatttctaatgtggatcattttctttcaaatgataagagcgatgtttacttttctatgtttgaaaataagataaaataaaacaaaagacgcctgttgttttctcgggcagggatctgaagggagccgagctccttctgcagaagggcgctgagaa

SEQ ID NO: 6447 - DNA, 966 bp, Homo sapiens; identical to SEQ ID NO: 6446

SEQ ID NO: 6448 - DNA, 966 bp, Homo sapiens; identical to SEQ ID NO: 6446

SEQ ID NO: 6449 - DNA, 366 bp, Homo sapiens
ctcccgagtagctgggactacaagtgcatgccatcatacttggctaatattttcaaaattttcctaaggctgggcgcggtggctcacgcctgtaatcccagcactttgggaggccgaggcaggtggatcacctgaggtcgggagtttgagtccagcctgaccaacatggagaaaccccatctctactaaaaatacaaaattagctgggcatggtggcacatgcctgtaatcccagctactagggaggctgaggcaggagaatcacttgaacctgggaggcagaggttgtggtgagccgagatcgtgccattgcaccccagcctgggcaacaagagcgaaactccatctcgaaaaaaaaaaaaaaaa

SEQ ID NO: 6450 - DNA, 366 bp, Homo sapiens; identical to SEQ ID NO: 6449

SEQ ID NO: 6451 - DNA, 366 bp, Homo sapiens; identical to SEQ ID NO: 6449

SEQ ID NO: 6452 - DNA, 6434 bp, Homo sapiens
  SITE (1915): n equals a,t,g, or c
  SITE (2174): n equals a,t,g, or c
aaccctaggttgttggatgatgtcagcttccatccttgtgttcgtttcaaacgctgggaatctgagcgcatcctctccttcatccctcctgatggaaacttccgcctgctgtcttaccatgtcagtgcacagaagtaagcagctcttataattaagaatggaatccgtgtatgtacatgtatgtggaaaccgtatctgtggtgattaagaactcaggctctagagttacctgggttcacattccagcttctgtggttactaattgggtaacctcaggtgagttgcttaacccctatgtatctcttttctcatctgtaaattgaaaataataaaagtgccttgttctgaaaattgaataagagaatctgaatagtgcttaacacaaagaagtgctcattaagtttgctgttatttttgttgttatgtgtctaaacaagaacattattttctcaaatcagaatctgggcatactgtgttcaatgtccctggtctaaaagaagcattaagttatgctatgaaaaagcataaaacgcagtgatttttggtcttgaacattctctttaatttggaatctaaaggcttttggaagcagttttgtatagtataaggtatgcagacagaagagagtcaggaggcctcagagccaccagtcccttcccgtgtgatgtggaatgaatcatttgggaaaatatctgagtgcttgaggtcaaagcctctggaatcagactccctggacttaaacctcatcttcagtacttagaaccttgggcaagttacttaatctcagttaagtataaggacatcagtattcatctataaaatcagtacctactacatagttacagtagcagtatctacttcatacttattgggaggattaaacacggtaggagttaaatggatagaaaccatttagcatagtgactggcaaacaggaagtactcaatacatgttaggaactgttattacttcagggttattccgtgacttctctgaatccttttcttctgtcaaatcatgacagcctaccctaccttatggggtttttgtaaggaccagatgatgtcagatgaaagcattctaaaaaaattatagagacaagaggatcacttgagcccaggagttcgagaccagcatgggcaacatggccaaaccttgtctctacaaaaaaaaaaaaaaaaaaaaaaaaaaaaaaagtaaaaattagcggggtgtgatgttgtgtgcctgtggtcccagctactcaggaggcagtggtgggaggatcacttgagcctggtatgtcgaggctgcagtgagctatgattgtgccactgcactccaaccaggctgaccgagccagaccctatctcaaaaaaaaaagaaagaaattataaaaggtccatgagctatgaatattatactccccagtgcaaatgatgactggtcacatgttacaagttaaaaacatggagacataatgacaatacatttttgtacattatgcctttgtcatagtagtgtactttttgattttgtttatattattcagagtcattagaaaagttaatttagttactagacagtagcttttcaaaaagaaaaaattagattactggggtttttttctgtttattttttcagataaaaagtaaggacatagttaagggagaagaagctacccacagggcagaaaaagcatcatgtgaaaggaagaactaccattttcccagtgcacgaatgaaatgactctttgtctctcatttccagtctggttgcaatcccagtgtatgtcaaacataacatcagtttccgggacagtagttcccttggacgctttgaaataacggtgggacccaagcagacgatggggaagaccattgagggagtgattgtcaccagccagatgcccaagggggtcctgaacatgagcctnactccatcacaggggacacacacattcgacccagtcacaaaggtagggatgagcaggacatcttgaattgctgatgttaagcagaaaccagtcggcaggttctctgtgtagactctagacctagtttggaaggtgagatgagtcaaagggaccttgttttctcctgccaggtaacttaacagtaacacgtaggattctcaatggaaagatacccagaggcagctcataatgttgtggacaggtgccctgagtttagatntcagccacctcaaatgcaggattttgctgtaattattttttggaaagaccacttctccatttttattttctttgaagatgctgtcttgggatgtaggaaaaataaatccacaaaagctaccaagtttgaaggggaccatgagtcttcaggctggagcttccaaaccagatgaaaaccccacaattaacctgcagtttaagatccagcagctggccatttctggtaagtgacccagagctcaagaggctccaaagggaacaaaaacggctttctgccatatggcgcaggcaccaggaagcctttctgggcttcctgtttacaaggtttagtttcattacctgataaacaatctttagtaacatcttttctggcatgtttctggggaaaatttacaatccttcctttgaagttggcataagtgacctgaataaaagtgcctaagacacactgagaaagaaacagtattggtagaaggaagtattcactagccatttttggatcatcttagggttgttcatttcaggttcccaaggttttcagtatgagaatccatgtgcattctcagctataactgaagtgtaatttccactcctttcttctgttttcagaagactttcatgtttgctcttatttctattttggaaccactgggcctttccaggtcagttcactatagtctgtgccgaccttagcacggtagtcatcagttaccactttgggggcatttaccatgttccaggcactgttttaagctcttttcatgtgttttcttttttaatccttagaaactctgtgatgtggaagggagatgactttagctttatatgaagtttctgtttttctgtacaaacgggccttatacaatttaagtgattggaattcatttgatgtataagctcttcaatcttaaaacaataaactataaagctctataccatataaaatattcttggcttagtctagtgagaatacttaggaagcattcatttattaattactttcattgttaattcctttatttataatttacttcattattcatttgttttgttattcattttttcagtccaataatttgagaaaaatcatgcagtggtctaattttttccttatcctcattttagtctgcacattactttgtaccctttccacttcagggacaggtcttctcataggtagcttgtctgttggagcctttttttgctgtcagtatctgtcccaagactggagaatccatctgctctgcataagtggttccctgtcacagcaatgtcggtcccactgacctcagtgtattgaacagaaacagttaggcgacctgctccttttgaataatactcatgtctattttccctctctccctcctttctaggactcaaggtgaatcgtctggatatgtatggagaaaagtacaaaccctttaagggcataaaatacatgaccaaagctgggaagttccaagttcgaacctgaagggagcatttgctgagggaatagtcttgcacattttttcatttcttacttgtctaaaagtaaaaaaaaatatcagcctgtctcctaggtcagtcccctcctggacccacccgctcccttttttccttagccttcagtgccatggaactaatcaagggaggaaaaggtcaccagggagaactggacagaactgaaacacagcaacaccagttctcaaggacaaggtgtgtgatgggggtaggaagcttggtgcttatgtaaccattttaaacgtggtttctataggaaagaccaacatttgtttagcttgcttggctttaattatctaaagccaatgaaagacttctttgttgattttttaagatagaaagattaaaaagaaagaaagatgggaagaaaatgaatgttagtcaaggaaaggccacttaaggatctgctctatgaaggagaagaaagaggaaaaagaagtaaaggagttaggaggagacacttaaatgaaagattggcaagaaaagcagtcggactctaccttaaggagggatgggaaggaaagagttgagttggtttctttctgattcctctactcatgtagaaaacacttgtacttctggaaatggactggagactttttaaatttgagtccactattgacatggaaaccccagtggaatcagattttccctcaaagaccatgatggtatcggactagttttcagacactgcctgttgctgtccatcagcacttggtctcttatcttcagtgagaaggtgacccgccttcttcccatggtggctgcctaaagtgcttcttttctaacccaaaacagttctactcacttccttttacagaattcaccggccattttcctgttacctgatccttctacaggatttttaaaaagtaagagagtttcagagaagccgatcccataatccccagtgcagccagggtttgtgtgtcatcgtactggagtagagggccgactcttcccatgaaggtgagcacagctgtgagtgagtgagctcatatctccatttgtcagtgctggactggtaccagatcgtaaccttcccgttggtcggaaacttttccatctgtcgccctagaaaaagagaaagcttaccatcgagggtgtggttgatccttgaagctgcttggtaaagttatcatttcctcagtcttttcttttgtactcctatcatgtattcattaatatctaccagtcccttttcattctaagacaaaacatttctcctaaatctctgaataaaatcagtgctgtaggaagatggactgtgttgatcatgggtgtaagcaacccagtttaagaaacatggcaactaaagggatacctcaggctttctttcccagtgggtcatttttgtcctagttcagtgtgtctgttactatttaaatatttatacaaaagggtttttgtttatagcttaaggaatgatactgtgctctgcttggtgcatggagaaaaaggaagacccatactctccacaccctagagcttttctctaaatattgtgcaaagtttttgctagttttatcttctgactttgggactagtttttgctgcagagttgtgttgctttgtgattttcctctgggatagtgtactgtacacaaccagatgtgttccacactccgtgactccgcagtttgtcctggagtgacatacacatccaccatggaaagggaagcatctctgcctgtggattctcaagtacttggaagcacctctcctgaggaacctacaggattctaaggtttcctaggtcactgaacaactaatcttggtccctgaatatttctaggtttgtaagtgcagcagttttatttcctctagaactcatcctgtttcaagggaagtacctaagaagatatagagtgtttctagggtaagggacctgcaggtgtaagcatagatgaaataactgtcctgtcacacgtgcagcaggccatggagtgtagcgggcatcgctgccgccattcctgcagcatcaccataagcagtgcagggtgtctccatcgagctgtttggttccatgtgtgtttaacatgtgcagaagtagcttctctgtttaagtttaataaagttgagtttcaccagtcttctatgtcctaagtggtttgttaccagaactaacaacagtgctatgccactcaaacctcagtagaagcagtgagtaaggaattcatcgactcaggaggatcttactgcttctgtcctgtctagccagcagacctaaagcatgtgttttgatcgattctttggtcacatctggaagatagcagatgctgatattaatgtcatttttagggttgtgagcataaggtccagatccacctagttatttttcaccagagttttaaaagacgaaatcgttgaagctgccggcatttagtctagggctttccgcattctcttgacctgcttctcttgtcttgttaatttaggcatgaaacggtgtcgcagtactctggcgtctttattccaggagaggcttcttacaagataaggcactgcgagtcgattgttacgccacacctgtaacaattttctataaacatctcatggccatcaaaaaaccttaaaactcaatgcgtactcactgtgagtgttcagtgccagctagtgctccaccccttctccctctcagccggcgttaactgtctcttcgcctgtgctcccgggtgctctgaccctggtggtgggacaggaagttggttgtatacatgtacttttctctgtggccggtaggtggggactccacgcc

SEQ ID NO: 6453 - DNA, 2930 bp, Homo sapiens
  SITE (1414): n equals a,t,g, or c
aataatactcatgtctattttccctctctccctcctttctaggactcaaggtgaatcgtctggatatgtatggagaaaagtacaaaccctttaagggcataaaatacatgaccaaagctgggaagttccaagttcgaacctgaagggagcatttgctgagggaatagtcttgcacattttttcatttcttacttgtctaaaagtaaaaaaaaatatcagcctgtctcctaggtcagtcccctcctggacccacccgctcccttttttccttagccttcagtgccatggaactaatcaagggaggaaaaggtcaccagggagaactggacagaactgaaacacagcaacaccagttctcaaggacaaggtgtgtgatgggggtaggaagcttggtgcttatgtaaccattttaaacgtggtttctataggaaagaccaacatttgtttagcttgcttggctttaattatctaaagccaatgaaagacttctttgttgattttttaagatagaaagattaaaaagaaagaaagatgggaagaaaatgaatgttagtcaaggaaaggccacttaaggatctgctctatgaaggagaagaaagaggaaaaagaagtaaaggagttaggaggagacacttaaatgaaagattggcaagaaaagcagtcggactctaccttaaggagggatgggaaggaaagagttgagttggtttctttctgattcctctactcatgtagaaaacacttgtacttctggaaatggactggagactttttaaatttgagtccactattgacatggaaaccccagtggaatcagattttccctcaaagaccatgatggtatcggactagttttcagacactgcctgttgctgtccatcagcacttggtctcttatcttcagtgagaaggtgacccgccttcttcccatggtggctgcctaaagtgcttcttttctaacccaaaacagttctactcacttccttttacagaattcaccggccattttcctgttacctgatccttctacaggatttttaaaaagtaagagagtttcagagaagccgatcccataatccccagtgcagccagggtttgtgtgtcatcgtactggagtagagggccgactcttcccatgaaggtgagcacagctgtgagtgagtgagctcatatctccatttgtcagtgctggactggtaccagatcgtaaccttcccgttggtcggaaacttttccatctgtcgccctagaaaaagagaaagcttaccatcgagggtgtggttgatccttgaagctgcttggtaaagttatcatttcctcagtcttttcttttgtactcctatcatgtattcattaatatctaccagtcccttttcattctaagacaaaacatttctcctaaatctctgaatanaatcagtgctgtaggaagatggactgtgttgatcatgggtgtaagcaacccagtttaagaaacatggcaactaaagggatacctcaggctttctttcccagtgggtcatttttgtcctagttcagtgtgtctgttactatttaaatatttatacaaaagggtttttgtttatagcttaaggaatgatactgtgctctgcttggtgcatggagaaaaaggaagacccatactctccacaccctagagcttttctctaaatattgtgcaaagtttttgctagttttatcttctgactttgggactagtttttgctgcagagttgtgttgctttgtgattttcctctgggatagtgtactgtacacaaccagatgtgttccacactccgtgactccgcagtttgtcctggagtgacatacacatccaccatggaaagggaagcatctctgcctgtggattctcaagtacttggaagcacctctcctgaggaacctacaggattctaaggtttcctaggtcactgaacaactaatcttggtccctgaatatttctaggtttgtaagtgcagcagttttatttcctctagaactcatcctgtttcaagggaagtacctaagaagatatagagtgtttctagggtaagggacctgcaggtgtaagcatagatgaaataactgtcctgtcacacgtgcagcaggccatggagtgtagcgggcatcgctgccgccattcctgcagcatcaccataagcagtgcagggtgtctccatcgagctgtttggttccatgtgtgtttaacatgtgcagaagtagcttctctgtttaagtttaataaagttgagtttcaccagtcttctatgtcctaagtggtttgttaccagaactaacaacagtgctatgccactcaaacctcagtagaagcagtgagtaaggaattcatcgactcaggaggatcttactgcttctgtcctgtctagccagcagacctaaagcatgtgttttgatcgattctttggtcacatctggaagatagcagatgctgatattaatgtcatttttagggttgtgagcataaggtccagatccacctagttatttttcaccagagttttaaaagacgaaatcgttgaagctgccggcatttagtctagggctttccgcattctcttgacctgcttctcttgtcttgttaatttaggcatgaaacggtgtcgcagtactctggcgtctttattccaggagaggcttcttacaagataaggcactgcgagtcgattgttacgccacacctgtaacaattttctataaacatctcatggccatcaaaaaaccttaaaactcaatgcgtactcactgtgagtgttcagtgccagctagtgctccaccccttctccctctcagccggcgtcaactgtctcttcgcctgtgctcccgggtgctctgaccctggtggtgggacaggaagttggttgtatacatgtacttttctctgtggccggtaggtggggactccatgcc

SEQ ID NO: 6454 - DNA, 1020 bp, Homo sapiens
gtgagtgagggctggcagctgctgggccacctcctagggaaccatagatgacgttggaccctaaatgtctatttcagtcttttctcttctgcttagtttcctcatagatggatccttcagccttctgcccaggggctgccagaactttgcttcatagctagagaccaagaccttttaaaatttgtagtagagacctcacttccttttccctaccctatccactgttgtgaatctagagccttttttgttcaatctctctagagagtaagcctttgctatttataactggaaggctctagtataagcatcttaagacttgatagacattacaagttatactctgatcaataatgtatgaatattcctgtcttacatcctctgtgtaaatacttggtattttcctttgaaaaattcaccagtgtaataaatggaaaatgatattttacatatgtttctttgattgttagagaggttgttttccatatgttttatgggatttgtatattttgtgaattttctgtccatgtctttctttggtttttattctcaagtgcttactgaattttgaattctcttgctggtgtctggaagcaaaggcctcctttatttttgctggtttggcatgattttgtctcctgacatggctctggtagtttcttgtgagggtggaggcacctgaaacactttatcaggcacatgatagacattgcctatcaaatggctcaacatcagttccacaaaaaacctaaatggccattcaagacctgtttctgcctgtttcaagttccatataggaattagatcagtagttggcaaatgacggcctgtgcgccaaaatctagcccagtctgtaaataaagtcatgctggaacacagctgtgctcctttgttgatgtgttgccgtgttgcctgtggctgctttcacatcacaatatcagaaattgagtagttgatacagagactacgtggacagcaaatctagaatatttaccatctagctctttaaaaaaaaaaaaaaaa

SEQ ID NO: 6455 - DNA, 371 bp, Homo sapiens
acacttccttcctgtgtcttttccacatgcaaacttgaggtatggcttcctgtctttagtcatttcatatagtttggtttgtgctatctttggtcatagaaattgttcttctaaaacctctccagatcatccttcatttctgtgttggacatgcatcctccatggctggttttactttacaaggggtgctccccctgaaaacagcactggcaggatggccatgcacagttgattgctgtgacagaggggcttgctgatcctgtggctttatctctatctggtgtctgctatgagtagagaaacatgggagagattgagctgcaaagcaaagccagtttatccagtgctttacagttgtggtttaaaaaaaa

SEQ ID NO: 6456 - DNA, 1786 bp, Homo sapiens
gattggatctttgggattgaattctccatcaatttccacatctcttttattccttctttttgcctcataaggggcttgtcctttttaattacacaggtgcttcttcttctttcttatttccttcctcagagctccctgcagagattttgccacagttgattgataagaagatattgattccaaggtcagagttcagaaatattcttataaatgaatcatcttgttaataaagggtcacccaaaaagttcgaggatacagatgttgctgaaatcagagctctcagcaattgtagcaagagagataaaatggcccaatgtcccctgctcaagaaagtaaattaaaggaaaggagagatagaatcaaaattaccatttatcaagcgtctataatatggatgcaagagtcctgtttctacaatacaaaccttatgaccttgggcgagcttcttaccatccccaaatcttagcttcttcaactgtaaagtggtatcattaacatcttcaaaggctgttgtcaggattaaatgatgtatgtaaagtgctttgcacagctgctgtcacataataaacaatatagaaatggtcgttgttaactagcattattggaattatttgtgcttttgtttaaccatcaccagtatcctaagtgataggcatcaactagaattctaggttggaaaatcataaagcaaagatattacacaactcttgcttgttgctagtgcaacagtgtttctctttatgatttacatatgaaaaacagaccaagtgatggctattagaaaagggagggatgtagaaaaataaagccagctgaggggcagaacttgtgcattttgcaaccatcctcagtttaatgtttggcattcaatcctcattactgactatgtatggcttcacaataaatcaagagtgtgctatatgagaaaatgaagatttatacaaagcgaaattgaacaaatggtgaataattgatttagctgacctgacaacacccacttataaataacacagaatgttttactttggcagtaatttagttttctgggcatcctggcttctagcaattctctatagcggcccagtgctttctgactttcccatacagaagaaaaaaaaacttagatcatgagctctgtcctcccagtatcaccctggcatgatctatagcaagtatggttcacattagacattccctgaagaatgtaccgatcctttatttagtcctctgatttaagaatatagtttggcctctacatagcaaaacttgagacatatttagttagctttaagaattacagtgtttaccagtcttataatacagtcttaagaaaaaagtaaaataaacaacataactataaaataaaccatattgtgtcattgtttaaaatgcctttgctggcctctggatataatacatttcatcttagagcacattagtgtaggaagcatttatttccaagtttattatcccaaagaatggtatagatgaatatacaaatccttgggcatatccacaccaaaggctatatgaattcagagatggcttactaaacaagatacagaagcaaatgaggacattttggcagacatctttgtagcattccagaatcatagaatattaggattgaaagtgtcctgaagagattattctgtttaacctcttgattataggctcagtttcattcaataaacatacagcgaacttctggaatgtgacagggattaggctgggattaggtgatgggtatgtttagggaggggaaatgaaaaggaaaaaaaaagg

SEQ ID NO: 6457 - DNA, 1786 bp, Homo sapiens; identical to SEQ ID NO: 6456

SEQ ID NO: 6458 - DNA, 143 bp, Homo sapiens
actgtaaagacacaggcacatgtatgtttattacagcactgttcacaatagcaatgacttgcaaccaacccaaatgcccatcaatgatagactggataaagaaaatgtggcacatatacaccatggaatactacgcagccata

SEQ ID NO: 6459 - DNA, 21982 bp, Homo sapiens
gagaccatggcgagcccagggaaagacaattatcgaatgaagagctataagaacaatgctctaaaccctgaagaaatgagacgaagaagagaggaagagggcattcagctccggaagcagaagcgagagcaacaagtgagttaatgggagtattctcaaacatactattctgggaaacaagcccctatggttggcctccaccatgcaccctgacttgccctgtagaaaagtagcttactaggtgggcatggtggctcatgtctgtaatcccagcactttgggaggccaaggcaggcagatcacctgaggtcaggagttcaagaccagcctggccaacatggtgaaacttcattttctctactaaaaatacagaaattagccggacgtggtggcatgcgcctgcaatctcagctacttgggaggctgaagcaggagaattgcttgaacctgggaggcggaggttgcaggagctgagttcgtgccattgcactccagcctgggcaacaagagtgaaactccatctcaaaaaaaaaaaaaaaaaaaaaaagaaaagtagcttacttactgagtgagctactcatccagtttcctttgttgtaaataaatgttgggagctttgagaaagagaaaactgaccttatccccttttcacaagttagaccaacttagacatcatttatgtctttactgtaacattctagttctagttccttgttaccttttcttttcttttttttttctttttttttttttgagacggagtctgattctgtcacccaggctggagtgcaatggcacgatctctgctcactgcaacctctgcctcctgggttcaagcaattctcctgccttagcctcccgagtagctaggattacgggcatgtaccaccacgtccaattaactttgtatatttttggtagagactgggtttcaccatgttggccagactggtctcgaactcctgaccttgtgatctgcccagatctgcccgcctcagcctcccatagtgctgggattacaggcgtaagccaccacgcccagcctgagactataataatgcctcaccatctgcactcctacgccaccccgccaacagattcagtcacctgattattattatttatttatttatttatttatttatttatttatttattgagacaaggtctcactctgtcacccaggctggagtgcagtgagtgcagtgagtgacatgatctcagctcactgcagcctcaagctcccgggctcaagtgatccttcttcctcagcctcctgcatagctggactataggcatgtaccaccacgcccggctaatttttgtggattttttttttttttttttttttgtacagacagggttttgccatgttgcccaggctggtcttgaactcctgagctgaagtgatccacctgccctggcctcccagagtgctgggattgcaggcatgcgccactgtgcctggccaacctaacctgattttgcccacccttttgctatactatcattcctttttttcttttttttttttaagacaggatcttgccctgttgcccaggttggagtacagtggcgtgatcttggcccactgctgcctctgcctccaagtccttgaatatcttttccatgttagtaatcaatagtctcctcttctctttgtggaatacattccaggacccacagtggatgcctgaaactgcagatattactgaaccttacatatactatgttttttttcatgttttcatctttttacttaaaggaagcactttacagcttctctttggcacatttgaattgccagcatcactactcttgcactttgtggctattactaagtaaaataagggttacttgaacacaagcaattgccacctgataaccaagttggttattaagtgactaactggcagcagcgtatacagcatggaatggatgcactggacaaaggatgttcacatcctgggccagacagaacaagatagcgtgaaacttcaacactactcagaatggcatgcaatttaaaacttatgaattgttcatttctggaattttctgtgtaatattttcagaccacggttgactggataactaaaataatagaaagcaaaactgaataaggggagactaatgtataaagcttggcctcacttctcagctactctagtatatccttgtcagttatgccataatttaacattggattgttctttgttttctttggttcagagagtactcttaaccactgtctctttactttcagctttttaaacggagaaatgtggagctgattaatgaagaagctgccatgttcgatagtcttctcatggactcttatgtgagctctaccactggggtaaggcccctgcatgtgcctcaggctgacctggaaaacacctgcttctaaggacagaaattgggccgttcacatcatctaccagctttgccagtaaccatgacaagttctttcctctgtggaccctttcgtcagctttaggagtcaacaaagattcaactttgttagatatatctgaggaaacatttaagagaagccatcagttgcctcagaattaggaatcacttttcaaatgtcccaacttgaagcacctatagattaaacagaccccttctcctgagcctattatgccatcctcttgccctcagttttttagaaaacaggatgccaagcagtattatgtgctcacatctggctctaatgttggtttgcaaagtcctaaacttgttttatgttctaggagagtgtgatcacaagagagatggtggagatgctcttttctgatgattctgacctgcagttagcaaccacacagaaattccggaaactgctctccaaaggtacaaagcctggcccttgtcagagaggccttatatgatttagcctcttttctcttcactgatgtcatcaacttacacgtgccctcactcattctgctctagccctactgaccttggtgttgcttgtacaagatagacacattgctaccttcacactggatacttcctctgcctgatgtcctctattcccagatatctttgtagcaactcccttactcctatgattaaatcccaccttcaacagttttatctttttaccttgccctacatattctcctcctctccccccattatatttatcttctaacataataaaatgactcttcccactaggatataaactctctgagggcagagacttttgtttttgttccctcctgtgtcctctgtacctagaactgtgtggcacaccataggtacttaataaaaaaatttaatgtatgattggaaaaatacctcttgtttcagtatatcaaatagtcttcccaagaagagagtactggtctttcttgaaagggaaatgtgcagaccatggttgttcatcccttaggtggttctctctcccacacctttctttgcttacatttagtaagccaaagatgaacattcttaaattaggattggctttactctttaacattccagctgtattatacagttcaaagacgagtagatattgttaaaaccaccttaccagaagggagtttgggaatgtttgtaagggtggtcagaagtgtctaagaaggattgcaagctgacccccatgaagggatcagcaaaagcttctcctgtgtttttattttcccttctcccttatccagagcctagtcctccaatagatgaagttatcaacactccaagagtggtggatcggttcgtggagtttctgaagaggaatgagaattgtacattacaggtgaggcctgaagggaaggggtttgttttgtcttttaatttttgggggatacatagtaggtatatatatttatgggatacatgagatgttttgacacaggcatgcaatttgaaataagcaaatcatggagaatggggtatccatttcctcaagcatttatcctttaagttacaaacaatccaattatacactttaagttattttaaattgtgtagttattattgactatagtcaccctattgtgttaccaaatagtaggtcttattaattctttctgggtttttttgtacccattacttatccccatcccacccccagtcccccactactgggaaggggttattagatgaaagccctacttccaagaaattgcagtgggatacttctattgacatatctctcaggaagttcaaaagtaatgttaggaaacattcaggagaaaccatcagttccctcacagccagaatctcttccttaaaacaatttcaaaggaaaggcaccagactatgatagactgatcattcagttataaatcagaggctatagtccactacctgtgtgacctgaggcaaattgtttagcctctctgggtctcttgtttcagagatgggtgatgggtcaatccattggaacttgccagaactcagctgaaagggactttgagagacccatttcattctaatcctcatttcagaaatgaagaaagtgaagctcaggaaataaaagagtgacctggcaaaggatgcatgggtgttgtggtagtgcaggactaaacctgggaccctggaagcccaatgtcttattctcatctatatcacatcactgcatcttcccactctctaaagacgggaggggaaaggcttgtattttatgtgtgtgtgttttaaattcgtgggcaagaggcttgcttgtgttttgtgaggttttgttttggttttttaaattcatgggcaggaggcttactgttctgagccagctgataggcatggctgctcagtctgaaatgacctttcaatcattgcttaatctcactttcagtttgaagctgcctgggctctaacgaatattgcctctggaacctctcagcagaccaaaattgtcattgaagcaggggctgtccccatttttatagagctgcttaattcagactttgaggatgttcaggaacaggtaatgcttagatttggtgtgattctttatagtacctgtggtataataaaaaatatatttggtctttgtcctggttcttggcacagtgttaaaactcttggaatttcctgagtgataggggtgtcaagtacagatggcccctgggacttgcaactggtatctcaagttggggcagtcttgtgggactaacctgcggactctgcattaactctaggtgttagagtcagaattgaattaaatcgttggacacatggttggtatcagagaatgggtggttgatgtggaaaaaactctatacatttgttgttggaagtgccattggaaaaaagacaccacagtacccatatctgagtacccacaaatcatggagataaagatacaacttccatttctcccattgaattcttactagttggatagaattggagagtggtagtgggctcttttatagacttggtccaaggcagctacaagagtgcaactttcgccaggcgcggtggctcacgcctataatcccagcactttgggaggccgaggtgggcagatcacgaggtcaggagttcaagaccagcctgaccaacatggtgaaactccatctctactaaaaatactaaaaagttagctgggcatggtggagcttacctgtaatcccagctattcaggaggcttgagacaggagaatcacttgaacccgggaggtggaggttacagtgagcagagattgtgccactgcactccagcctgggtgacagagcgagactccgtctcaaaaaaaaaaaaaaaaaaaaatgcaactttctgattactttctccttttctgggcgatattgttttggcttctgtggctatagtacagatggcagcctgtctttccctgctgaaccaggaactcccagggataggtcattgtagaacaagtgctcagtaagaatttcaatagggaggttacctgagcttgtgtagtatatttggggccttgacatcattctcatcctggtgggtactcactttgcagttgtggctataaagtactcacaggagtaccaagctttgtgggtgacagtttcattatccccttttcaggcagtctgggcactgggaaacatagctggagatagctctgtttgccgagattacgtcttgaactgttccatccttaatcctttgttaacgtgagtaattataatcatctgtacctgggcgtctactgggtggccacgtggcaggtcatttgggggcagcatacttgattccttaagatgataggtaagtgcaaaaactataaaaatgcattctgattgccaaagtaaaagataggtatctttggagattgagaaggttgtggccgggcatggtggcttatgcctgtaatcccagcactttggtaggccagagcaggtggatcccttgagcctagagttcaaaaccagcctgggcaacatggtgaaaccccaactctacaaaaaatacaaaagttagccaggtgtggtggcaggcacctgtagactcagctacttgggaggctgaggcagggaggatcacctgagcccagggagatcaaggctacagtgagctgtgattgatcacaccactgcacttcagcctgggcaaaagagtgaaaaaaaaaaaagattgtgccacccatctgccaaaaaggatcttgttcctcacttcatggcactgcagaacctcatgttagtcatatcctcatatcctcctcattgttgagccaggggagagaggcaggactagcccacctggaaaaatccaaccttctctacaaaatgcattgatttgttatggggttttgcatacatacatcggacagctctgtcgtaaattatagatcaaagaccccgtgaagcgtcattgtatccttctcccatccttccctccgtacccttagagtaaactatgcctaaaccaaaacagatgaatgaactgttcttcagagaccacagtctcatagcctaccactgtcactttcttggacccttcacagaaaattattccatactgtgtggctaaagctctcacagtagacctatagcttttatttcttagacttttagcttttatttccagagaacaccattccttgtcctggacttgtggccagggttatgggcatgatatatcccactttagaagctttacaggcttactccagatctagccctctgtttcgtccctattatctatggtattaactagccacagctggtcctgaaatgaatactctgtatagagcctggcctcctaacctataccagctctattaacttaggtctgtgagtaggaagaaacaggctgctagagtctgagaggtctcattggatttgtctctgggttcattggcaacagtcctatgccaaggcctcagtgctcaggatctggctttgctgtttccttcagactccttaccaagtccacacgactgacgatgacacggaatgcagtctgggccctgtcaaatctctgccgagggaaaaacccacccccagagtttgcaaaggtgagagagctacttactagaccctgagtgacatcaggttccttcatatggagtttttaagtctttgggatactccttggagtctcaaatcatgggaaactgaaagaagcaattgttagtgaagtagatgatcttgtgtacctggatagtaaagtgaaaaggtagacccaaatgtttaatgtagtagcgatccctagggtctggaattacttgtgtgtgtgtattgtgggggcggtggttgcaatgttagggttcgtgatagagctgatatagtcttgttcccctgtgagtctttctcactctgcttcccacaggtctctccttgtttgcctgtactgtctcgcctactcttcagcagcgactcggacttgctggcagatgcttgctgggccctttcttatctgtctgatggccccaatgagaagatccaggcagtcatagactccggagtctgccggagattggtagagctgctgatgtgagtggtcttagaaggggtacaggttctggctgggcacggtggcttatgcttataatcccagcactttgggatgccaaggtgggcggatcacaaggtcaggagttcgagaccagcctgaccaacatggtgaaaccccgtctctactaaaaatacaaaaattagctgggcgcagtggcaggcgcctgtaatcccagctacttgggaggctgaggcaggagaatcatttgaacctgggaggcagaggttgcagtgagccgagatcgtgccattgcactccagcctgggtgacagagcaagactccgtctcaaaggaaaaaaaagaatcccagcactttgggaggctgaggcgggtggatcacaaggtcaggagatcaagaccatcctggctaacacggtgaaaccccgtctctactaaaaatacaaaaaattagccgggcgtggtggcgggcacctgtagtcccagctactcgggaggctgaggcaggagaatggcgtgaacccgggaggcagagcttgcagtgagccgagatcgcgccactgcactctagcctgggcgacagagcgagactctgtctcaaaaaaaaaagaaaaaagaaaaaaaaagggtacaggttccttaagcttctccaggctcagactaaagagagagaatcagcagggccgaaaatggtgtgctggccttctgatcagatctccctcctctgtaggcacaatgattacaaagtggcttctcctgccctgagagccgtgggtaacatcgtcactggggatgacatccagacccaggtaagaaagaggagggtgcaggatcttagaccagctatggaagagcttgtggagagctgccagtggacaaaagcctttcctgcaaagggctgtggtcctgatgggaggcactatggtctaaggaagtaagtgtgggcttgagtgaaaagttccagctctgttattctctaaacagtcatgggaaacttggttccttcttttcttacataaattgggaacaaatcatcgtctaatgggtgaaggaaaactaagtggaataactggacttaccacctgggacattgtgagttagttaagtttgagtcatggtccctttgagatactgaaagctatggaactccacccctgcttcctagatctttaaggtctcatggatatcatggaccttggaataatcttttgtaaataacccttctggtgaaggcatagtaaacaaagttcccctgctcaaaggctagagatttgggtattctttgggttttgagtagcgagcataattctgtgggattctggacaggtttcttaacaggtgagtagtgtcactcaaacactcaaacccacatgctcattttctgggttactttgtatatgtatatgcatgtactttaaaatacaacataaaatttaccattttaaccattggcataaagtacattcacattgtttttccgttattgccactagccagctacagaaattttttatcatctcaaactgaaaccgtacacattaaacagtaactccccattctcccttcccctagtgcctagtaaccaccattctattttctgtatctgtgagtttgagtgctctaagtacctcatgtaagtggaatcatacagtgtttattctttctcgtctggtttatttcacttagcctagtatctttaaaattcgttcatgttgtagcatgcatcagaactcctttgaaaggctgaatgatattccactgtatgtatataccatattttatttatccatcaatagacatttgggttgtttccaccttttggctattgtgaataatgctgctatgaacattggtgtacaaatatttgttcaagtccccggtatatacccagagtggaattgctggatcatgttctaattttatgcctaatttttttgaggggacaccatactgttctgcacagctgctatgccatcttacattcccaccaacaatgcagcatgttccagtttccccacagccttgccaacagttgttattttccgttttttgttttttgttttttttttgataatacccaccctaatgggtgtgaagtgatatttcattgtggttttgatttgcatttttctaatgattggtaatgttgagcatcttttcatatgcttattggccatctgtgtattttttttttttttttggacacatgtctattcaagtcttttgctcatgttttaattgggttgttgagttttctggttgttcaattttaggagttcttcatatgttctggatattaatctcttatcagacacatgttttgcaaatattttctcttgttctgtggttttatcttttaactttggtgtctttaaaaaaaaaacttttaacttatttaattttttaaaattgagacagagtctgtctttgtcacccaggctagagtgcaatgatgccatctcggctcactgcaacctctgcctcctgagctcaaagcagtccttccacctcagcctcccaagtagctgggactacaggcatgcaccatcatgcctagctaattttttgaatttgtttttttttggagagacagggttttaccatgttgcccaggctactcttgaactactgggcttaagcaatcctcccaccttggcttctcaaagtgctgggattacaggcatgaagccacctcacccagaccaactttcttttcttttttaattttttttagagggtctcactatgttgccccagctggccttgaactcctgtgctgaggtgatcctactgcctcagcctcctgagtagctgggactgcaggtgcataccactgtgcccagcttactccaatgtcttgatgcacaacagtttttcattttgattaagtccagtttacctgggccaggtgcagtggctcatgcctgtaattccagcactttgggaggctgaggcaggaggatcacttgagcccagaagtttgagaccagccctgcaacatgggaagaccctgtctctacaaaaaaaaaaaatgttttttaattagcagagtgcggtggcaccctgctactcaggagtccccagctactcaggaggctgaagtagaaggattgcttgagactgggaggtcaaggctgcagtaagccatgatcatgccactgcactccagcctaggcaacaaagtgagaccctatttaaagaaaaaaaatgaagccgggcacagtggctcacacctgtaatcccaacactttgggaggccgaggcaggcagatcacctgaggtcaggagcatgagaccagcctggccaacatgatgaaaccccatctctactaaaaatagaaaaattttccgggcgtggtggtaggcgtctgtaatccaagcgtcttgggaggctgaggctggagaatcacttgaacctgggaggcggaggttgcagtgagccgagattgtgccattgcactccagcctgggcgtcagagcgagactctgtctcaaaaaaaaaaacaaaaacaacaacaacaacaacaacaacaaaaaaacataaaaaaaattaaaaacagtttaatttttcttttgtttcctgtgcttttggtgttctaggtcattcttaactgttcagccctaccttgccttctccacttgttgagcagtcccaaggagtcaatccggaaggaagcttgctggactatttcaaatattactgctggcaacagggctcaaatacaggtaaaacaggcagggaagtcaaggggcatgggaagtcataggaacttgggaggttgttggaatatttgctttcagaagaaagaatttgtttccctttaaaaataggagtcaattggccaggcacggtggctcacgcctgtagtcccagcactttgggaggccgaggtgggcagatcatgaggtcaggagtttgagaccatcctggccaacatggtgaaaccccatctgtactaaaaatacaaaaattagatgggtgtggtggcggacgcctgtaatctcagctattcgggaggctgaggcaggagaattgcttgaacccgagaggcaaaggttgcagtgagctgagatcacgccactgcactccagcctgggcaacagagcgagactccgtctcaaaaaaaaaaaaaaaaaaagaggggctgggcatggtggctcatgcttgtaatcccagcactttgggaggctgaggtgggcggatcacaaggtcaggagatcaagaccatcctggctaacgtggtgaaaccatgtctcttctaaaaatacaaaaaaaaagaaaaattagccgggcgtggtggcaggcgcctgtagtcacagctagtcgggaggctgaggcaggagaatggcgtgaacctggtaggtggagcttgcagtgagccgagatcgcgccactgcactccagcctgggtgacagagcaagactgtctcagaaaataaataaataaataaattaattggagtcagtgtgtactattggtcaaagaagctgtgtaaccaaaactgggttcttctgtagtagcctgtcacctatataggaagaacaaaagaaaactcccagaatggggaagatgtctaagtctcagctgatttggggactagatttatttatcatgctgaaatgactttctccttccatctgcctcctctcaattctctctcaggctgttatagatgcaaatatcttccctgtgttgatcgaaatccttcagaaagcagagtttcgtacaaggaaagaggcagcctgggccatcaccaatgccacatcaggaggaacccctgagcagatcaggtattacattcctttcccgttgtcttgaatgataatggatgctctccctgtttgctcatggtttacaggtgacctataaactgctcttgctcagacaggtctgccccctagtctcactgtaatagaattttactggtaaactgctacagtgtcactagaatctggaatagattccatgtaagccatgtgggaatctattccagattccagtgacactataacagtttaccagttttcccttctggagaagagaaacatgacatggacatccatcctttctctaccttttcttatccaacagagaactgaaatctatgtagttctcaattcaaatgaaggggaaccgtactatgggttactcaaaacagtttcttcagcctgaccaacataagaagactctgtctctacgaaagacaaaaattagccgggcgtggtggcatgtgcctatagtcccagctgagatgggaggatggcttgagcctggaaggtcaaggctgcagtgagctgtgattgtaccactgcactccagcctgagtgacagagccagagtctgtcacaaaaaaaaaaaaaaacaaaaaaaaacaagcaagctggtgtagtggctcatgtctgttatcccagcaccttgggaagctgaagcaggaggatcctttaaacccaggagttcaagactagcctgggcaacatagggactttgtctcatgtgtacaaaaatgtaaaaattagcaggttgtagtggcgtgtgcccgtggccacagctactcagtaggctgaagcaggaggatcacctgagcccaggaggtcacagttgtaataagctgtgattgtgccactacactccagcatttgctacagagcaaggtcctgtctcaaacaaaaaagcagcttctttgagaaattaatttgggatatgagacttgaaagaagcgaatagaaagctattttgtgtatgtgtgctctttttgagaccgcaacctctgcctcccaggttcaagcgattcttctgctttagcctcctgagtagctggggttacaggcacgtgccaccacgcccggctaattttttgtacttttagtagaaacggggtttcaccatgttagcaggctggtcttgaactcctgatgtcagatgatcctcccaccttggcctcccagagtgctgggattataggcatgagccacctggcctgtgtactcttttattttagtttacattatctgaacattagtggaaagtggtgggaatagttaagtgttttgcccttcacttgttgcctattaaggggagcacagttagtatatataaagtcttaggagaaaagagatagctgttgagttaagctttgaaggataaatatgggattgtaaaaggcctcttagacagggaaaagcataaataaaggtacaggaatcagaaacctggagacctttacaagtgtgactagaatgtattgtccttggaagggaataatgggaggcagagctagaaaggaactaggagccagattgcagagcatccaggctgggctgggcttgtggtattatggtattgttgtgccatagaatttggagttcagcgaattagggagcctgtgaaaaattttatgcagggaagtaatgtgttcagaggggtaatattgcagccaaggagacattagaggcaaggaggaggagtgtttggtagcatccacatgtgaaatgaactagaccaaccacatgtgaaatgaactagaacaatatcaacaggaaggtagagagatagagaaaggataagcggttatcaaggctcagtaagagcagtggctcacacctgtaatcccagcactttggggaggtcaaggtgggaggatcgcttgagaccaggaatttgagaccagcctggacaacataatgagactttgtctctacaaaaaataaaaaataaattagctgagaatggtggcacacacctgtagtcccagctgtttgggaggctgaggcaggaggatcacttgagcccaggaggctgcagtgagctgggatcgcaccagtgcaccccagcctgggtgacagagcaagaccctgtctcaaaaaaaaaaaaaggacttggttggggaacactctcattctctggcatggaatggggtgttgcacaattcttttttcttttcttttctttttttttttttgagacggagtctcactctgtcgcccaggctggagtgcagtggcgtaatctcggctcactgcaagctctgcctcctaggttcacaccattctcctgcctcagcctcccgagtagctgggactacaggtgcccgccaccacacctggccaattttttttttttttttgtatttttttttagtagagacggggtttcaccatgttagccaggatggtcgcgatctcttgacattgtgatccgcccacctcagcctcccaaagtgctgggatcacaggtgtgaaccaccgcgctcggcctcacaattcttaaaaataaaaaaataaattagtaagagtgggttgctgagagttcagagcacctgcccagcacttcatgtgtcctgtactagtttagcacttgcctggtctctggcccctaggtacctggtctcactgggctgcatcaaacccctatgtgacttgctgactgtaatggattcgaagattgtgcaagtggccctcaatggactggagaacatcctgcggcttggagagcaagagggcaagcgcagtggctcaggggtcaatccttattgtggcctcatagaggaagcctatggtatgtgccctctcctcaatctaggtcagaacctgagactgtaggcctccaacgtggtatacatatgttggtggtggcggagtgtgggttgggaagcatccatagcttccatgagactgatgtctgtgtcttcagaacagttaagagctcctgccctagccaagtttcaccatccacagggtttcacacgttaccatgagtataatcaggatgtgctgagtagctggggtacagctaggatttggatttggctcatcttttgagttgagagttgtctctcaccagtttcttctccttctaaggagtgataggtcagttctctttctgataggctgtacctataagagtgctggattaactcatcactcatccctgagaggctgatgatgtgcccaggtcatgcttctagtttaaagcagaatcaggactagaacctctgtaactgacattttggtctctttcctttgggattctgtagttttgagaagaaatcttaactctcccctttcaggtccaagagtgatctgatcatatgacttgtgtttgtaagcactaacatacctcagggaaggaaaaataggtaaatgtttcacctgcccatagaaaagcactcacacttccctctccttccttcttactactgtaggcttggataaaattgagtttctccagagccacgagaaccaggagatctaccagaaggccttcgacctcattgagcactactttggtgtagaagacgatgatagcagcctggctccccaagtcgatgaaacgcaacagcagttcatcttccagcagcctgaggcccccatggagggcttccagctataatatctgcctccagggaggggaggggatgggaagcaccaccagccagcggaagagcagccctctggtgggcgggaaaccagtgtccccaccatcagccaccacacacctctgctgccctggagactgtgctcttgacctgctccgcccccttccctggagggagcaccctctggacagacagaaccatctgaggctcacctttgggttttgtgacaagaaggggacgtgttgggtttttcttccttacactatattttggctgcacacatgtctttaacccaggagcccaggggtagacaaaggaggactaaggtaatcaatttgcacctttttttatttttattttttttctttttttcttcagtggtgacttccttccctttatcttttttcattcttcccggtcctctgccctgatctgtgtaactcttatcttgggtacttgagcagacggtatattccagaggtgggaggtgggaggggaagggagaaatccaaaacaaagtgttcttgctctgacagaatattaatcttgtacgcttggattgagttatttaatttttttttcttttgcacatttttcttgtattaagattgctcttcccaagagccacaagttcctggttttagtaaacccagctgcctgcattgcctgggactagaggctggggaggctaccatgaaacaaaggtccctccctccctctgactctttgcccagacctctttagtttgggggatcctcctcactctcctgaagtgtctcaagtataccagtgggagtgcaggggaggagcacaggccttcagatggggcttcccacgtgtagctactgatcccatatttcctactcaccttccaaatggtgcgacccaacttcatttgtttacttgaaaattccccctcgaggttgagagaacctctgaggtggctgtattttctcctaagcttgagatagggggctgtggtccttcctttctcctgaggagaaagtccttgctctggtgacctgtaagttgcagaggagggtggagtgagagtgtcatgtattgggatagtcagggatccctgcctttggcctttcttcttcttcttcttcctcttccatagttggatcatgtatattttacttctaaaggagagaatgtcaaaaagttctgtatttttttatattctatatattaggtaggtcaatcttaattggtctcaagaggaagaactgtctgtcatttcggtaagtaggatactgtgaggaagaccaaaaagagatatggatgcttcctcgctcaggaggcctgagcttggtccttttcctctctgcttggattctggaccaccacctgggaccaaccttcagctctggaaccttcataaagcaggtcagcgtggcctgattgtcccaggacctgaagggagcaaggatggcctcagggcctggtgaagtctgctactctgtccttactgctgaacatcctgcttgtatcaggaaactcagaagcagtttgccttgtcaaattcaatctcaatggccattgtccacataactgatcacccatggctgcctctcctattatctattatcactgaaacttagtagcctgctttttttttttttttttttagagctattgcgtatcttccctgtttgggatccttgtacctggtttgggttttcccttccttgtgacaattataatccagatgcctcttctttctgtttgaattacggtagtgcattgccttagtggcttgcctgtgcctctgggtggattacatatgatagtaaagcccacctgtttggatgggagtagaggaagttggtgtagaccagctgtggagctgaaggcacagtctgccccacccccacctccccactgtggttagtcagaggcatcctgctccaagctctgcttttccttcctctgaaacaatgccattcttgcttctattgctacacatctccttctggctcaggtgaaatccatgcccttctgcttatagacctaaagttcaggtacttattattggccattgatcttgaatttgccctctcctagtgctgcagtcccacttcaaagccattttctgaggaggatggtttaggtctggcaattgtccttgaaaaatcccacccatgttgtaccaccttggtgagtcatatgccactcatcagcttgggaatgatggctgccaactcccaatctcccaggaaggcagggggcagaatctttttttcacttggcctgctacctccattaaaaaaccattctcttacagtttaaaaaaaaaaaaaaaaaaaaagccttcccctacccaacctccgcccattgttctcttccaaagggcaatttagtaggatctactttgtacatctcaagtaagagttaagtccctgatacagggaccagtttcttagtgtaagacatacacatcctgcttgtccagctgttcctccaaaatctactttggcttcagctccgggtcctgtaccagatggaaaatgtttttggtgatctggctgctgcttaaagccagttttccctaagaactccaaaggctaaagtctactaggggcagagtgtgaggatagatttctaatcagagaaaagtggcctccaggagctttcatttatgtcttctccagaccaggttttcctgttatcttcctttaatcccctttcaaccaacaggtgaagttcttccagcccacagaggtagtaatatcatcttttctatctcctcctctcctttggccatgtaatgaagcaaaatattatttatttagcccaggcttgagagccactgtttgtggacagtcttcatctagattccataccctggcctaggcgaggtaaggctctctggttattgccaggatggagcccctctaccccagtctgctgtagggaataccctaattagttgaggcatgcttttggaatcctggcatgttggcatatggctggtctatcctttttaagatctctggttgggggtatctggatatggattaggagggacaaggagcctttttcttggctaatgttttccaatacttttttgaatggtgccagcccctccaggcatcccacccccaaatcatcatctttagtactaacagggtgtctggtcttagaagcctcccttcagatcccagctgaccctggtgactgcctggccttgatgttggctgcagccttctgatagaaccacatggattccacccacagctggccaggcttgttacatgggtcagggaatacaaatggcccccccccagggagcaggtgttggcctcagttttcagggacccttggtgttgctccttacctagagcccattaatctaccccatcaactctctgccatgaaagccatcttccaggagccctgttttttggagctgaactgcacagattatagctgctattgtacttaaataagggagaggaaaagaaggttctcaggcacagactttctatttttctcaagccaaaccagtttaaaatgtctagcagaatgaactgtatttccatttcttcatgtctacctgccttccccccacaccctaaagttgtacttgtttctagcaaactagaaggaaaagataggaaagcctggcactactaacctcacctctcatacacctctttgaaggccccagctcttttgttcaggcctctcttctcccctagactcactcagcttggtatccatcatcttgagcattcttcagtagattcatctagggttcagattccagactctcagctgaagacagggagccaatttcccccaggtccctgcaggtaatccagggaccccatagggagaacaggctgactggggcattaggaatgtttgtacctctctgcttccctggcagcctggggaagggtgcagggctcagtgcgctaaaccatggtaaacatcttcaatagaactaccctagaatttagtgagtgtgagactgagatattgctcagaataaatttattccatagccatttaggattgcatgttctggaccaaccttgtccagtatgttttctgtttgagctttttcattcttttgttaagccaacaagttgagaatttggccctgctgggatccatgtagtgggcactagctgctctttggccaaggccttcataaatgattcagtctctcattatctgtcctctagccccacaccctgatttagaccgtggcaaaggaagaacttgaggtcaagaccaaccaaatctgtgaattaaagctgttatttttttctctgcaagggcgctttgcttcaggtctgggctatgtgcagaacctaagcaggctgtgagagttagaagaggcagtattacatgttaggcccagaacaccatgggaaaaggtttatgtagtgtatcttagtggcctgcctagctgcctctgggccaggctgacttctgatgtccacattagctcgtacctgaaccctgttgctgaatgccagccctgttctcctgtaactattatatacgccatggcctggggggcattgaaggaagtaagctctcagagatcctaacactggctgggaacctctgactcagagcatgtctttaaagagtccacatctggccaggcgcggtggcacatgcctgtaatcccagcactttgggaggccgaggcgggtggatcacgaggtcaggagtttgagaccagcctggcaacatagtgaaaccccatctctaataaaaatacaaaaaattagctgggcgtggtggcaggcgcctgtaatcccagctacttgggaggctgagacaggagaatcacttgaacccaggaggcggaggttgcagtgagccaagatcatgccactgcactccagcttgggtgacagtgcgagactccatctcaaaaaaaaaaaaaaaaaaaaaatccacatcttcagctgggcgcggtggctcatgcctgtaatcctagcactttgggaggctgaggcgggcagatcacttgaggttaggggttcaaaaccagcctgaccaacatagtaaaaccccgtccctacaaaaataaaaaaataaaaaaaataagccaggtgtggtggtgggcacctgtgatctcagctacgtgggaggctgaggcaggagaatctcttgaacctaggaggcagaggttgcagtgagccaagattgtgccagcctgggcgacagggtgaggctcttgtctcaaaaaaaaaagtccacatcttcatgaaccctcagactctggagttgggtgtcggcttttttagccagcttttgtgggaattgcctttgacctattaaagaaggaaagtgggtaatggagtcccagccactcaagagactggatatcccccgagaatggcttgggttaccagctatggacccttggaagatgaatctaatccttctcactggtttttctttgcaaattcatttgcttttatttttctaataacaataaactctattttccatgttctcagggcccctgggtagacagacacagcttgatttcagagcagacataggcgaagaaaacatggcattgagtgtgctgagtccagacaaatgttatttatatacacatccaaatttgaagagaaaatgtatttctttaggtttcaaacactgtaatagatataaagcaaaaataaaaacctgttgcaaagttctaaa

SEQ ID NO: 6460 - DNA, 98 bp, Homo sapiens
cctatagtcccagcactttgggaggccaaggcaggtggatcacctgaggtcaggagtttgagaccagcctggccaacatggtgagaccccgtctctac

SEQ ID NO: 6461 - DNA, 110 bp, Homo sapiens
ccgccaccacgcccagctaatttttgtatttttagtagagacggggtttcacgttggccaggctggtcttgaactcttgacctcaggtgatccgcctgcctccgcctccc

SEQ ID NO: 6462 - DNA, 1901 bp, Homo sapiens
gccatgggaagaaaccattgtgtggcagggaaggaggtggctcttggcccaggcctaaaccaggaaagcctgggaaactgggacccacaggtgggcatgaaagggccgcagcaggggctcccagcagtgtgtaagaccgggagctggtctggcaccactgccctggtccttccagctgcctgtcactggtatgatggccccggtgcattgtgccaccagcaggccacagctgtggatcttggaaggcctctggggtcccccgggagcaggggagtgggtgtgggggggaacggatggtggtgagagggacagaccaggcaggctgacgagcagggcgggcctggctcacgtgggcctgtaggcgggcccacgccaagtttcacttaccgccactgctgccagcgagagccgcgggagagtgtgcagccgagtcactactgcctgcctgcctgcctgctacggtgagtgtggcccccacaatgggatggcgcagggcaggagggccatgggttcccccaccccagactaagggggcactaggggaggggccgagtcatgtgaagagggagaccctctcagacagtcgaatgtgctggtcccactaaggaaaccacctcaccctctccaacttcctgcctgaaaatgggccctggagctcgcagacagggcaggattgtgcagggaaggcctgagatgtgcttctgcccaccccctaccccactccctccccttcggatcttaacactgggcactcacacacccaccccatgctcctctccaggctcagcagcaggtacgtacccaaccatgggctcgcaggccctgcccccggggcccatgcagaccctcatctttttcgacatggaggccactggcttgcccttctcccagcccaaggtcacggagctgtgcctgctggctgtccacagatgtgccctggagagcccccccacctctcaggggccacctcccacagttcctccaccaccgcgtgtggtagacaagctctccctgtgtgtggctccggggaaggcctgcagccctgcagccagcgagatcacaggtctgagcacagctgtgctggcagcgcatgggcgtcaatgttttgatgacaacctggccaacctgctcctagccttcctgcggcgccagccacagccctggtgcctggtggcacacaatggtgaccgctacgacttccccctgctccaagcagagctggctatgctgggcctcaccagtgctctggatggtgccttctgtgtggatagcatcactgcgctgaaggccctggagcgagcaagcagcccctcagaacacggcccaaggaagagctacagcctaggcagcatctacactcgcctgtatgggcagtcccctccagactcgcacacggctgagggtgatgtcctggccctgctcagcatctgtcagtggagaccacaggccctgctgcggtgggtggatgctcacgccaggcctttcggcaccatcaggcccatgtatggggtcacagcctctgctaggaccaagccaagaccatctgctgtcacaaccactgcacacctggccacaaccaggaacactagtcccagccttggagagagcaggggtaccaaggatcttcctccagtgaaggaccctggagccctatccagggaggggctgctggccccactgggtctgctggccatcctgaccttggcagtagccacactgtatggactatccctggccacacctggggagtaggccaagaaggaaaatctgacgaataaagacccccgctgccccatagcactgagtggtcaattggctcctacccttcttggcagcacagacctctgcccacacccagggacctggggaggagggcacagtgtttgtccctcactttccct

SEQ ID NO: 6463 - DNA, 6298 bp, Homo sapiens
gatagtaagccccacagtctgagaggtgactccataaaacaagaagaggcccagaaaagctttgttgacagctggagacagagatcaaacactcaaggtaccagaatccctgcttctcctgcaggggcctgcatggctctgagtaatatgcagaagaattgcccaggcctctgagaaccggtgccccgggcagtccttcagagagtccagggaagtcaaagtatgtggcttaagcagaagactttataaagtggaaagggccaagggcaggtatgtcccagagccttccgcacccacaggcatcttcctggggcttagtggcagcctagaggacagttggcatccaaagaatccttactgtttccttctgaaagccaccgaaaagatctcccatgtcagaaccttctagagtcatcttgtcttctgcaggttccattttgataaacctgctcctgaagcagcctttgatcccagggtcatccctaagcctttgccacctcctgagtagtagttctgagtctcctgctggcacccccctgcagccaccagggtttggcaggtaagcataagactcctggaaagcttgtttgggaaggagcttcctggaagcaaattcctttctggccctggccagcctgagaagtctgtgggaagggcaggcagcctggagaatttggcaggcaggctgtttggggctcttgaccttatctccatcccacacttaatctatttttctttgtgtttgttgccagtaccttggctggaatgtcaggcctcaggaccacaggttcttatgatgggtcattttccctctcagccctgagagaagcacagaacctggcattcactggactgaatctggttgcccggaatgagtgctcacgtgatggagacccagcagagggaggcagaagggccttcccactctgccagcttcctggagccgtgcatttcctcccccttgtacagttcttcatcggcttacactgccaggccctgcaggacttggcagctgctaagagaagcggagcacctggggactcaccgacacattcctcctgcgtgagctctggggtagagaccaaccctgaggactcagtgtgcatcctggaaggcttctctgtgactgcacttagcattcttcagcacctggtgtgccacagcggagcagtcgtctccctattactgtcaggagtgggggcagattctgctgctggggaaggaaacaggagcctggttcacaggcttagtgatggagatatgacctcagccctaaggggggttgctgatgaccaaggacagcacccactgttgaagatgcttcttcacctgttggctttctcttctgcagcaacaggtcaccttcaagccagtgtcctgacccagtgccttaaggttttggtgaaattagccgaaaacacttcctgtgatttcttgcccaggtattaagctgcataggagtcatgattctttgtgggtctcacctgacctcttaaggtctaacccatggcacttgtactttgctcacatcttgacttatctacactagttagttctaaggcttggttcagggagttctgaagtgatgggaagtggggccaaatgggagaaccaaggaagtggtttatttgatttaattctgcctctgaacaacaggtaagcaaaaggcacacatgattaaaggaggctgctaacctctgtggaggagggccctgccccaggacaagggttaagacaaggggcctctgaacctgagatgtgggtaaggtgaagaccacacatcacaagcacgttgaagtttagtggtttccctaaggaagcagaggatgtggagagggtctgcagcccacgggctgaccttgctgggagtctctgcctgtcattgtgcccatctttagcatgcatctggggtggcctgttcttcttaaggtttgtgggtagtatattatagtgaacctagcgaatgaacactgtgatcataaattcctcccttgggattccagagccgcaagattggggagaactgtgaacacaaccagcccaccccctcatccagtaatccagtctccctcagcactctaccaaagggtcagtttctatgttggaatgattccactggctgaatatatcttaaatcatctcatctctgagctcagcactgctgtttcctagatctgtttccatctgaatatttttggttggtctggcccatgctaaaggtggtactcagctggacacagcactgcagtgtagtgtgggcagtgggatcaggcagactcaggactcaagtgcccagcaggggcccagctcatagtggctgtttttttttgttgttgtttatttgtttgtttttgtttttgttttgagacgaagttttgctcttgttgtccaagctggagtgcagtggtgcgatctcggctcactgcaacctccacttcccaggttcaagcagttctcctgcctcagcctcctgagacgctgagattacaggcacctgccaccacacctggctaattttttatatttttagtagagacagggtttcaccatgttggccaggcttgtctcaaatgccggacctcaggtgatccacctgccttggcctgccaaagtgcaaggattacaggcgtgagccaccgggcccagccttggttatttgtttaataattgttaaatgaatgaatcccaggctgggcacagtggctcctgcctgtaatctcagcactttgggaggccaaggtgggaggatcacttgagcccaggagtttgagaccagcgtgggcaacaaagcaagactcccagctctacaatttttttttttttaattagccaggcatggtggcagtgagctatgaccatgccactgcactccagcctaggtgacagagtgagaccctatctcaaagaatcccagaaaccatgtttttactggtggtagacacaccattattccactcctgttgagcttgtccacagggacattcaaaacacagccacagctgggcatttatctatttcatgtactggggctcttcataaaatttcatttaaagaggttcttaggggctgggcatggtggctcacgcctgtaatcccagcactttaggaagccgaggtgggtggatcacgaggtcaggagatcgagaccatcctggctaacatggtgaaaccccgtctctactaaaaatacaaaaaagtagctgggcgtggtggcaggcacctgtagtcccagctactcgggaggctgaggcaggagaatcgcttgaaccctggaggcggaggttgcagtgagctgagtttgcgccactgcactccagcctgggtgacagagcgagactcagtttcaaaaaaaaaaagttcttaacgctatcaaaaaataacttggaaaccactgtggtgtacataaaagtggattttccttgcagtaccttctgcaagtggcagatattggacatcttacagcccaataatgaaaccaggtaataaccatgttaaaattccagcttcccacaaagggctgcacaccctggcaactaaaaagcattgaactttttgtctgctgtgcaggatttgccctaaagtgagttcaccccacatagtgagaccttgcttcctaaggacacactgagggatatcttgaccttctgtgcttagaaactgcagatgtctgaaggggtacacacctggccagaccccatagagtgtttcagaattgccctcctccccacccaccaggccagtccatcgtgctcccccaggctatgtgggttgagcaaacagcagcagttgccttggggcttggtttattggggtaatagctttccttttgcccctgagacctggggcagtatgcccagaacccctccctcctgcacaccccacagtaggcacattctcccactggcagcagatgtgttttctggcaagtagagaaaatggctttccttgccctgtgagaggtctcataagatccagccatagccaaggccatgtttgtcacctctggaggcctggtcagtccttctgtgggcacagaacatttctctcccacctaagttaggacctgcatccctgtttgggagcatgtggaagccaggcatcccagatccaggaggtcatcccacttcctgggcgatgctacaccagataagggcctgtcctctcagctgcagcagtcttgcagtggaagtgcccacttgttcacatgaaacaagtttcatagcaagtaagtaggggtcaggccagcactgaaacccaagtctggctgaaccaactcacctgttcatactgacttgctcaattttctgttacctctagtggagtgtgaaggtaggttatggagctggggttggggagtgtcacgtctctctgggtccctgtcttttaggttccagtgtgtgttccaagtgctgccaaagtgcctcagcccagagacacccctgcctagcgtgctgctggctgttgagctcctctccctgctggcggaccacgaccagctggcacctcagctctgttcccactcaggtaaagcagggtggggcgggcatctagactgctcctgcagatcaagggaagggttggggtgggaacagggtcaagggcctcagagggcttctgcagtatgtagcccacgctctttatgagaaagggcaccctgagtgagaggtgcgctgtccttttcagaaggctgcctcctgctgctgctgtacatgtacatcacatcacggcctgacagagtggccttggagacacaatggctccagctggaacaagaggtaaaaactccagagccccttctggacactgtccccaccccatcctaagaaccaacagaatctcctttctttccgctgaggagaaacggagctttaattcattttagtaacaagagttgataaagcaactaaagaggtaaactcagtttgggggctgtgcaccacacagatgcaatgcagacaggacttggcagagttgcctgatgactgatcctgtcttggctttgggacgtgggggcagaatagggggctggaggcaggtgggttgctggtgacacatgagtgcttgtcctgggtcttccctgggaaggtcccacaccacttcttggaccccatttgtgcagacaaacagttgctgaagcaagtgaactcttatagaagcttaagaaaaccctcgcagggactggtctccttctgcccaggatggaaccactctgttcttgttctaggtggtgtggctcctggctaagcttggtgtgcagagccccttgcccccagtcactggctccaactgccagtgtaatgtggaggtgagtgggtaggggccaacagctggcagctctggtggtaagggggccccgtgcaaggactgtaggccccactgcaaaccccctcacgtgaggtggctaggctgagcggattgttagggtgcaggccatggtggcaccaggcctcagtctgcaccccccctctctcaggtggtcagagcgctcacggtgatgttgcacagacagtggctgacagtgcggagggcagggggacccccaaggaccgaccagcagaggcggacagtgcgctgtctgcgggacacggtgctgctgctgcacggcctatcgcagaaggacaagctcttcatgatgcactgcgtggaggtcctgcatcagtttgaccaggtgatgccgggggtcagcatgctcatccgagggcttcctgatgtgacggactgtgaaggtaagcctgccagaggccatcctgcccagcccccatggcttcttccagaggttccccaacaagtcagattcctgggtgtcccctcagcaggcccccgcccactgcagcctgttccagcactggggccattttcttttatcttcctgcctcagttcttctccaagcatattgggatgccttttgcatctatctgttgagtgtgcctggcagagccacggtttttccagaaatagccgtgtctgaattgcctttgtatcactttgtttgcagtagctgagggagcagggcctgggtgtggaagggactggttagttcctgcggacgttgggggaggagaggtgggacctgccctaggccctggcacctttgggccctcaccaggaacctctcctttttgtctcagaggcagccctggatgacctctgtgccgcggaaaccgatgtggaagaccccgaggtggagtgtggctgaggccctgagtgtccagccacatggtggcaccagcaccactcctttccttaccacatcaactgattaaagcagtgaccagcaggaactgcccagagaactgg

SEQ ID NO: 6464 - DNA, 2013 bp, Homo sapiens
ttccaattccagcagccgaggccaggaagaaagggggcagcagctccaaacgattgcatttattataaacaagtgtacagaccctagactcagaaacacaacagatttgagctaagacagctctggtgaaacagtaatagagggaggaggaacacgaggtattcatgtctgggccagagctgccatccagggccccacaccccacctttggtccagatggcccattggcccaggtgtccctgctgccagaacaccgtggactggggtacaggagttgttgcatattccatgaggctggtgtcgggaagcagggactcacagttgccaggttgtccatctctgagccaatttccctccacaacccaggggtttcagtctcatatcaactatcatgtttgaaacagaaaacaggcaaaatgtttggctaaaataaaatgaaaacactgcagggaagagaactgagtgtgctggtggacaggagccctgctcacctgtgggaagggcagggccagcaagggcagcagagctccctgggggcagctaggctgtgtgtgcatgtggccctccagctggtcccaggggagatgcggggacaggggacagtccaggcagacaggtacagctgagtagggctctgcctgaggtgttctggcatcaggaggctgcctgatccccaacaggcatgacaggctccagggagcaatgggacatctgcccaaaggatcaaagtccaacttggccagatcccaagcttcgcctgcatcatgtccctggctctgcaacgggtacccccaactccggggacgagccatggcctcaagcagcagctggctacgctgccgaaaccaggacacatctgcatcacacagaaagctgcgccaccctggtgtgacaggccctacttggtcaccctagggtaagctggagaagaactccagatgtgccctggagaggcccccacctctcaggggccacctcacagggtgccccccaccaccccattctttgagtttggcttgagattttaggaagcataatttcaggtgaggaagagaacaaagtctggtcccagcccactctggcaaggattgttccccaccttgtcagcatcagaggaagccacatatacaggcaggacacacacagcacacatggggcgtaaggaaccgtgcctggacacacacagcacacatggggcgtaaggaaccgcgcctgcacaccactcacgcacacacacaacataaccaagtggcagccagagaggccagggaatgctcagagggccgccttcggggcatccatgtaggccgggttgtaaggaggctggctggcggggtagggcgcggctgctcctcctgaaagcagagaggaccctggttggctgtgagcatggtgggctgccgtgtgagtggcaggcaagcagaaaggggcagaggcctgttgagtgatgtagtttgggatgggtgcccgagggatgctggcagagactcgggaagtcgggcagggctagagttggcaggggcactcaccagccagggtctcgtggtaggccggtgggcccatgggctgggctgggtaaggtggtgggtactgcattgggtagggtgctgctggcatccctggctgaggcggcatggtgtggtagccctggtagcttggtccagggtagctgggcggcacacttggaggctgaggataaggggcatgcaccacagtggtggatgtggtggtggtgacaaccgctgcaaagagaattccagtcaggaccctcctccatctccccaggtcttgagagccaggcttgccacccatccctccagcttagccaaagcagggcctggtcagcttcccttaccaccccagggggtcacagtggggcagggtgggcacgcttacgacgtggtcggcggcacgtcttgtaaaggcagcagcaggagcaggtgaagcagatgatgatagtgacgacagacagcacaaagatggtcaggccaacggccaaggtcgctccgaacc

SEQ ID NO: 6465 - DNA, 1901 bp, Homo sapiens; identical to SEQ ID NO: 6462

SEQ ID NO: 6466 - DNA, 6298 bp, Homo sapiens; identical to SEQ ID NO: 6463

SEQ ID NO: 6467 - DNA, 2013 bp, Homo sapiens; identical to SEQ ID NO: 6464

SEQ ID NO: 6468 - DNA, 1954 bp, Homo sapiens
ggtgaaaacaaatcaatatcacatggctaccagccagtcccgcgctcagggagtgccatagaaattcaagatcaggtactcaagattccaagcaagaattgggaaaagaggatttagatgctgagcttaagagaattccttatagtagaataagtaggttcaatctctcatgcattttctcttccttttttcctgtactttcctaccgataacaagaaaaagatgaaaaggaaggtatactgatttgtttacatttccaaaatgacaaaacagattatcaacatagaaataggttggcaacattgcaaggggtgaaggattctgattcgggaaaaggtggataactacaagacatgttggttgttgaaaacatagttttgggggcctttaccatcttcaggtacagctacatgtcagagctggctgggttgtgccaagcagagaaacctggcaactctagggggcaggtgggcagtggagataaagggggttataaaaaggtagggaggtgtgggcataaaaatcaacaagcaagaaagcccagagagagctgcaggtcaagagtcaggccaggcaagcacagatccctggggcatggcagaacaggagaggacagttcgccctgttcacgaaatctgctcaagacccaagctaaaggcctagcaaagaaaggcaggaaatagctgcaaagagaagtaaaggtgtcatgggcccaggcatcctttccggaagggtcgactcaactggatgagcatggatgtccactgctggggagagcaaagagcttgatattttaatgctttggtttctctcagaagaatgaggcaggaagacttaaccgggctttgtaaattagttaacatactatttttttttctccagttttatactcttctcagttttttttttcttttaaaaaatgtgcacaaactatttgttgcagccgtgataatattcgtagtaaagagccaaaggtgctgcgtggctgggtatgcatcaggcctgggcctccgactgcacggctccaactacacagttgtttatggagaccagtcccggcctcctctgctgagagtaaaaacaggtgtgaaaggtaaggcctaagggtttcttttgtaaacctgagctctgaggctgatggacgagttttgggctggcctgccctcctcaatacagcagaaacgcttggtaataaaagtggactcaataatttacctatagtatgtaacaaagaatgcattgtctgaattatactaggtagtatattccatcaatcagtcaacaagtgtttattaaacacctctgggcttccctggcttttgctatttggtgagaaacccaactcagtaacctaatacctgcctttgtgtgtgtgtacaaaaataaatgatgcaaaattgtaagtttcaaagacttgaataactttattggctaatattaatttagcattgttaaccatcagattaattttaggcttggggcagttttagtgattgggggagaacaagagatggacttttgagttttaggtatctgtatgtatgtactttcttgacctctgttatatttctccagataagtactgtttaaataacatataaagatgtcagatgagcaatagatagataagaatggtgcaaaaaaaaatcaaaatatgaagctactgagagcaatttctgagtctcagcatactgagttttggccccaaagtgcctggggaaaatggacatatcatctaaaaagctgtaaataccagccaacaacaggaagtcttagactcctgtcccacacttctgagctgcagggtgtgggggaagccccatgcctttatctcactgtctctatctctagcaaggaaacctgtttcctgactctgcagaatttcgctttccccctttttccttaaaagcagagttacaaaaaaaaaaaacaaaaaaaaaatcaaaaaaaaaaa

SEQ ID NO: 6469 - DNA, 1954 bp, Homo sapiens
ggtgaaaacaaatcaatatcacatggctaccagccagtcccgcgctcagggagtgccatagaaattcaagatcaggtactcaagattccaagcaagaattgggaaaagaggatttagatgctgagcttaagagaattccttatagtagaataagtaggttcaatctctcatgcattttctcttccttttttcctgtactttcctaccgataacaagaaaaagatgaaaaggaaggtatactgatttgtttacatttccaaaatgacaaaacagattatcaacatagaaataggttggcaacattgcaaggggtgaaggattctgattcgggaaaaggtggataactacaagacatgttggttgttgaaaacatagttttgggggcctttaccatcttcaggtacagctacatgtcagagctggctgggttgtgccaagcagagaaacctggcaactctagggggcaggtgggcagtggagataaagggggttataaaaaggtagggaggtgtgggcataaaaatcaacaagcaagaaagcccagagagagctgcaggtcaagagtcaggccaggcaagcacagatccctggggcatggcagaacaggagaggacagttcgccctgttcacgaaatctgctcaagacccaagctaaaggcctagcaaagaaaggcaggaaatagctgcaaagagaagtaaaggtgtcatgggcccaggcatcctttccggaagggtcgactcaactggatgagcatggatgtccactgctggggagagcaaagagcttgatattttaatgctttggtttctctcagaagaatgaggcaggaagacttaaccgggctttgtaaattagttaacatactatttttttttctccagttttatactcttctcagttttttttttcttttaaaaaatgtgcacaaactatttgttgcagccgtgataatattcgtagtaaagagccaaaggtgctgcgtggctgggtctgcatcaggcctgggcctccgactgcacggctccaactacacagttgtttatggagaccagtcccggcctcctctgctgagagtaaaaacaggtgtgaaaggtaaggcctaagggtttcttttgtaaacctgagctctgaggctgatggacgagttttgggctggcctgccctcctcaatacagcagaaacgcttggtaataaaagtggactcaataatttaccttagtgttttgacaaagaatgcattgtctgaattatactaggtagtatattccatcaatcagtcaacaagtgtttattaaacacctctgggcttccctggcttttgctatttggtgagaaacccaactcagtaacctaatacctgcctttgtgtgtgtgtacaaaaataaatgatgcaaaattgtaagtttcaaagacttgaataactttattggctaatattaatttagcattgttaaccatcagattaattttaggcttggggcagttttagtgattgggggagaacaagagatggacttttgagttttaggtatctgtatgtatgtactttcttgacctctgttatatttctccagataagtactgtttaaataacatataaagatgtcagatgagcaatagatagataagaatggtgcaaaaaaaaatcaaaatatgaagctactgagagcaatttctgagtctcagcatactgagttttggccccaaagtgcctggggaaaatggacatatcatctaaaaagctgtaaataccagccaacaacaggaagttttagactcctgtcccacacttctgagctgcagggtgtgggggaagccccatgcctttatctcactgtctctatctctagcaaggaaacctgtttcctgactctgcagaatttcgctttccccctttttccttaaaagcagagttacaaaaaaaaaaaacaaaaaaaaaatcaaaaaaaaaaa

SEQ ID NO: 6470 - DNA, 495 bp, Homo sapiens
cctgactcccccttggtgcagcccagcgctgccacctgggtggatggtccccggggccctattcccagttgctccagagccactatttaggatccaggttgtgccaccaagttcaaggctggttgtgatggtgagaacagctgctttcatagaaaaatcatcatgtcctagcacagatggccccaagcaggggaagtacaatactgcaggctgcaaatccatgtcacaggtggcaaccttggtcacagagatcgggggaagggtaatgtttacaaaggaaccttttaaaaaagattttgactggagcacattggagttctcgggagttcccaaagctaatttgtgtctcctctctgactactcacgtagttttgagcaagtgcctaccttgatttttctgtcttttaatagaattgaatcatacttgctacactttccctcatcatttagcattttgagaccttgaccttttaccaaaaaaaaaaaaaaaaaaaa

SEQ ID NO: 6471 - DNA, 495 bp, Homo sapiens
cctgactcccccttggtgcagcccagcgctgccacctgggtggatggtccccggggccctattcccagttgctccagagccactatttaggatccaggttgtgccaccaagttcaaggctggttgtgatggtgagaacagctgctttcatagaaaaatcatcatgtcctagcacagatggccccaagcaggggaagtacaatactgcaggctgcaaatccatgtcccaggtggcccccttggtcccagagatcgggggaagggtaatgtttccaaaggccccttttaaaaaagattttgactggagcccattggagttctcgggagttcccaaagctaatttgtgtctcctctctgacaactcccgtagttttgagcaagtgcctcccttgatttttctgtcttttaaaagaattgaatcatccttgctcccctttccctcatcatttagcattttgagcccttgcccttttcccaaaaaaaaaaaaaaaaaaaa

SEQ ID NO: 6472 - DNA, 36835 bp, Homo sapiens
aagacttagatgcaccctggatgggaattcagaatcttcagagatcagagtccagtaaaatggataaatatgagactgaagaaagctctgtagcaggactttctagcccagagttgaaagtcagacctgctggtgcctccagtatttggtatacagaaggtgaaaagcagctaacaaaatctctaaaaggaaagaatgaagaatcaaataaatccaaagttaaggttactaagcttatgaaaacaatgaaatctgaaaacacaaaaaaattaataaaacagaactctaaggattctgtggttttggtaggctacaaatgtttgaaaagtacagcatcaaatgatctcattaaatgctttgaaggcaatccttcacatagtcagaaggaaggtctggatcccacaatatgtggatataattttgacccaaagacctacatgagacagacaagtcaaaaggaagctagctgtttgccaactaatacagagagaactgaacaaaagtctccagatattgaaaatgttcaaccagaccagtttgatcctttgaactctggcaacctaaatctttgtgcaaatttgtccatttcaggtaaacttgatatctcccaggacgatagtgaaattacacaaatggaacacaatctggcatccagaaggtcatcagacgattgccatgatcatcaaacaaccccatctttgggagttagaacaattgaaataaagcccagtaataaagatcctttcagtggagagaatataactgtcaaactaggaccttggacagagcttcgacaagaggaaatacttgtggataatttactacccaactttgagtccttagaatctaatggtaaatctaaatctatagaaataacatttgaaaaggaagctttgcaagaagcaaagtgtctttctattggagaatcattaactaaattacgaagtaatctacctgccccttctacaaaagaatatcatgttgtagtaagtggagatacaattaagttaccagatattagtgccacatatgcctcatctagattttcagattcaggtgttgaaagtgaaccgagttcttttgcgacacatccaaacactgatttagtctttgaaactgtgcaagggcaaggtccttgcaatagtgaaagattatttcctcagcttttgatgaaacctgattataatgtaaaattttcattaggaaatcattgtactgagagtacaagtgctataagtgaaatacagtcatctttgacatccataaactctctaccctccgatgatgaactgtcacctgatgaaaattctaagaaatctgttgtacctgaatgccatctaaatgatagcaaaactgtattaaatctaggaacgactgatttgccaaaatgtgatgatactaaaaagtcaagtatcactttgcaacagcagagtgttgtattttcagggaacttggacaatgaaactgtagcaatacattccttaaattcaagcattaaagaccctttacaatttgttttttcagatgaagagacttccagtgatgtgaaaagtagttgcagctccaaacctaacttggatactatgtgtaaaggcttccagagtcctgataaatctaataactctacagggacagcaattacattaaattcaaaactgatttgtttaggcactccttgtgtcatttcaggttccatttctagtaatacagatgttagtgaagatagaactatgaaaaaaaatagtgatgtattaaatctcacacagatgtattcagaaatccctacagttgaaagtgaaactcatctgggtacaagtgatcctttttcagccagtactgatatagtaaagcaagggcttgtggaaaattattttggttctcaaagcagtacggatatttctgacacatgtgctgttagctacagcaatgcacttagccctcagaaggaaacttctgaaaaagaaattagtaatcttcagcaggaacaggataaagaggatgaggaggaagagcaggatcaacaaatggttcaaaatgggtactatgaagaaacagattattcagctttggatggaacaataaatgctcactatacaagcagagatgaactaatggaagaaagacttacaaaatctgaaaaaataaacagtgactatctgagagatggtataaacatgcctactgtctgtacttctggttgtttgtccttcccgtctgcaccacgagagtctccttgtaatgttaaatattcttccaaaagtaaatttgatgccattacaaagcagccaagcagtacttcttacaacttcacttcttcgatttcctggtatgaaagttcaccaaaacctcaaatacaagcgtaagtaatggaacgtaatagtacctgctgctaaatatatacatatatatatacacacacacacacatacacacacacacacacacacacacacacacacacacatatatatataaaatcatagatagtgctaaaggattgagtgtctattttgttgtctggtttctgtaatacaaaagtgcttctttgatgactatccgaaatggagaaatgaacataatatacccttggccagacagacctatagttgctgaatgatcgtgctgttctgctgttctataggatagacattcctgatacagattttccaatggtagttttgtgttagaagtatggaataactgagcttaaaacccttttttcatcagtccctcatttctcctccattaacttccagacaaaagccaagttttatgagtttatctaggaaataaggataatattagttaaatgagtaacagggtagtggaaacttcttgaacttaccagatgctgattgccttcagctaagtcattggtttccagaattgagatttcatgtaccagtaaaatatccagaaaaatctggcgatgatacaggtttaccagcgtgcactggttcttaaaatattctattgcctcagccagactgagtcataatatttggggtaagaggtcttggcatgtatatatatagagagagatttttaaagttcccagattattctgatttatacacagaaattaagatacatagtgtctaaagctagtgaaaccactgaggtaacaatagccaattaaaaaattgtgatatgcagggaaaataaagtttatatcaccgtctggttacttcagattgtctgagtcatcagaaagcaatgatctctaatatagactttatatatttttggccagcttatcctactcagtttagtgttcatcaggttcctcttccagcttcactttatcagtccaaatgatgtatgttaaatagttaataatttttgatgtttgcaatccccaaattggttagattgtccgtcattgcaaacgagtatataccactaattgtatgcagtcacattcccctcttcgttctgctccttcttattggtatttttagagaaaaatacaaataacctaatctgctaaatactgtaactccattctcactgttacattttgtaaatcactccttcccttccatttatgcaagattaaaaaggagcaaaggggataagatttcattacaggataaacatcagattatcacctctccagtccctctcccagcttttctgtgcatacagtgttaaattttgcagaaagtataacttcactcagaatgttttcttagagttgatttcaagtttaaaagaatattttcaagtgatttcaggtttaaagtgttcattgtatttgatagaatatgtactacaaataataaagaaaattactctctgatttctaaatcacttaggtgatgccacatattttcatggttttaaaaccaaatattgttgggtttccacttctacaattctctaaattcaggagggttctaacaactgaatatgatccttagtaaagagtatcttttgtattttgcttcagcttccttcaggcaaaagaagaactgaagctactaaaacttcctgggttcatgtacagtgaagttcctctgctggcatcctcagtaccttattttagtgtagaagaagaggatggttctgaagatggagtacatctgattgtctgtgtgcacggtttagatggtatgtgacatctatggatgtaacccagagcaactcaatatatttttttcctaatagatctcatttagtttcatttagtctttgaactaaaaaaagattttttaattgcttaaattaattgaatcttaaatgcattctgaaacagaaatatgcttaattttaattatcctaagtgtaatattagattccttcgtaagtaaattttccatggaactgacactcatgtgccaacattttgtttaatttgggattttttttttcattatactttaagttctgggatacatacgcagaacatgtaggtttgttacataggtatacacgtgccatggtggtttgctgtcatctacattaggtatttctcctaatgctatccctcccctagtcccccaccccctgacagtccccattgtgtgattgtccccctccctgtgtctatttgttctcattgttcacctcctacttagaagtgagaacatgtagtgtttggttttctgttcctgtgttagtttgctgagaatgatgatttccagcttcatccatgtccctgcaaaggacctgagctcagtggatttttttttttatcttctctcttattgttggttttgccagctgtcacctcctggcagttattttgtctccctttgatagtctttctggttcccttttacctggctgctttaaactttgtgtgctagaaaaatcggtatttctagaagttaaaatttcattaattaagttataaaaattaaattataaatacaggtacctggctttagtgctggggttttatgacagctgttttggttactcaacagtttttttttagatgtaggaactgttagaagatgccaaatatctctagaacaatgcaatattactgtattatgagattctatagcagcaaactagatttttgtggattatgaaaatattaaacaaatgtccctggtactaaattgtcataaaattggagatttttctttaaaaaaaaaaaaaaaaccagactctcaagaaataaaatattctcaatgctaacttttcttccctccctccaaacaataaagtcttcaaagaattatcccccaagaaagacttctggacccagaatctgccagaatctctggcaaattcttttttaaaaattttaagaagcaaattatccctatgttacataaattgttctagaacaatggagaaaaagatagaaagcagcccattttattccttaaagttaacctaaccttgttaccaaatccaataaagatatcacaccaacacctgccgccaaaaaacagtagaccagtctgacataaatatacttaatgggccgggcgctgtggcttacacctgtaatcccagcactttgggaggctgagatgggcggatcacaaggtcaggagatcaagaccatcctggctaacacagtgaaaccccgtctctactaaaaatacaaaaaaaattagctgggcgtggtggcgggcgcctgtagtcccagctactccggaggctgaggcaggagaatggcatgaacctgggaggcggagcttgcggtgagctgagatcgcgccactgcacttcagcctgggctacagactaagactacgtctcaaaaaaaaaaataataataatgaattcaaatatatttaaccaaactctagcacttggaattaatatattagagtaagttactataacaaataaggtttatttcccagaatggaaggataagtaagtataaggaatttcagtaataaaataccctacatcagcaaatcaagtaagaaacttcataaaatttaatatccattcctaattattacagtaagcacaaaactttgatctcaataggattagtctatttccttaatgtgattaagcatatatatttcgagcctatagaaaacttatagtttttggtgaatattagaggtacaacttttaaaatgaagaataaaagaattatctctgtcaatgcattaaatcataaaattctaaaagataaatatcaggtaaaataaaaattcagcagtttataacgacatgcttatattgttagtaaaccaaaggaatccactaaactatttttgaagataattatttttatatttatatatgagaggaattcagaaaaaatgtggaaaaataaatttgccaggcatggtgctggccagcctataatcccagctccttgggaggctgaagcaggagaatcacttgaacccaggaggcagaggttgtaatgagccaagactgagccgctgcactctagcctgggcaacagagtgagactccatctcaaacaaacaaacaaacaaaaattgtggaaaaatagagttaaaagataaaaatagaaatataaacttcatttctcagtgcaaactctgtctagttcaagacacttttgtaagcaattataccagccattctagtaaatttccaagaactgagggtcctgggaatttagtcatgtcagtgccttcttttttacacattaaaccaaagaaaaatggatcccctttacagagtttttaagataagaaaacaaagtagtcagaggaaccaaatcaggactgtaagatgaatgcctaatgatttcccatcaaaattgccctcttcatgagaataatgagtaggaatattgtcatgatggagaaggactctctggtgaagcttttccaggcatttttctgcaaaagctttggctgattttctcaaaacactctaatgataagcagatattatcattctttggtcctccagaaagtcaagaagcaaaatgccttgagcattccaaaacactgttgccttgacctttgctcttaactggtccacttttgctttgactggaccgcttctacctcttggtagctattggtttgattgtgttttgtcttcaagatgatactggtaaagccatgtttcatttcctcttacaattctttgaagaaatgctttaggatcttgataccatttgtttaatatttccattgaaagctctgctcttgtctgcagctaatttgagcacaatggttttgacacccattgagtggaaagtttgttcaactttaatttttcagtcagaattctgtaggctgaaccaattgagatgtctaagatgtcagctattgtttgtgctgttaattgtcagtcatttttaattagggcatgaacaaaatgaagtttttcctcacaaattgatgtgggtggtttactgctgtatgcttcatcttcaacattgttttttcccttctttaaacaagttacccatttgtaaactgctgatttctttgggggcatttcccaataaacttttttgtaaagcctccgttatttcaccattcttccgctgaagcttcaccataagtgtgatgtttgttcttgcttccattttagcagaatgttgtttgataaggtttctttttaaactgatttctttttttttttttttttttttttttgagacagaatctcactccgtcagcagtggcacgatctcggctcactgcaagctccacctcccaggttcagaccattctcctgcctcagcttcccgagtagctgggattacaggcgtctgccaccacacacggctaattttttgtatttttagtagggtttcactgtgttagccaggctggtcttgatctcctgacctcgtgatccacccgccacagcctcctaaagtgctgggattacaggcgtgagccaccgtgcccggcctcaaactgatttcttatccttcttagtgcctcaaactagattctgttcaaacatgttataacaaattagtatgtgtttattttggtgtaaaaaatttttgaaacccatacgtagttttttttatgatgcattttctatgaactttttgaagaacacttgtgtcttatatctgtattgtaagtatatgtgtagatgccttttgagttaattattattaaaataaactttcttagatatttaaatggatttttatttttctcagtctgtgccagtatcaccaaaggaaggtcaacagattaaatctaaaatgcattcacagtttgctgtatgattacctagaatggtgatggtaagacaccatttatagctactgtagccgggagtcaccaaagtgatgtgctaacagtttgataaataaatacactgttaggtagaaaagtgaaagccaccaaaaccacctaagaaacaaactgttggccaggcacggtggctcacgcctataatcccagcactttgggaggccaaggccagcggatcacaaggtcaggagatcaagaccatcctagctaacacggtgaaaccccatctctactaaaaatacaaaatattagctgggcatggtgggatgcacctgtagtcccagctacttgggagcttgaggcaggagaatcgctcgaacccaggaggcggaggttgcagtgagtcgagatcatgccactgcactccagcttgggcgacagagcaagactccatctcaaaaaaaaaaagaaagaaaaaagaaaacaaaaactgttgaattgacattgcctggctaatagaaatcagctttgacataaaaattgagaactctatttcattgtatattgtctgttcacaaatggcataggccataagcttgtctctaaaaactgtaaaaatatgtgatggtgtactttctaccttttactttatctcatcctttaaacatcatttttcattttttaggaaacagtgcagatctccgattagtaaaaacttacattgaacttggattgcctgggggaagaattgattttcttatgtctgagagaaatcaggtacaatatgacagtgttttcagtgaaaacaaacatttttgtaccagtttctacctaaattttgccttactacaaaatgcctgtaatagtagaaataatttttctgatttctatgaaatttaatataaatgtatatccaaaggaaatatatatgatttacattttgacttatgatctcttcacatatgaaatatttctagaatttcacatttctatagaaatatttcattaattaaaccattgtaaacatcttatgtttcatactggtagtgagctaaacaaacaaataatgcaagtattttaagaacactgaacctttttttcccctagaaatttactctctttgctcgttttaagataaaaaaattacactcactaacttctctataaaacattgaacttaaccatactttcagtacctaaattaaaaatgtttatattgttagtttttcatgtgattatacatattcccaaatataatgtatgtgctttgctttctttttagaatgatacttttgctgattttgatagcatgactgatcgtcttttggatgagataatacagtatattcagatatatagtctaacagtctcaaaaataaggtatcttctttaatattatgcaatttatttttatatttctatgaattgtataaaagttaaacagaatttgtgatagggttgtcctattctgaaatataggagactacaactcaaattaatttatagtgaaaaaaagtaaagattttagggaaagatttatatgaaatgtccaaaaaagtgtatctgtagagaagaaaataggttagtgtttgcttagagctggggaagatgggggatggtggggataactacaggatataggatttctttttgaggtggaaaaaaggtcctaaaattgattatagtgagagttaaaactctgtgaatatattttaaaacattgaattgtacactttaagtggaagaagtataggctctgtgagttacatatatgtatatgatatatgtatatgatatatgtatatgaagcaacaaaaatactttcaaagtttgtatactttttttttttttttttttttttttgaggcagggtgttgctcagtcacccaggctagagagcagtggcgccatctcggctcactgcagtctcaaacccctgggctcaggcgatcctcccacctcagccccccaagtagctgggattacaggcatgcaccaccatgtccagctaatttttgtagagatgggggtttcaccgtgttacccaggctggtctcgaactcctgagctcaagtgatcctctcaccttggcctcccaaagtgctgggattacagatgtgtgccaccttgcccagccagattttatgactgctgtatacttttgtgagtcagttttccacaagcaagacatgatgattacaccagtatgagtttcattatttaattagatcttgttaatagatgtaggagagaagagtctttgtttccaaaagggtagaataaactgactatattcatatcccaactaggttagaggaagaagctggttctgcatactgtaagcttttgggcagtttgtttccaactcgaagtatagggaataagaagagagataagcagtttctacctaaagtcattttttaaaaaacagaattctgttaaaatatgggagaaggttcaggtttgttgtttggaggaagagattattttcttgttgtaattattcatttgtggatcttaaaatcttgttagcttttattcatttattttatgatgagaaaaataatatttcaacttatttattcctcctcaaaagtattgtctttcaggttagattgtcagttataatcaatcattttccagaagtgtaatctggttgattgtagactgtcagctaccatcagaattcccacccccactactttaggaagttcagttcgggagggaagtttgtcctgagcgtctcgcaagatatacctgtaagccagtgtttagacagctctcaagctctctttcactgctaattgtccccagggaatcttataccatctgttgtaaaataacagtaagtaaacaggctattttgatttaaaccaggggtccccaaaccctgggccacagactggtacctgtctgtggcctcttaggaaccagacctcacagcaggagcactggggcgggtgagcaagcattaccacctgagctcagcctcctgtcagatcatcggtgagcattagatttgtgaacgctattttaaactgcccatgcgagggatctaggctgtgtgttccttatgagaatctagtgcctgagttggaatagtttcatcccaaaagcatccccacaactcctgtttgtggaaagattgtctttggtgaaaccagtccctggtgccaaaaaggttggggaccactgatttaaaccatttcataacaaaagtgaagtgctagctacataaatattattctttttgcataatcgaagattcatagtaggaaaatgcatatattttacctatgccttgaaaatattgttagtcaaaaactgtccatctttgaagtatagaccagagaataagagaaacagatatataatttccccaagttgtcgtttataaatacaatttcatcattttgtttgaaatgatgaattaagaagtaaataatttgtgtatgtacctaagaaggcaaatatgtaatctagtcattatattattatctttaatacgtacttatatctaagcagttacaaactatgagtaaaagttttcagattaatatgttgtttctataaacatttaaattatgtaataatgaggatcttctatacattctcacattttttccttcaaaatgtggtatatcatttcaaagtatcactatacttttacaacattagaaattttcaaattgttagtattcacatccattttatagtggatcagctttgatttttgtttctaaaactaatgctgtgagaaaattaatttttttttcctcttaaagctttattggacattcgttgggcaatttaataattcgttcagtgcttacaaggccaaggtttaaatattacctcaacaaacttcatacctttctgtctctttctggacctcaccttggtacactctacaacagcagtgctcttgttaatacaggtaaaaagttttattgttctgtattaaaaatatggaatagggagaaaaatatgaacttagtattttctggtgtttattttagaaccagtttgtcacatactggaaatttcgtgaaataaaaaatgtagctaattttctgttttgttatgcacatgaaataagttgataaaagtcattttagaaaatggcttttcttatattgagatggtatttgtcaaaattcacaagagcatttttttctttttttcattaaattctaaatatttttagtaaagttttatcttataaacagttttgtcatcccattacttgaacagataacaaacacctacatttaatacattatcaagttataacattttatatagaatattagctaattttggttcaaaaagagtaaagagatatgagaatataatttttacgaaggtgattcagaatttctgaagaagttaatatgaaagttaagaccctaaatttgattagtatttatattctcatcaacaaatatttggtactttgattttttttttttttttttttaggacagagtctcactctgtcaccaggctggagtgcagtggcgcgatctcggctcactgcaacttttgactccctggttcaagcgattctcctgcctcagcctccggagtagctgggattacaggcatacgccaccatacccagctaatttttgtatttttagtagagacggggtttcaccatgttggccagaatggtcttgatctcctgacctcgtgatccgcccgcctcggcctcccaaagtgctaggattacaggtgtgagccactgcgcctggccttgatttgccttttgtttggcttggtttttcccttagatgtttgcaaaaatgatctataaattagtcaattgattcccactgtgagaataaattatatttaactctgtctcttttcattgatccctgaaaatcttattgctatttcctttaccacttccttttaatgacaaaccataccatttttcctgtatcccatttcaagttggtgatttaaaaatacagccagttctagacttctacagtttgaaaaagaggaaatgagaaaaatgaagtccttaaataatgtataatagaacccaacatgaatcgaatgtagtactttgaatttcattcttcactaaactttttcccagatatgtttccagctatcagttttaaccaattaaaggattgttttcctttaattttctcctgtttccctaatattagaagcaatgaaaatggaaaagaatatttcatagtcttgaaaaccaacttgagtgattgaaattttgcttaatttcctgaagagcaagatgcatttaaatatgggttactgataatataaaaaaataattaatataaaacaaatgatattcagctgttattagaaaacattaaacaatttttcattctaagatgtggtctgtttgcaattagtctattatgtcataactaaactgtaattatagactgatcattctgcataggcatttgacttactactgtatttgaagtttttcttcatcttcttctttatcatttgaacaaatatattgaaaggtataatttttccagtttgttcttcatatgctattatctgtttcattactgaatgaaatagaaatagcaagctgtccatcaaccaccattaattcataattaacctaagcatgcatgtttataaatgttatcggaacatggaaatattttccaaatatatttttgattagccaacaaaaatgctaatttaggcaatgtcatcttttgaagtgaaatatatattaaaattaataatcttggcatatgtttttatatatttcatttcatacttctatatcatatatgactctctaggtctctggtttatgcagaaatggaaaaaatcaggttcgcttttgcagctgacatgtcgagatcactcagaccctcgccaaacttttttatataagcttagtaacaaagcaggtaagtatataataacagtttggaaaatatacatgtgaaaactttttaaaaaataaacatttagcaaataaattatcaacatgtctttctagtggttaaaaaaaagtgtcattctactgtaatttcctaataatgaaacagcaaactcagaactgaaactaagcagttgaaagagatttctttagtctttttcacatgactgtatttctcttttgtgagctacacagctactttgaaattgccctaagaatttcaacatttgtaactcagtgccagttttgttagtctatgtttttagaccatgtttctgcatgtcctatccccgctgttctagctgtctcccaccccaatcctcacccctttttataaactgccacgtttttctaccttcatattatgttatgttatattatattatattatattatattatattatattatattatattatattatatggctagcaagcatttctgaaagtgtcagaaactaaactattaatgattatcctttctacaattctcactactggataaatcttattacttattttttattaactaattattaaacatattccccatcttgcatatatattccaggcctttacaacctaaagttcccaactgctcctttgccatttttactgtctataaataaccttacttctgaccttatgatctccctcaattcaccctcatacatcttcccagcatattttttccagtgtcctttgaaatcctcatttgaggggaacagactgcctttattttcttcgaagaatgttattgccgcttacttctgaaagtggagacgtaactgaaacagatttttttcttcccctcctcgcccccatgtcttcactcccctggctacagagtggagtttggcaaacttttttttaaaaaaggccagatagtaagtattttggttttgtaagccatacaatctctttgcaactacttaacaataccattgtagtatgaaaacaaccacagaaaatacagaaacaaatgagcatgactgtgtttcagacaaactttattaattcaaaaacagcagtagccaaatctcacaggccatgtcttgctaatacctgctatagaagctcagttcgtcgtttactaagtaccacctaaagtaaggaaaatagccctcttgctttccatttctaattgcaatcattactcctccactgttatataaaaccactttatttgaggcttgtatcatccaagctgtgctaccatctattattctttaatataatgacctcctggttatcccaggagaataaaagacattgacacggccgggcgtggtggctcacgcctgtaatcccagcactttgggagcctgaggcgggcggatcacgaggtcaggagatcgagaccatcctggctaacacggtgaaaccccgtctctactaaaaatacaaaaaaattagccaggcgtggtggtgggcacctgtagtcccagctactcgggaggctgaggcaggagaatggcgtgaacctgggaggcggagcttgcagtgagccgcgatcatgccactgcactccaggctgggagacagagtgagactccgtctcaaaaaaaagaaagacattgacaaatgtttgtaacatgattatgtttgggaaaagattctcctcttgggtcttaacgtacttagatctggaatcatttttggtaatttgatgagtcaaccctttagataattcattatgcatcaccatgcctttctcaactccagtgtcccttcattccactccatgttgaactcatacccacggctacactgtagtcctgaaatttcagccaacgttccattctgttactgtgatgtcttatccttctttttctctcactcccttctcatctgctttttagactcatttatgattcctgctacttttttttttttttttttttttttgagacggagtctcgctctgccgcccaggctggagtgcagtggcacgatctcggctcgctgcaagctccgcctcccgagttcacaccattctcctgcctcagcctcctgagtagctgggactacaggcgcccgccaccacgcccagctaattttttgtattttttagtagagacggggtttcaccatgttagccaggctggtctcgatctcctgaccttgtgatccgcccgcctcggcctcctaaagtgctgggattacaggcgtgagccaccgcacctggctaattcctgctacattttcttaagtctccctcccgttcatggttttactcccttcctgactcaagtctcagacttcatggattacttttgtctttcatgtattactctttgtttttctatcctagtcatcttgcaaatctatattactgtttttatacctagcctttgatctcttccaaaaaagatcacacagacatgcagaatcagcagcactgtaggtccacagggtccctatctagttatctttagttagcttcctatctattcccttagacactctcccaaagtttcacctttcctcaaacatcaggttttcactgctcccttcatttctcacagttagctttgcttttgctttctactttatctttgaagttcaagacatttctttctacctaccaacattaattaacctatgttttccttttagttcagtgaaagatttataatctgttcaagaataattaccctctctgttttggaactcataccttctcatcagtatctttaaactcttactctttcagtaattaatcctttaatagataaagttattcccatttcttccatcttaataataataataaatatttctgttgatctcttattctgtacttgtccccctttcccctttttctgagagtgttggggggtagggttgaaccttttgaaagaacagtcactttattactcccccctttttttcacttttttggtttctgtctgcaccactccactgaagcttgccaaatccagtgatctctttgcttttatttgaatattaagacatttaagactactgaaaactccttcttgaaatattttcctttctccatttttgtgggatccacctctcctggtttttttccatcttggctttttttctgcttcctatatgggtttcttttctttccttgcccctttatgaaagctgttcttgtgttttagcctctgtcttctgctcttctcactctgtacattcttcttggacagcatcattccatatccatctttaccattggtagctctcaaatattaatatatatctctagcttgtcctctgtgctgtgctctagacttatacacctagaggcttacttagcatcttcatggagatgtctcatgggtgcttcaaatctagtgttttcagacagtgcatctgtcccctgattacttctctggattccacatctactggaatggcatcatctgcctagtgagaaacttagaaagtgttcttgactctgctttcttatttataccccatatctacagaattgccaagttttaaaacatttaaccttcttagtggctgatggatgcttctcttcttctttgccactgccttagtttagccttcatcacttttatttaaattattgttcaaactggttaccctgccacatgtatacccccttctccccattctcacttcctcgttagacgaaatgatcatccagtgaagccatagattatattggccatctaatatcaaaccatattggtctcatttgaaaatctttcatgatgctttgtggtattcacagtgaagtttagattccatggataagagcatcaagtcctctataatctggtctctgattctctgttttctttttatcctgcacacacacacacacacacacacacacaccctttgctgtggtcatgctattcatggtttttgattgcttgcattttctcatgctttttgtatcacctcatgtgtttttgtatcatgtgtttttgtatcacctcatgtgttttgtacctcctcatgtgtttacccatcttttcagaactaattctgtttaccttctaaaattaaactctaatgccacctgctatcaaaagcttttcttgatgccctatctgatttaatgctcctctactctcagaatactcgctgtatacctttggggttttttgagacagggtctcatgctgtcacccaggctggagtgcaatggcacaatcatagctcactgcagccttgaactcgtggatcaagcaattctcccatctcagctgtcccatatatacttttatgtccccaatcttatgtctccaggactgattttattaatgaatttcaatcctcatttgcctgctagacatctcaatttacatatcaaactgaatatgtctaaaactgtatgtcttctttggccgcctctcctgttgtcctttttttaatggtactgttctctcaattactcctttgaaacaccttagggtcatctttgattgacctcacttctttgcctcccatgtctcaaaattgttaatattatctctgaatttccatagcattatatatcaaccttttaccatactcattatagtttatctcatgtcagttatttttatgtattaacttcctttccttaagtaggatctgtcatgactactcattcccatttcccacatacatattcagtatgtaccatagctcttctagtgtacaccgattgaattaacaaatgaatcaatgatatttttaatattattttcaatattcaaaaacagtttaaatattatatagtaagatgtaaatctagcccatatattcagcgactggtagttccaagtctgaagttacttgaatttgtgaacttaagccctggccatttaaacctacatctgttcttatcctcattcctatcacccatgtcttccattctactcttgaaatatttgatattaatagatttagttattgaaaataccactgcttttgagtcctgttttagctttttcaggattctgccttaaatgttgttcttaatatgagaaagagatttgggaatgattattacatgtactgtctactattagaatcagtgaaaggaaaattctcttatagattgggttttatgattttgtttgtaatgatacagagcatcaatggtaagtttcttacagtatacagaaatatatacttgattgatcaaattacaaaatattcctacaaaatgaaacatggcatatgcttcttatgtgagaaaaacaatattagctagaaccgttgtgtggagctatggagttcataccctttgctgacaggttaggaaatacgtgaaaggcaaagctgaacataagtgttcctgaggtctatgtctttatacagcattatacaaagtaacatttaattagcaataataatagcaacataagaatatctaaactgtaaagaaaatataactgtaaagattagttcaatttttttcttttaagttattaatttattatttgccttatagtgcgtgatctggttgtactagtctaaaactgttaagaaccaaactctgacatcacacataggtattagttatagttcaaacactgactaggctacctaatttaaataaactcgtttccttattggtcaatgagaatagtagtatctcataagattattaaaaggattaaatgagataatatgtgtaaagtgattctgtagagttcaaaacttagtaaatggtaaaaaaaaaaaaatgaataaatgacttaaataagctaggtgcggaaatatcataagctaggtgcggtagctcacacctgtaatctctccagtttgggaggctgaggcaggtgaattgcttgggcttaggagtttaaggccagcctggacactgggcatggtggctcacgcctgtaatcccagcactttgggaggctgaggcaggcagatcacctaaggttgggagttcgagaccatcctgaccaaccccatctctactaaaaatacaaaattagccaggcatggtggtgtatgcctgtaatcccagctactcgggaggctgaggcaggagaatcgcttgaacctgggaggcggaggttgcagtgaaccgagatctcgccattgcactccagcctgggcaacaagagcaaaactccatcccaaaaaaaagaagaccagcctgggcaacatggtgaaacctcatctctacaaaaaaatacaaaaattagctaggcatggtcatgtgtacctgtaatcccagccactccagaggctgaggcacaagaattgcttgaaccagggatgtggaggctgcagtgacctgaggttgtgccactacactccagcgggggatagagccagactttgtctcaaaaacttaaaaaaaaataaagcccactagcgctaggcacagtggctcacgcctgtaatccccgtactttgggaggctgaggcaggtggatcacctgaggaaaggagttcgagaccagcctggccaacatggtgaaaccccatctctactaaaaatataaaaattagccaggcgtggtggcgggtgcctataatcctagctactagggaggctgaggcaggagaatcatttgaacccaggaggcgtaggatgcagtgagccaagatcgcaccattgcactccagcctgggcaacaagactgaaactctgtctcaaaaaaaaaacaaacaaaaacaaacaaacaaaaaaaaccacgagtattatagattacagaaattgacttttacacaaacaatatatatctatcttaggaaaatttttttaacagaacttttatctaaatgctgatattactagctataaaaattatttgaatgacttaaaattgtttttatgttttaagatttctctttgtactcacgagtttattagtatatacctgaattgaattaatatccattctgggaaaaaacactaaagagtactattttctggctgggcacggtggctcatgcatgtaatcccagcactttgagaggccaaggtgagtggatcacctgaggtcaggagcttgagaccagtctggccaacatggtgaaaccctgtctctactaaaaatacaaaaaaattagtccagtgtggtggcgcacacctgtaatcccagctactcagaaggctgaggcaggagaattgcttgaacccaggagttggaggcctgcagtgagccgggatcctgccactatactccagcctgggcaacagagcaagactccatctcaaaaagaaaaagagtaccattttctagtaattgtgactaatgcattggttaatactaaaatactggaaaaataataatagctaatacacatgtaacatttaccacgttctaggtgtgatttaaacacatacatattagcttatttaaccctctagggtaggaatattgtccccactttgcagatgaggacactgaagcacagagagattgaatgacttgcctgaggtcacttagctttatgaaaagccagtaagcattcgtgcatggttcacactgcatcatgttaagccaataatatacattttcaggaacttaaaaagctacttctaatagcacttttaaatatcaacaagtatttcaattgattttaaaattacgttgtagagattgaaacaagtctctcgaactatttcatgtggggtgttgggttttggggtttttttttcgggggggcatatctagtgaattgtgagaaatgagtagtccatccctagaaagttgctatgcctgtatatttacatataattactttattcacaaaatagaatatataggttcacagcaaacaaataagttaaataaaacaggaaaacatagaacaaagaaaaagagtacttaaccaatatgctattctcaagtgttttaaaacaatcaaaagtgatcatttcttttttatattttattattctaaagctacagtcttggatgccctggtttgattattgcttcagtttcttctgaacagcgaattttccgttcttttggaaaagcctaaaattacttgtctaaatcaaaatccagccatttgcccttttgccttttttatttaagcaaagcctcttctgtgggtcttccttttgaaacagtctttttctatgcaacatatcattagttaatagctttccttttattgaaagctgttcattattttaaaatgaagaaagctttttaaaagcctaaaataatttgtgtgttttgtaaaacaattgagaaatactgtattttttataaaaatcataaatgtattgggtgagaaattaccttttttgtgaacacaatagatctggtaaagggttacagaaatgttacttttaaagggaaattatctattttgattaaggaattacaattataaacattcattaaatttttatagcaacttttgacaaaacctgtggtattctacagattgctaacagaatatgtaaataatttgcaggtggcatacaagcatctcagcattggatagcagggaaaagaaagatgaaggagctagagcaatgtggaaagtaaaataaatgtataatatatagacattagatgacagcagtgttgaagtagtcaagattatattactaaagcagagagaggaatcatggccactctgacattccataatgagggctcaaaatagccaaaaaagagtctattcattgttggaatttcaaaaacaatatatccttattttaagatcttcctaaaaatacctgcttagagtctttttaccagctgttgaattctgacaaataaagtatagaaattaaataaaggtcctgctgtcctactgtggcacaaaggactctttgtatccaggaggttacaaagggatttaatcttaggtatcacttttgatatgtaaataatatgtatattttgtttctgaaagtgcgggaaagaaccagcatcagctaacattattttaggaagaaaattcattcaaatttatttaaaatgagtaaaaataagaatagtttaatattgttaagaatatgttttaaaagtacagagttttcttagcttcagcactattgatattctgggctggagaattctttgttttcaggggttgtcttgaacattgtagcatgtttagcagtatctctggcctctgcccactagatgccagtagcacatacacttttccaccttcagcagtgatgaccaaaaatatcttcagatgctgcagaatattccttggagcagaaaatcaccagtttagaaccactgctttagccagttccagaaagtaaacacaaaatgactcaaagtgaattgcattaaaactctgaagttttagaacaaatgagtagccagaagaattggaaagactttagactatgaagatgaaagtttcaattaaggtgttcatatatcaatcatgttattatatagtccagagcaatatggaagatttaatctttttcttggtaaaaagtaacaacatacttacagatttttctggttaaaccatgtcatcctataaatagggaaatcttgtcactttcccaaattaaaggtaaccgttcaacaaataattagccacttgaggggctcagtgaagtattcacccacggactagttaactacgttgtctttgagaagctagaatcaaggtaggtgtagaaaagataaacctagaatattagctcccaaaatagacttcagacatttttgttggctgtacttcaactcagatgaagtactgctgtaattcctaccagcactgctcctctggagcttgctgtgcttcactttgagtttctgccttctgtagccaacactggtagacaagaaattgaagccaaaaggttcaaaaagggccataatatatttaactaacttggttcttggctaatataaaaagcaaaccttctgtgcaaaagcacaatatcagtattaatacactttttttaaataactagaaaactggttaccaagtttaaaatgcatttttaaagtacagtactgtcgtaagaatcacatttagaagtgtaacaacatagtgtatttaatcagtatcagaatttttaaatttattttatcatcatggaatctgagagtgaaagggtatctttgaaatcctctgactaatctttactgattttgcctgcttccactgagctgcgtgaacatgaggagccatagacaccctgcagggatctcagtctaaagcagtaattccaaaccttagtgttgtttctctagagaagtacatcagaatctctgtaaagagctattttgaaaaatgtctttaatataattttatgaagaaatatataatgccttttattcttacaaatatagaaatcttttaaaaatcttaatcagtgggaaatttgtgaggaagttttaatgatcatgtaatctggcaaatacataattcattcacagaccacacatctggaggtgacaggtaatattgtttatgcctgagtggtataatgtgtactgctgttcctaatacataacaacccaaaagaaaaaaatggacaaaagagaaaagaggcagttagctaccaaaaaataaaattaaaaattaaaaaatatatatatatggaaggccaataaacaataagttaatcatttttgccattaggttggtaaaatttaaaagatgctatacagtattgatgagtgtgtgaaacagaaaccttcatatattagtggtggaaggagaaattttattatctttttggagagtacatttatcagaattttaagaacatactcaacaattccacttttggaatttttcctacagaaatctcacacaatgaggtaaaggctattcattacagtgttatactttttttatgtcctctcccttctgaagtggaatcgacataaatgtcctttgctagggaaataggagacatactaaaagttaatcctggtaattccatgtagtagttaaaagaatgagataaatttatttatacaaacatgaaaagctgtccccaaaatattaagtgaaaaaagacataaaatagtataaatactataatctcagttatatttttaaaatgaaaaataaattgtgtgtataccaagaaaggaatttgggacaaaatacagacatgccttggagatactgtggatgtggttccagatcaccataaaaaaaggtgagtcacatgaatttttttggtttcccagggcatataaaagttatatttacactatactatagtcaagagtgtgtaatagcattatatctaaaaaaaagtatgcatactttaattttaaaatactttattgttaaaaatgctaatgattatctgagccttcagttaatcataatgtttttgccaatcagggtggtggttgctgaagatagaggtggctatggcaatttcttaaattacaacaacgaggtttgctgtattattgactcttcctttcacaaaagatatctctgtagcatatgatgctgtttgatagtattttacctgtagtagaacttctttcaaaattagaatcaatcctctcaaaccctgccactgctttttcaactctttatgtaatattccaagtcttttgttgtcatttcagcaatgttcacagcatctttaccaggcatagattccatctcaagaaaccactttctctgttcatctataagaagcaactcttcatctattcaagtttgatcatgagattgcagccattcagtcacatcttcaggctccacttctaattgtagttctcttgctatttccaccacatctgcagttactttcttcactgaagtcttgaccccctcaaagttatccatgaaggttggaatcagcctcttccaaacttctgttcttgtagatatttgacctcctcccatgaatcatgaatgttcttaatggcatctgtaatggtgaattttttccaaaagcttttcattttactttgctcagatccatcaaaggaatcactacctatggcagctatcaccttacaaaatgtatttcttaagtaataagacttgaaagtcaaaataactaatggatcacttgggctgcagaatagattttgtgttagcccacatggaaacatcattaatctccttgtatatctccatgagaggtcttggttgagtagggggattgttaatgagcagtaatattttgaaaggaatctttttttctgagttataggtctcaactgtgggcttaaaatattcagtaacccatgctgtaaacagatgtgctgtaatccaggctttgttgttccattaatagagcacagagtagatttcatataattcttaagggctccaggattttaggaatgataagtattgatttcaaggccccagctgcattaatccgtaacaagagagtcagcttgccctttgaagctttgaagccaggcattgattcctttctatctatgaagtcatggatggcatcttctttcaatagaaggcaattttttcaacattgaaaatctgctttttagtgtagtcttgtcatataccttagctagatcttccagataacttgccatagcttctccatcagcacttgctgcctcaccttccacttttatgttatggagacaacatctttccttaaacttctgctggcttccagctgttctgtgcagcttcttcacttctctcagccttgagataattgaaaagagttagggtcctgctctggattaagctttggctaagggaatgttgcagcaggtttgatctttcatccacgccatccaaaccttctccgcatcagcaataaaactgttttggtgtctcatcatttgtgttttcactagagtagcccttttaatttccttcaagaacttttcctttgcattcacatcttgactaactctttggcacaagaagcctgcttttcagcgtgtcttggcttttgatatgccttcctcactaagcttaatcatttctagcttttgatttaaagtaagaaacagagccaggcatggtggctcacgcctgtaattccagaactttgcaaggccgaggctgggaatctccgaatcctaggagtttgagatcagcctgggcaacacaatgagcacctatttctacaaaaaataacaaaaaaaatacccaatgtgctgtcgcatacctgttgtttcagctacttgggaggttgaagtgggaggatcccttgagcccaggaggtagaggccgcaatgagtcatgattgcaccactgcactgtagcctgggtcagagtgagaccctgtctcaaaaaataaaaataattaatgtgagagacgtgacttttccttttgcttgagcatttagatgccattgtggggttattgatcagtccacttcccatataattgtgtctcagggattagagaggcccaaggagagagggagagagactggaaatggccagttggtggagcagtcagagcatagtccataagttcactgtcttacataggcatggttcatggcattgcaaaacaattccaatagtaacatcaaagatcactgatcacagatcaccataacagatataaaaataatgaaaaagtttgaatattgtaagaattaccaaaatgtgacacagagacacaaagtgaatatgtactattggaaaaatggtgccaatggacttgctcaatgcagggttaccaccttcaatttgtaaaaaacataatatctgcagagcacagtaaagcaaagtatagttaaacaaggtatacctgtataaaactgattgctttaaaaatattgaatttgaaaaagttaaaccttttaagtgtacaatcttctggagttgtaaacaatactaacaaacatctggcaaaatgttatattactatgaattttcagaaagaacagacatcagtgacattaatttatacataatgtatcttatataagtaatccaaatacaattgagcctggtttctgctttatataaaccctttatataaaccctttatataaacctcagttaagaaaaatgcaaaaaaatgaggcatgcctgtacacaactgttagctgtgtccttagtgaatggcagcaggagcggcggggcgagggggaaggcaagaggaggtagtaaagggggaatagttgaagattctttttttttttttttttttttgagacggaggcttgctctgttgctcaggctggagtacagtggcgtgatcttggctcactgcaacctccgccttctgggttcaagcgattttcctgcctcagcctaccaagtaactgggattacaggtgcctgccaccgtgcccagctaattttttgtatctttggtagagacggggtttcaccatattggccaggctggtctcaaattcctgaccttgtgatccacccagctcggcctcccaaagtgctaggattacaggcacgagccactgcgcccagccaaactgcttcagttctaaaaataaaaaagggtagggagagagagagggaacacagttatatgtcacctatccagaacccttgagaaatacgcatttcaggagccacttacagaattattaaaaatcaaatctgttgttagccagcatatttgagagcctactgtttgttcagcactaagcactaacatatttttaattttttttaacttggagagaaattagtaaaatattttacatctttttttcaatatagagcactaaaaatagtttaacccagcctcctcttccaacctttttcacatcaggcatcaatagcaaatgattatatttttaaagcacaattggggaagccattattagataaaccagtgaaccaaccatgttgctccccccagcagaggagaccagcctggggacttcagccatgcccagtcatctgagaaagctaaccagatcagtttctggacccacctataactgcacaccatagaagttctcctttaacctgttgatttgtttacattcattaacaatagttccatactacgctgaaataaaatggtattctcagagatacagcattttaaccctaaactaatcagtctcctgatccctagtccaatgtgtcctttattctcaactagactgcctcaacttgataagttcctagttcccaccaaaagttagggccagattttgatgttacagactacttagctaaattgagtggaccttaatatgtgggagccaatattgatattttttgagggaagacacatactttctaatataaaaatttaatctgatactttaaacagggacagatcaaagatatggtcacttttttatccctcccagacatgttgcataacttaatttttataatggatgtgaaattttctaaacgttacaatgaaatcttttttttaaaaagaagcagatataaatttaaaattcttccaaacaattaaaaataaaatttaatttgaaagaaacatataaaataaaactctcaggaaagaaatttataatggaagtcatgagaccagcaagtagagaatagcagtgatactggtaagaggagaaagcaacatgtactacatatgaagcaagccaaacttgatgttgtagtatatatgagggaattaataattaaaggtggccaatatttctcattggactagaataataataggcttatagaataaagaatttaagaaagatagcaagcaaaattttggaaatagaatttggtgttaggcatagtgcgtattaaagtgacacaaagctttgtgtcaaggtatctggcaagaaaagcaggccagaaatttagatttgaggagcagatacaaaaatgataattagagagatgagtaaagaataaaatgtcatatatgcctgaaaacaaagtaagttttgttttctctcctaaaattacccatcagaaaagagagtgctgccttatattgaaatcactaacacaagatgatttctcagttactttatttggacttacttggagaagatatactggcctgaaataaccattgtatttcggatgtaaattcaggctaccaggtagaattaaaatttggtcaaataagatgaggcctgagaattgatccttaaatttttagcattgtctaggtcattggtgatcttgaaagagcaatttacatggagtaattaggaagaaagacttctgggaataggttcagtaaagaacaggaggaaaggaagagaagggagacacgtagaaaactcatgaagaattttgctacaacactgtgccaagaaatgggtaacagcagaggagtataaggtccaggtacaggttcatttatttggttttggggggtttttttggtttttgttttttgagacggagtctcttttgtcgcccaggctggagtgcagtggcacaatatcagctcactgcaacctccgcctcctgggttcaagcgattctcctgcctcagcctcctgagtagttaggattataggtggctgccaccatgcctagctaatttttgtatttttggtagagatgggtttcgccatgttggccaggctggtctcgaactcctgacctcaggtgatccaccctcggcctcccaaagtgctgggattataggagtgagccaccatacccagccattaattatattttcataaaatataacatctcaactcattctattggaattacagatttagctcattcaatttataggaaatgtgtgccataaaatccaattggcaaagccatttctcactgtcataaacagtcaagtcaaattgactttttgtcagaaaaagttagactttatattttgcttggttttccagagacttttataccctagggccatataccttaataagatctgaagtagattggagagataatatctttctcttgtaaagtgggaaaaagtcaagtcacttttagaaaaaaaacacatctggaggttgggatctggaaatcaattttctttttttcttttttatttttagagacaagctcttgctctgtcacctgggctggagtgcagtgctacagccatggctcactgcagcctgcacctcctgggctcaaggggtcctcccacctcagcctcctgagtgagactacagttatgcagcaccacacctggctaattttcgtagagacaggatctcacttcgttgcccaggctggtctcaaactcttgggctcaggcaattttcccccctcgacctcccaaagttctgagattacaggcatgagccacctcgcccagcctggaaatcagttttcttaaagctatacacacctatctacaccatagagagtcttagatgactccaggggtaaatgtatgaatacctgtgctctaggacacatagatgattcccaaagtagtactgataatgatgaagatattagtgttaaattgtgtcacgagatgtgagaatgaaggggggggagtcattttttcttaatattttatacaatattattttaaatatatgttcaattaacttctataatagatacttgattatttcatttatctccttaggattgtatacattcaaaatgtcacctcccccaaaaaagtggtataatctaaggatggccttatttttggcatagatagtatcatacggtcacacttggctgtgtgtgaatccatactcatctcatgattaagatccttaggccaggcatggtggttcattcctgtaatcccagcattttgagaggtgggcagatcactttgaggccaggagttcaagaccagcctggccaatatggtgaaaccccatctctactgaaaatgcaaaaattagccaggtgtggtggcccacacctgtaattccagctactcaggaggctgaggcacgagaatcacttgaacccaggaggcagaggttgcagtgagccgagattgcaccactgcactccagcctgggcaacaaagtgagactctatctcaaaaaataataataataatttaaaaaaagaaaatataaatcatattaagcaagtgttaaaaatgaaaagaaagtaaaaagctttaaatgatgtactgtgaggtgttttgtttgttttaatggaagagtataattttgtttctttggaaatagtcctaaatattgatgaataccttttggaaggtaagaatgtcatggaatactttctatagaacattagtccacatattctgttcccgcctatctccacaccactgagcaacagtgcctgctcccagtgcaaacacacattcttatatcagcatcaagactacataacagtgaggtgggtttttttgtagagaacatacagaaatttggagaaaggatcatcaagtattgacaaagtcagaaacttagtactgctaaggaaatttattttttggtcacttaatatgatactaataacttgtttaaaatctagttaactactgcattataatttattatattctattcacagggcttcattatttcaaaaatgttgtgctagtgggatccctacaggatcgctatgttccttatcactctgcccgcattgaaatgtgtaaaacagctttaaaggacaaacagtcaggtaatggaataaaattatttcaaagagttataggtattaatgagctctttccaaaatttttcttgtagtcactttctctcgtatctgtcacccttctctttcctgttacttcctttccacccacttatattaacagctgtcctttttccattcttctcacctgccacgtgaactgcctttaccaatgaagtaatactttcatctaattacaaatgcctctccattttgctgcctcagaagtagttcatactttgatttcctctgaattaatgggattgacaattgtagtcatccttgtcatatgttctgctgtacctcgcttttacgcaaaggtggcagcaaggatttgcccctctttactgatagtaaatgataaagactttatttgttcttttgctatttgtgaataacaaaataaatttaaagtatagccatttggagccagaaggaaacttgagtcctgtttactcattttataactaaagcccagagatactaagtggcttagcccgaatcagttaattacagacttaggtcaagaacctggtctccgggcgtggtggctcctgcctgtaatcccagtactttgggaggccaaggcaggtagatcacctgaggtcaggagttcgagaccagcctggccaacatggtgaaaccccgtctctactaaaaatacaaaaattagccgggcgtgatggcgggtacctgtaatcccagctacttgggaggctgaggcacgagaatagcttgaacccgggagggaaaggttgcagtgagccaagatcatgctgttgcactgcagcctgagagacaagaacgaaactctgtctcaaaaaaaaaaaaaaaaaaaaaaaaccctggtctcctacctctcaatattgcctcagatccgtttttggaatgaggctgattttaaactcttaatcctttatttttctacattgtgacggtgaacagctccttaaggcaagaactgtcttaagcacatttttattgacagtgcctaacatgctgcctgctacatggtaagtactcctttattgtacatttgtgacatcaaaataaccttttcttaacttctgttctagcaaaggctagagtccacctaaggaaaaaattcagaagagtcttaaccttcagatgagtagctgaaactagataaatgtcccttattttaatagtgaggttctgtgacattggggaacaaggggaatcaaatgatgaagacatgtttagacttcttcctgtattaacatatttttaaaatagcatggaaccacaaatccaacctgactcaaaatgaaaactaagaggagaggtgggagtaaaaagttttttgatgagtatgtattaagtcagtctttctcttaaacacctctcttttctatatctgattgtacttctgtgtacttttcccttcttgtcattcctcaggcagcatcctacctgtcttctgaaatttaatatttacctctctaaagctcacacgttccatggacactgttagtactcatttattagtatatagtaatgcataagcattgtaaacaatgttttgccccttagaaggcagtttatacatttatgtggatgtattctaatcgttatcttttatgtgcttagtatgacctcagtaaatccattgtaagaattagctaaacattgtttgggcgcagtggctcatgcctgtaatcccagcactttgggaggctgaggcaggaggatcacctgagtccaggactctgagactagcttgggcaacatagcaagaccccattctaccaaaaataaaaaattagctaggctaattaaaatggtggtgcacgcctgtgtggtcccagctacttgggagggttaagatggaaggattgcttgagcctgtgatgtggaggctgcagtgagttgtgatcatgccgctgcattccagcctgggtaacagagtgacaccctgtctccaaaaacaaaaaaagaaaacaaaaataaggagagaggaacacaagtactaaataaacctatagaccaaacagaagatcatgttacttgagccaagctcacgttgttcatctgactataggaggttgctgttctttcttaaaataatttggaaattttgactgccacagaaacatctttaaagtatttgctgtaggccaagtttataattttgccttatcaaaatgtctcaccatgtctagcttattttcataattgtttaatgagttataagtgacttaacattaaagaaaactatttctttgttataggcattgctttgagttaaaaataccaaatttcggctgggcgcaggggctcacgcctgtaatcccagcactttgggaggctgaggcgggaggatcgcctgaggtcaggagttcgagaccagcctggccaacatggtgaaaccccaactctattaaaaatacaaaaattaactgggtgtggtggtgcatgcctgtaatcccagctactcaggaggcggagacaggagaatggcttgaacccgggaggcagaggttgcagtgagccaagaccacaccattgcactccagcctgggcaacaagagtgaaactccatctcaaaaataaaaaaaaaaaaaaatcaaatttcaagaataatgtataataaatttgttatttccacttgactagataatgtgattacttacattttctataaacagaaccaaaaatgatagttgaaggaaaattaaacctttttaaaaagagccatttttctgctttatatggaaataatgtaactaaattttataacttatctaaaaattggcatagtttttttattttcagttactattgtgaactaattttccttttttctgttggttccataggacagatctattcagaaatgatccacaacttgcttcgacccgttctgcaaagcaaggactgtaatttggttcgctataatgtcatcaatgcattgcccaatacagctgattcactcattgggagagctgcacatatagctgttcttgattcggaaatatttttagagaaattctttctggttgctgccctcaaatatttccaatagtataaaagcattgttagcgactggacaattacctcattcaacaatgtttcaaataatgtattatattaaaatgtagatgctgataagttctaagaaatatttatacctttttatatggaagataatttatatcatccatgtttagtgctttttaaacatcaactttactttctaggtaatgtggctgtgcaatatttttttaattttatctttttacttttctattactttttcatatattttgctacctaagtatttcagtgaaactttaagcccatacctgtgtctgattgtttattattggctttccacaattcttacatcagactacattatattagagaccattattgctagaatagcatgggatttaaaattttctaatactgggggtattatttagttaattataaatttttcttttcacattttactgtgttttaactggaaataaaattatggctgctacaatatattttttgaaatcaacttctgtagttctaaaatacaactttatcatacaatcaaaccaggtagttcatataaaacagtgtaatacaagttttctataaagtcattactgttgcttaaacatatttcatgcctattaaaatatattttctactggtgatttcaacattatttctcatactgacttttattactggaaatgttcctgtacatgttggcagcagataaagatttttgaatgtttgaatgccctctgccttgatttggttggaatttttgctaaattggtaatgttgcttgaactttatgactacattttcttttaacttttttcatggacttccttatatgtacataataattaaatgttgaaatttatgaaatacttttatgaatttagataatttttaaatattgttaaaatttattgaactaaaaagtaatgtaaataaaataattcatgttaaagatggaacaaaataattaactttacatgtttggtgatacagatgcaaatgtttttgatatatggagatgttgagtcttttgactttactaaaggtgctgaatagcattaaattcactattttccttttctgttttacttgtgaaaataaaaatgcactaaggttgggtagaagttctgtttgcactcactaattgtgacagacagaggtttttgtaagtatttattgtacaattgatgcatgtttatttttagcgttgttattgcctctggtgttaataaatgaacaaatggctatctggaggaacagctacaa

SEQ ID NO: 6473 - DNA, 1461 bp, Homo sapiens
aggacagatctattcagaaatgatccacaacttgcttcgacccgttctgcaaagcaaggactgtaatttggttcgctataatgtcatcaatgcattgcccaatacagctgattcactcattgggagagctgcacatatagctgttcttgattcggaaatatttttagagaaattctttctggttgctgccctcaaatatttccaatagtataaaagcattgttagcgactggacaattacctcattcaacaatgtttcaaataatgtattatattaaaatgtagatgctgataagttctaagaaatatttatacctttttatatggaagataatttatatcatccatgtttagtgctttttaaacatcaactttactttctaggtaatgtggctgtgcaatatttttttaattttatctttttacttttctattactttttcatatattttgctacctaagtatttcagtgaaactttaagcccatacctgtgtctgattgtttattattggctttccacaattcttacatcagactacattatattagagaccattattgctagaatagcatgggatttaaaattttctaatactgggggtattatttagttaattataaatttttcttttcacattttactgtgttttaactggaaataaaattatggctgctacaatatattttttgaaatcaacttctgtagttctaaaatacaactttatcatacaatcaaaccaggtagttcatataaaacagtgtaatacaagttttctataaagtcattactgttgcttaaacatatttcatgcctattaaaatatattttctactggtgatttcaacattatttctcatactgacttttattactggaaatgttcctgtacatgttggcagcagataaagatttttgaatgtttgaatgccctctgccttgatttggttggaatttttgctaaattggtaatgttgcttgaactttatgactacattttcttttaacttttttcatggacttccttatatgtacataataattaaatgttgaaatttatgaaatacttttatgaatttagataatttttaaatattgttaaaatttattgaactaaaaagtaatgtaaataaaataattcatgttaaagatggaacaaaataattaactttacatgtttggtgatacagatgcaaatgtttttgatatatggagatgttgagtcttttgactttactaaaggtgctgaatagcattaaattcactattttccttttctgttttacttgtgaaaataaaaatgcactaaggttgggtagaagttctgtttgcactcactaattgtgacagacagaggtttttgtaagtatttattgtacaattgatgcatgtttatttttagcgttgttattgcctctggtgttaataaatgaacaaatggctatctggaggaacagctacaa

SEQ ID NO: 6474 - DNA, 171 bp, Homo sapiens
aaataaaaaaaaaaaaaaatcaaatttcaagaataatgtataataaatttgttatttccacttgactagataatgtgattacttacattttctataaacagaaccaaaaatgatagttgaaggaaaattaaacctttttaaaaagagccatttttctgctttatatggaaa

SEQ ID NO: 6475 - DNA, 2491 bp, Homo sapiens
gagaaatcttacaaatgtacaatttgtgacaaggctttcgtgcgtaattcactcctgtcaagacataccagaattcacactgcagagaaaccttacaagtgtaatgaatgtgggaaggcttttaatcaacaatcacacctttcacgtcatcatagaattcatactggagagaaaccttagaaatgtgaagcatgtgacaaagtttccatttggaaatcacaccttaaagacataggagaatttatactggagagaaagcttacaaatgtaaggtttctgacaagacttgggagtgattcacactctggaacaacatactggacttcacactggagagaaaccttacaagtgtaatgagtgtggcaaagcctttggcaagcagtcaacacttattcaccatcaggcaattcatggtgtagggaaacttgactaatgtaatgattgtcacaaagtcttcagtaatgctacaacgattacaaatcattggagaatccataatgaagagagatcttacaagtgtaataaatgtggcaaatttttcagagatcgttcacatattgcaggtcatcggtgaactcatactggagagaaaccttacaaatgtcatgactgtgccaaggtcttcagtcaagcttcatcctatgcaaaacataggagaatttatacaggagagaaacctcacaagtgtgatgattgtggcaaagcctttgcttcacgttcacacgtcattagacatcagagaatctatactggacagaaatcttacaaatgtcatcagtgtggcaaggtcttcagtccaagatcactccatgcagaacatcagaaaattcatttttgagataaccgttcccaatgaaatgagtatagcaaaccatcaagcattaattgacattggagtcaattcagcattgacttgagtttgtgttgacttaacattgagttcaagcctttatttgacattcaagtgtttatgttaagaggatggggccaggtgtggtggctccgacctgtaatcccagcacgtcgggaggccaaggcacataggtcacttgaggtcaggagtttgaaaccagcatggccaacagatgtgagccacttttctcagcctgttttttgtttcttattttctattatttttttgagccagtactttttaaagagatagtacttttttcagttagtactttttgaaagggatatatcatagtaatttttaaaagggatatgaggccaggcacggaggctcatgcctataatcccagcactttgggaggccgaggcaggcagatcacggggtcaggagatcgagactttcctggctaacagggtgaatccctgtctctactaaaaatacaaaaaattagctgggcatggtggctggcgcctgtagtcccagctactccagatgctgaggcaggagaatggcatgaacctgtgaggcggagcttgcagggagtcgagatcgcaccactgggctccagcctgggcgacagagtgagagtctatctcaaaaaaaaaaaaaaaaaaaaggatatcaaagcctcggtacgtggtggctcatccctgcaatcagagtactttggtcgacccatgtgaactggtcacctaaggtcacaatttcaaaagcaccctaacatggtgaaaccccatctctactaaaaatacaaaagttagccgggggtgttggtgtgcacctttagttccagctacttgggaggctggggcatgagaattgcttaaacctaggaggtagaagttgcagtgaaccaaaattgtgccactatactgcagcctgggtggcagagtgagtctccatctcaaacaaacaaaaaataacaaaaaaagacctcaaaaatgcttttcttctcgtataatggacttccttctttttctttctggttcctcttcatttctctctttattttttatttatttatttatttattttgcagtttgagtttgagataaatctaagttataaaagttgtatttcttaatacataatgacttctgaaagatgcctttgcagcatcctataatcagctcacatcattcgtttctgtacttgtatattttccagttattttccggttgaccccagaattcgttagatttttttaaaaaacaatttcaaaatagttgctgttttaaattagttgcatccagttcatatcaatgtctgcatgctttctagtctttgttatttattgaaaacctttggtacctaaacttaagtttgattgtttcagtgtgtacttggtaaatatgtcagtggccttttaactaaacatcaaaatgtactttaaccagttagtctgtttttcagttttctttccttatgtcctttgttaaaatcttgatctgggagctatttattgcgtgtttccctcaaggccctctggtccattctggaaaaatgttgaaacatgggctggattggcatagaacgctcctccaaaagcacccgtgtattcttttcttttcttttttg

SEQ ID NO: 6476 - DNA, 6742 bp, Homo sapiens
ggtctattgacattcagggacgtggccatagaattctctcaggaggagtggaaatgcctggaccctgctcagaggactctttacagggatgtgatgctggagaattataggaacctggtctccctgggtgaggataacctcctggggatgtgcccttgtgtatctttgtattttctcttgttgcctcttgggagccacatccttacttgactaaaatggaagccgtattgattttgaaatgaaaagcttcatgatgtagcatctggactttcactgtcccctttgtttagaggttctgcattcttcatgatagctcagtggagcttccagaagtaaagtaggcataaaactttatggcagcctggtcgtggtggctcacgcctgttatcccagcaccttgggaggccaaggcgtgtggatcgctatgggtgaggagttcaaaaccagcatggccaacatgcagaaaccctgtctgtactaaaaatacaaaagttagccgggcatggtgatgcatatgtgtaatcccagctcctagagaggctgaggaaagagaattacttgaacccaggaggccaagttttgcattgagctgagaacacaccactgcactccagcccggacgacagagcaagactctgtctcaaaaaacaaagacaaaaacaaaccttatggcagactttaaagatatccagttccctgtttgcttctcctgtgctttcgattctgtagttcttggaagagagctcgatgtccacatactacatattacagtgctccccaagcattcagaatgaggcagtcagtggaggaatttgtgaaatattttcctagattcatctgtaatgtcttctttcctacagaaacatagggctgggactctagaaaagctccagcatgttatggtcctttctttttataagcaggagtctctttctgacctgctgtctccatgttggagcaagggaaagagccctggactgtggagagttaagtgaaaataacaaaaaaatccagatgggtgggaatgtattacaggtgcaaacgcaggtaagagctcagatgggcagagtggaagctccaccttcaaatagtgtgtggggaaactctctgcaagtgggagaattctgtggcaaaagaaaagtttaaatcctcacatctctgaaaagatatctttctttgcccccgcttatctctctgctctttctttctattctttctttctctctttttttatgacagagtctcactctgttgcccaggctacagtgcactggtacgatcttggctaactgcagcctctgcctcctgggctcaaaggatgcttatgccccagattcctgagtagctggaactgcaggcgctcaccaccatgcccagctaatttttgtgtttttagtagagacagtgtttcaccatgttggccaggctggtttcaaacttctgatctcaagtgacccacttgcctcagattcccaaaacactgggaccgtaggcatgagctgccatgcctaaccattgttattattttaaatagttttgtcttgtagttctttagatatttgggcagaggttattgttgcaggtatgttaaacatattaaagttatagcataataaagaaacttaaaattaccataacctggacgtgtgcagtggctgacacctgtaatcccagcactttgagaggctgagatgggcatatcacctgaagtcaggagttcaaaactagcctggttaacatgttgaaacttcgtctctactaaagttacaaaaattagccaggcgccgtggtgggtggctgtaatccaagctactcaggaggctgaggcaggagagccacttgaatctggaaggcagaggttgcagtgagccgagatcgcaccgttgcactccagcatgggagacagagtgaaactctgtttcaaaagaagaaaaaaaaaattctgtaacctgcaaaaatgacttcttcttctccactagaacatttttttatttgtcagaattatttctgtgtatgttgcatttttgttaacatatatgtacagtgtttttcatgccttttattttaaatatgaaaaaagtttagttatgaaggtatacatatgccagtttctgtatctgtccttttattaattaattactttatgtatttatgagactgagttttgctgttgtcacccaggctgaagtacgatgctgcgatctcagcttactgcaacctctgcctctcgggtacaaccgattctcctgcctcaggcccctgagaagctgggattacagatatgcaccaccacacccatctaattttgtatttttagtagagactgtttctttttgttggccaggctggactcgaactcctgacctcaggtgatctgcccagctcatcctcccaaagtgttgggattacaggcatgaaccacgatgcttggcctatctgtttttactacctttactggagaactttatttatttatttatttatttatttttattattattatttttgagatggagtctcactctgtcgcccaggccggagtgcagtggtgtgatctctgctcactgcaacctccaccttctgggttcaagcaattctccttcctcagcctcccgagtagctgcaactacaagtgtgcaccactacacccagctaagttttgtatttttagtagagatggggttccaccatgttggttggccaggatagtctcaatctcctgacctggtgatctgccagcctcagcctcccaaagtgctgggattattggcgtgaaccaccacaccaggcctggagaactttatatatgcttgtgggttggagttactctttagccttctttcatttcttttttttttttctttgagacagattttcggtctgtcacccaggctaaagtgcagtggtgtcacctcggctcactgcaacctccacttcccaggttcaagcaattctcctgcctcagccttccaagtagctgggactacaggtgagtgccaacaccgcgggctaattttttgtatttttttagtagagacagaatttcagcttgttaggcaggatggtctcaatctcctgaccttgtgatcctcccacctcagcctcccaaaatgctgggattactggcatgagccaccgcacctggcctgtctcaagttttttaaaacatgttagtgctattagatggcttcaagtattgcaagttttacagtacagactcttaacttcctttgtttaataagatttgtcagcctttggtgatgttgatgatgagatgctctttctcctgtctctgtcatttcactgtcctgttagaaatagcttagactggccagctgtgatgtctcacttttctaatcccagcactttcagagaccaaggtgggtagatcgcttgaggtcaggagtttgagaccagtctggccaacatggtgaaacctcgaatttactaaatgccaaaaatgggctaggtgcagtggctcacacctgtaatcctggcactttgggagactgcgatcggttgatcacttgaggtcacgagtttgagacaagcctggccaatatggtgaaaccctgtctctactaaaaatgcaaaaattagctgtgtatggtggcgtgcgcctgtaatcccagctacttgggaggttgaggcaggagaatcactggaacccaggaggtggaggttgcagtgcgccaagatcacgctactctactccagaccgggagacagagtaagactgggctgaggagggagaatcacttgaggtaggagaatcatgccactacactccagcctgggtgatagagcatgactccatctcaaaaacaaacaaaaaaggaaattgcttaaactgggaggcttaagacaaagacattgatttctcatgaatttggaaagtgggaaatccaagagcaaggtgccagccaaattggttcctggtgacagccttcttcatgctttagaccagccatattcctgctgtgtcctaatacagtgaaaagaggaacaggcaacacgctctttaatgtctctataaatgcactagtcctattcatgagtagtcgacacccatgctaaattctctcaaggtctgcatctgcaggaacatcctattagagaataccacatctaccaaagcttatttgagaagtagttatttatcttattttatttttttgagatggagtctcatcctgttgcccaggctggaatgcagtggcatgatctcagctcactgcaaccttcaccttctgggtacaaatgttttctgcctcagactaccaagtacctgggattacaggcaccctccaccacacccagctaatttttttgtatttttagtagagatggggtttcaccatgttgcccaggctggtctcgaactcctgatttacctgcctcagcctaccaaagtgctgggattacaggcatgcgccaccgtgcctggctgttagtcaattctcattctttataatgctgtatactttcttgacctcatatatcagaaagtagtgatcttaacatctatttcagttcttatgttgtgtgctggtggtaagtacaagttttggcttttttcttaagagggaattgtttagaattcttcagtctgtataaatctacttgttattttcttgcttgttttatcatgggttgcaatatttgattaattgatttttatgactttatatgtgagttttcggtatgtggtatgcaatataactgacactcccctagataatgtcacaaagtgccacagggtgcagtggctcatgcctgtaatcccaggtcttgggaggctgagatgtgtggatcatctgaggtcaggagttcgagaccagcctggccaacaggtttcaccaaaccccatctctactaaaaatacaaaaattagccgggcacagtggcatgtgcctgcattcccaggtgctcagaacctaaggaagagactcacatgaaccccaaggcagaggttgcattgagccaagatcataccattgcactccagcctgggtgacagagtgacactgtatctcaaaaaaataaaaatacataaaattttttttaaaagtcggccgtgtgcggtggctcatgcctataatcccagcactttgggaggctgaggcaaggggatcacaaggtcaggagatcgagaccatcctggctaacacagtgaaaccctgtctctactaaaaatacaaaaaagttagctggacatggcggtgtgtgcctgtagtccaagctgctggggaggctgaggcaggagaatggcgtgaacccgggaggtggagcttgcagtgagccgagatcatgccactgcactccagcctgggcgacagagcaagatttcgtcgcaaaaaaaaaaaaaaaaagtcacaacgtgcctgttccacatggatataggtaattttgtaacagttatttggaaaaatatggtattaacattttcctttttttgagatggagtctcactctgtcatccagggtggagtgcagtggtgcgatctcaactcaccacaatctttgcctcccaagttcaagcgattatcctgactcagcctcccaagtagctgggattacaggcacctgtgaccatgccagctactttttgtattttcagtacagatggggttttgccacattggccaggctggtcaaactcctgacgtgaggtgatctgcctgccttgccctctagaagtactgggattacaggcatgagccaccatgccctgcctttttttgttgtttgtttttttgtttttttgagatggaggctcattttgtcacctgggctggagtgcagtggtgtaatattggcttacagcaacctttgcctttggcttaacgcaattcttgtgacacagccttcagagtagctgtgagtacaggcacgggccaccatacctggctaatttttataatcttttgttatcttgtcagtgctatgattgtttgacaatacagaatttccattgattttggttatccttacaacagcttgttttggattatttaccaatatagtatattgtgtggttctttagcatttatttgtatacactaaatacgctgtaaatatgaagaatatatatttttctttttttgatgtgatagtgatgtgttttttgcaaagtgtgatacactttagggtcaccagtggaaaaacactccttactttaggctcacacatgtttgtgccctgtcagtgttttgtcatgatataggaaatagactttcatggaattgatttgaaagacatataatcgccctttatttattaaagaatcttactccttttgtgttcttaaactttgaagatcatgtttgggaagtttaaaataagtattgttttttgtgtcatatttacacatttcagtattatacacatctgtacttcattggaaacctattggtgtttatattttgtagatatctcttccaaatgcatgatgaagacattcttctcaacagggcaaggcaatacagaagcgttccacacagggacattgcaaagacaagcaagtcatcacattggagatttttgcttccagaaaattgagaaagacattcatggcttccagtttcagtggaaagaagatgaaacaaatgaccatgcagcacccatgacagaaatcaaagagttgactggtagcacaggccaacatgatcacaggcatgctggaaacaagcctattaaagatcagcttggatcaagctttcattcgcatctgcctgaactg

SEQ ID NO: 6477 - DNA, 2034 bp, Homo sapiens
ggtttcatcacgtttgtcaggctggtctcaaatcctgaccttgtgatccacccgacttggcctcccaatgtgatgagattacaggtgtgagccactgctcccagcctcggttttttttttgtttttctttttgtttttttgggggtttttttttgagatggagttttgctcttgttgcccaggctggactgcaatggtgcgatctggtgtcactacaacgtctgcctcctgggttcaagtgattctcctgcctcagcctaccaagtagttgggattacaggtgccctccaccactcctggctaggtttttgcattgtcagtagagacaggctctcactgtgttggccaggctggtctcaaactactgacttctggtgatctgcccacctcgacctcccaaagtgctgggattacaggcgtgagccaccgtgcctgaccactcatgtattcttgattgaaacaatttgcttatgtcttagttgtacacctgaccttctttccctgtttccaaggtcaatagctatgtgttcacaactctgcattttataaatgttactgtgattttcttgtaaggaagaacaaactgtcaggagtcaatggcctcagaaccttgcaaaagaagtttgtttcttttttttcttttcttttttttttttggagacggagtttcgctcttgtcccccaggcttgagtgcagtggcacgatctcggctcactgcaacctccgtctcccgggttcaagtgattctccttccttagcctcccaagtacctgggattagaggcatgcactaccactcctagctaattttgtatttttatagagacggggtttctccgtgttggtcaggctggcctcaaactcctgacctcaggtgatccacccgcctcagcctcccaaagtgctgggattacaggcttgagccaccgtgcccggcaaaagaaatttctttagcccaggtttgtgaaagagccttctctaattttccaggatgggggtgataagatcaacccttcccattagtccctgcaggcccccatgtaagaattcaggcacacctcactcatctcagaccttctcagggcaacttggtgaaaatgtcttccaatctgagccccagtgagcctccttggaacttggcgatgaggggctacaccagaaaagctcaaccctagtgactttgacccctgaaatgattgacaaaatggagtgcgtgtgtgggtgtggctttttttttaaatttttttgaggagaggagtgcccagttgtgattagaattttcaatgggatgcagtgccctaaaaatgaaaaacaaaagcagaagaatggaagaaacagaggtagactcagacacagagaccatcttcggggcctttctctgtatgaggacatcacaacaaaatctaaagcaggtcatgtcagtccctgacagggaaccctccaccagcttcccgtgttccccaggacaaaagcccaacccctcactgtggctccacagccctgtgtccagggccccttccactgtccagcctcctcctgggagcttgccctcatctcatgactctctccgccccagtcatatttgcttttctcttttcccaaacatcaaaacccttcctgtctcaggtcgttgtccctggttttaccctacgtaccctgtcactttctcctccttcaggtctaggctcagagctgtcgcccatgccctcccacccccggctgtagttcccttgtccatcagtctgtatcacgttactcaggattcattgtctgcatcaatcacatcagaaatgcattttttttttttttttttttttgagacagagtcactctatctttcagcctatgagtgcagcctcttgatcttggctcactgcaacctctgtctgctgggttcaagcaattctggtgcctcagcctcccaagtagctggtgtgtctgccaccacacccggctaatttttgtattttaacttccatttatattatttttgagtctgtctgtcaccaagactggagtgtagtggcgccatct

SEQ ID NO: 6478 - DNA, 364 bp, Homo sapiens
aaccaccatcaaacaggattttcgcctgctggggcaaaccagcgtggaccgcttgctgcaactctctcagggccaggcggtgaagggcaatcagctgttgcccgtctcactggtgaaaagaaaaaccaccctggcgcccaatacgcaaaccgcctctccccgcgcgttggccgattcattaatgcagctggcacgacaggtttcccgactggaaagcgggcagtgagcgcaacgcaattaatgtgagttagctcactcattaggcaccccaggctttacactttatgcttccggctcgtatgttgtgtggaattgtgagcggataacaatttcacacaggaaacagctatgaccatgattacgc

SEQ ID NO: 6479 - DNA, 247 bp, Homo sapiens
gaatggcagaaattcgacgacacagcgagcgaggaagcggaagagcgcccaatacgcaaaccgcctctccccgcgcgttggccgattcattaatgcagctggcacgacaggtttcccgactggaaagcgggcagtgagcgcaacgcaattaatgtgagttagctcactcattaggcaccccaggctttacactttatgcttccggctcgtatgttgtgtggaattgtgagcggataacaatttcaca

SEQ ID NO: 6480 - DNA, 686 bp, Homo sapiens
  SITE (95): n equals a,t,g, or c
caccaaggccagtttggaagcgaacggctaccccgaaattaagatactacagcgtgagttatgagaaagcgccacgcttcccgagggaagaaagncgggacagttatccggtagccggcagggtcgaaccagaagagcgcacgaggagcttccaaggggaaaacgcctggtatctttatagtcctgtcgggtttcgccacctctgacttgagcgtcgatttttgtgatgctcgtcaggggggcggagcctatggaaaaacgccagcaacgcggcctttttacggttcttggccttttgctggccttttgctcacatgttctttcctgcgttatcccctgattctgtggataaccgtattaccgcctttgagtgagctgataccgctcgccgcagccgaacgaccgagcgcagcgagtcagtgagcgaggaagcggaagagcgcccaatacgcaaaccgcctctccccgcgcgttggccgattcattaatgcagctggcacgacaggtttcccgactggaaagcgggcagtgagcgcaacgcaattaatgtgagttagctcactcattaggcaccccaggctttacactttatgcttccggctcgtatgttgtgtggaattgtgagcggataacaatttcacacaggaaacagctatgaccatgattacgaattcgagctcggtacc

SEQ ID NO: 6481 - DNA, 364 bp, Homo sapiens; identical to SEQ ID NO: 6478

SEQ ID NO: 6482 - DNA, 288 bp, Homo sapiens
attaagcgcggcgggtgtggtggttacgcgcagcgtgaccgctacacttgccagcgccctagcgcccgctcctttcgctttcttcccttcctttctcgccacgttcgccggctttccccgtcaagctctaaatcgggggctccctttagggttccgatttagtgctttacggcacctcgaccccaaaaaacttgatttgggtgatggttcacgtagtgggccatcgccctgatagacggtttttcgccctttgacgttggagtccacgttctttaatagtggactctt

SEQ ID NO: 6483 - DNA, 288 bp, Homo sapiens; identical to SEQ ID NO: 6482

SEQ ID NO: 6484 - DNA, 1528 bp, Homo sapiens
tcctcctgcctgcagtaaaccactgcctgaaccgtgttcctaggtggtgctgatgctgggctgtctcaaaagcccttagtctgtttcaaagcttcctgccaatggcaagaatgtggatgatgtgattagaaatcaaatgaatgtaactgttacattgccaaaataccatttagctctcatttggctgctttttcactttgggtgggcattattatcagtttgctcaaaaacagtgcttatgaatctatccaatgtccacaatgctgttataggataaaaggccatttcttattagtccaaataacagagtgggagacttttattcttttaattgattgtgaggttctaaaagagataattgtaaaagcaacaacaacagcaacagcaatcatggctgtatgcttatttgaacaagactagaaatgagagcagaaatttgaaaagttaaagcatttgaatgaccaccagatggcagtgtggggccacctggaagctgaagccaaagtcgtcgttctgtctctctaggcagcctctgaaagtgtcagccccaaagaggcaattgctgtaaatgtataaggctaaagtatcttattaaatgattataaaatatatttaaatgcattttaaaaatgaagttcataagaattattttaggaaactgaaaggtttacatttactctaatacaaaattttagcccacaagtcttcaaaatataattaactcagagaagtctcataaatcaagacagagaattaatgaccacatagagaaaatttaagaaacaataattgatttttttaatagggaagagatcattaagcaaccacagccattacccaaataattatttttctcctaatggctacaaccattgtgcatgaaaatgatatgcataagtttcacttactctagaagaagtcaaactattttcacaaaatttctgcgtgttaaggtgaaaaatctgctgctgctttttaatacatcgtgacacaggtatggcaagcgaattcacaaggtaataccagagtattttggggtgtaaaaagagaaatccattttaaagtttgagaattcttagtttaaaatatactacaagaacgagcctctttatccctgctctgcccctgtcatagtgggagaatgtgccacaaaggccatattaatgagaggactggaaagaacacaaggagatacaaaacctcaagtcagtgaaaaagttacatgttacatgggattttggtaaattcaatgttctttccctttttccctctagaatcacaatttcaaagatgctttaatttcctccctccctccctgcctccctcccttccttccttcttccctcccttactttcttctgctctttcttgttttgatttacctccaagtggcagtaagtgctagctagcatttaaattctctacttgggtgttttatattaagttatttcatttaattatatctattcagtgaattagttatgattactggtaataataatgttaataaaatcaattttatgacaaa

SEQ ID NO: 6485 - DNA, 112 bp, Homo sapiens
ttttttttattattatactttaagttttagggtacatgtgcacaatgtgcaggttagttacgtatgtatacatgtgccatgctggtgcgctgcacccactaactcgtcatct

SEQ ID NO: 6486 - DNA, 1449 bp, Homo sapiens
ccacaacattgtcctcatgtgtgtcacattcttatctgcttgctgcatctatgccttttatttgttgttgttcagtcttttcatacaagtgacaaaaaggatgctggagcaggcttggtgagaacaggaagggaacccatcaaggggcagagacactagaaagggtgtgaaataacatgaataactttctgacttcaccatggaccatggaggggtggccatccaagagggtgctgtacgaagctttcatagggagagccactctcttgtagatctgcataggtaaaccttcccaggtgagggcatcatggccagctttgcagtcttggaaactaagtttttaaagagaggaacacaggatccctggtgtaaccctgtgtgggaatcacagctacttgctgatgtaccctaaagggaaaacctgtgattatggtagaggggagtttttttcctcgcagcgacagttttgccatgaatttccaggcctcacttgatttcaggtcagggtctcttgggcaatccagaagaaattgtacaaggcaggatgactgaacaggtacagcaaatcagctcaaaacatatgtcaaacaaggtggggcctgaataaataaatacagatgagtagttcacttggctggagcatacagtgtgttgaggagagtggctacaagtagagctgactctgtgggctggaaacagattgcaaagagcttggcacattagctcaagagttttgggtttgacttgcctggcaggtggaagcctttgcagggagaatattaaatccaagcagcactatctatatactgaaatcgtaccactttgcatttaggtaatatgtggaaacttgcaaggtactttctcatttgtcatctcatttgagttttataaaaatatccttgaagtaggtaataccgcttctatcttatggattaggacactgagactcagaatggttaagtggcctctacagatctcagctaatgcgtgcagagcagaaggtgaaccaggtcagagtccaagaccatggtcatacccaccacatcatgcttctctgttaacttcacctggcactgggtgcatcacgagtcccacaaatgaagttttctagtttgtcttctgtgatattattttcagagtatcatgtataccatatattatatttgcttgtatgctctagacatttcattgcattttatagggcaatgcttcccaaacttggctactcattagaattactgtgacatttgatgaatacagatttctaggatctttcctttgagattctgatttaataggtgtaggttgggtcccagagatctgtattttttaaacatctgaccattactattaattatgagatttccttcaactttgaaacatgcttatttagtatggtttctaacatatctgacttcttgtggttcctaatggtaaaaaaaaaaaaaa

SEQ ID NO: 6487 - DNA, 970 bp, Homo sapiens
tctcctcccttcagaccctggcaaccactaatctgctttctgtctctctagatttgcctatctggacattttatatcgatggaatgatacaacatgtggtcttttgtgtctggcttctttcatttagcattttcaagcttcatctaagttctagtttatgtaggtattgcattgctggataaaattccattctagagatagctaccacattttatttgtccattaatcagctgatggacatttgagtttctgttttctactttcggctgttatgaataatgtcactatgaaagtttgtgtacaagcttttgtgtgaatttgtgttcagctgtcttgggtacataccttggaattgaattgttaggtaatatggtaactccgtgtttaacatcttgaggaactgccaaaatgttttccaaggtgcctataccattcccaccaggaatttctccacttcctggtcaatacttcttaatgttggtcttttttgtagccatcaggtgggtaggaaatggtatctaatgattttgatttgtatttctctaatgactaataatctgataatctaatgactaataattgagcatcatttcatgtccttatcagacatttgtatgtatcttttttggagaaatattgatttatatccttttgaaaaattggggccgtgcatggtggctcacgcctgtaatcccagcactgtgggaagctgaggcgggcggatcacgagttcaggagtttgagaccagcctggccagcgtcgtgaaaccccgtctctactaaaaatacaaaagattaactgggcatggtggcgcacacctgtagtcccagctatttgggaggctgaggcaggagaattgcttgagcctggcaggcagaggttgcagtgagctgagatcacgccactgcactccagcctgggcaacagagagagactgcgtctcagaaaaagaaaaaaagaaaagaaaaa

SEQ ID NO: 6488 - DNA, 970 bp, Homo sapiens; identical to SEQ ID NO: 6487

SEQ ID NO: 6489 - DNA, 139 bp, Homo sapiens
aacgatttggcaacagtcaccatataagtattagctattattataccctttaagtcacagtaatgtcatttctagagacctaatctaagaacattatcagagatgttacataaagatgtgtgtataacagtttcatcac

SEQ ID NO: 6490 - DNA, 384 bp, Homo sapiens
gttttaacagttaggttttatattttctctttagatctcctcagtattggttttgtctattctgtttcacttaaattatatcttcatctataggggattttatattctatattgtgtgttcctttaaattgaccatgatgaattctgagtgtgtaggtatttgtaccatttaagtcgttaactctttagaaatgtatggacttatttatattttttataatattgacagtaaaaaatatgggaaatgtattaatatgttaaacatttgacaacacaagcaagttatgtgggctttttaattttttttaaagaaatgtaaaaagtctgggctacattatgtttcccaggctgaactcaaactcctggatttgaccgggtgcggtg

SEQ ID NO: 6491 - DNA, 139 bp, Homo sapiens; identical to SEQ ID NO: 6489

SEQ ID NO: 6492 - DNA, 384 bp, Homo sapiens; identical to SEQ ID NO: 6490

SEQ ID NO: 6493 - DNA, 5205 bp, Homo sapiens
gtggctgccacactcaacaatttggctgtgctctatggcaaaaggggcaagtacaaggaggcagagcctctgtgccagcgggcactggagattcgagaaaaggtacccatgccctctctcccttcttctcttgtcgctgtgacccttctctacatggctcctctggtctaaccctcctccttcactttttttttctcacccccatctctgctttgttctctcttccttcattccctttcctctgctttccacatgtgtgtgcctacatgcaaacacacgtgtgcttgtgcacacacatgttatcatagccatttatccactcctttgttccctttcaggtcctgggcacgaatcatccagatgtggcaaaacagctgaacaacctggccctcttgtgccaaaaccagggcaagtatgaggccgtggaacgctactaccagcgagcactggccatctacgaggggcagctggggccggacaaccctaatgtagcccggaccaagaacaacctggtatgggaggagggacaaagtaggtggaagaaacggagaggggggcacagaggtggggggagggggggcaggcggagaggccacttgggtcctagagtcaggaagcatcacagtctggcacactgctctcatcaactttgtgctcatgtctggggctgcctttgcggatgaaggatctgcttcattccagttatagaagttccacagcttcttgggagtgggctgggaatacccttgaccctacacctggagaaggaggtgtgagaaagatctctggggaaagtgagagagacactgagaagtggaactccctgagcctggtgaagaccttgtctaaaaaaaaaaaaaaaaaaaagaccttgcctccctccatgttttgttcctgtatttttgcctttctgtcctccaggcttcctgttacctgaaacagggcaaatatgctgaggctgagacactatacaaagagatcctgacccgtgcccatgtacaggagtttgggtctgtggatggtgagtggtgagggcctggggaaggggctgtggggaagaaaagaaattcagaccaaaggtcgggggttaggccacagcggttcccagggggagccagaccccttcagtccagcctgtcagcctctgggtcctggctctccgacactgtctagctcccatctctaacctccccaccccatgtatcacccctagatgaccacaagcccatctggatgcatgcagaggagcgggaggaaatgagcaaagtgagtggggggaaggggggccagcctggggagctcaaggctaccggggtctctgtcttactccttgcattagcccaactctcacttcccatcccagcaccagccccagatgcatggtgtcctccccagcccagcctgcaccctagccccatgccaccttgcatctcagcatctctgtattcttatatttggctctccctgcccttctttctggcctctctctgtcctgcagagccggcaccatgagggtgggacaccctatgctgagtatggaggctggtacaaggcctgcaaagtgagcaggtgagctgacagtgaaaagccagcttggcctccgatgccctccatccagtccctgctcccagcctcccagaccttttcccttcctcccgtagactttccctcagctttagctctgttccctctcctattttcttattttttttcctcttgtcttgcttggaagacaaatgttttgttttctgaactcattctctcttccttctctggtctctttctcaccacagccccacagtgaacactactctgagaaacctgggagctctgtataggcgccagggaaagctggaggctgctgagaccctggaggaatgtgccctgcggtcccggagacaggtcagaagcccagaggggaaggaggtcctagagggaagggccctggggatgagagagtgccgaggtttcttgggagtctcctaagaataagcggaaaggctgatgaagccaggagggagaggaaagtgaggcagtgttgtgattgtggttgtttttaagcatgttcttaccccccacctgcattttgtggtcaggactctagtttcaagattcactaaatggggatatgaaggagaaaccctgccctttcataaggaggggacctgggtggtatgggtgagaggagtgaggttggggagagcctaaatcaagaatttcttagattgtgggtctcaatagtaggttgtgaaatcaattcagtatgggccatggggataaaaatatatacagatctatatatagcaatgcattgcaaatagaaaaggtaagtattattccagtaggtataaactgagacatcacaaggaaaaatgttttccttccagtggctgatggtgaaaaaaatttgaaagccccatcctgaggagttaaggagtaggaagtcccaggtccttccttttccttccagggcactgaccctatcagccagacgaaggtggcagagctgcttggggagagtgatggtagaaggacctcccaggagggccctggagacagtgtgaaattcgagggaggtgaagatgcttctgtggctgtggagtggtccggggtaagtctgatcattgccttttcatctctcctgcccactcctgctggtggtggtgagaggctcttggccatgctgtcccagtctaggtagtgtattccttcaggggtatctctgggagccagtttttgacaggacttttatttccagtcactgggccttgggggtgggggatgtgtgcagaataaatgctaggagtagactcagaaacccatctgtgtgggatccttgtagctttcattgctcactcctttctgccaggatggcagtgggaccctgcagaggagtggctctcttggcaagatccgggatgtgctccgcagaagcagtgaactcttggtgaggaagctccaggggactgagcctcggccctccaggtatacatggaagtcaagatacagtaaagtggccgggtgcagtggctcacgcctgtaatcccagcactttgggaggccgaggcgggtggatcacctgaggtcaggagtttgagaccagcctggccaacaaggtgaaactctctcctaaaaatacaaaaattagtcgggtgtggtggcaggtgcctgtaatctcagctacttgggaggctgaggcaggagaattgctggaacccaggaggcagaggttgcagggagccaagatcatgccattgcactccagcccaggcgacaacagcgagactccgtctcaaaaaaaaaaagaaaaaaaaaaaagatatggtaaagcaggcaagtaaagtaagcccttgcctccaactcctcttggctcctgatctctggagaagtatctcggagagaaacagggaggaagtcaacgggccagccatggagagagagtttgggtagaatgggtgccccagtgtggcagtgctcaagaggcccacagccttaaggccactcaggaggaagagaggaggcctcaattcttccgttttccattgtagcagcaacatgaagcgagcagcctccttgaactatctgaaccaacctagtgcagcacccctccaggtgagagcagtgcttgtgagcatattggtgggtgaggaaaaaaggacagccagtgagcaagcccagtggagtaagggaagagggaagggagaggagtcatctgggatgaagatgagccaggggattgcagtcattaaggaatcaggcagatagcttgtggtgagtgctgaccaccaagggacagtttcaggccagacatagtagcaaataagttaataaggagggaaataggaatattctgtaaactggtactttggaattatgaataatttaagaattatttggagatacgaattattttttcatcctgcagccgccttagtagtagatgagaatggaaaaagaaaagtattaaataatccccatctgagaaaacactagtgatattttaatggcaaatgacttcttgtatcaacacacaagtatatgccagtattcatgtggttcttccaggtagcttctccaccagattgtggccttctggaaaaccctagcagaggctaaacaaagtcccaggtccagagatagactggtccagagacagatgtgatcctaggtccagagatacactgtgaccatgggatggatggactctaggagccagtctttgggaggccgaggtccctgagctgatggggtagtgttgtctgtttcaggtctcccggggcctcagtgccagcaccatggacctctcttcaagcagctgacattcaacccggcccccaggtctgctgggtccccccacccccacagccctcacagcattccccattgctcctggctcttccccacccctaggtgggacagtgaaggggagcagtttaaccagaagattgctgctgcccttagggtctcagctccctcctcaggaatccctcttaggaaggaccctcaggacaccctctctgcaccctgtggtcctctagagtagctagctctgaggccccaaggtgggtacaaagcaggtatggccctcagagatgcagcctgctgctggcttttcagtcagagggttgggggctggccagccaagctgccttgccctggccgctcttactccctccctctgctgtctcacttcaggtccatgtatttcacttttcttaaataaaagaatcaggtaacctttctgtgacttgagtcctgattgaagagggtatgaagcagggcttgtgttggggcccttcacagaaggtgaggggcagtgatggatggagcagcaggaggagtgttgattcttggatctctcctctcttcctcccgttgtttgtatcatctccagcagggcctgtaggaaggcatctgggggatggggaagaaggaggctcacaacccaaggagaaggtgctgtggactgggttgtcagggacatgtggtggccatgtggcaggaccctggagtcctggcgccacttctcctggctgtgaggccctctgtggctgccattcctcctcccagctgcttgggggaagggaggtctaaacaggcctggggggccctccggaaccagaggggagacaaggcactatccatcccctctcagcatatcttggaggcctgagcagcagctggggcccatcttctaaagcttga

SEQ ID NO: 6494 - DNA, 974 bp, Homo sapiens
gagaaacaaccttaagtagagatattatcgccaaggcaaatgatagagttgtggatgtacagaaaatgaaaaatgaaaagtttgtttgttttgttttgttttgttttgttttttgagatggagtttcgcagtgtcacccagcctatagtgcagtggtacaatctgggttcactgtaatctctgcctcccaggctcaagtgatcctcctgcctcagcctcccaagtagctgggattacaggtacgtgctaccacgccaggctaatttttgtatttttagtagagatgggttttcaccatgttggtcaggctggtcttgaactcctgacctcaagtgatccacctacctcagccttccaaactgctgggattacaggtgtgagccaccacacccagctgaaaagttatttattttttgttgagatagagtttcactcttgttgccaggctagagtgcaacatggcacgatcttggctcactacaacctccacctcccgggttcaagcaattctcctgcctcagcctcccgagtagctgggattacagacatgccactacgcctggctaattttgtacttttagtagagacggggtttctccatgttggtcaggctggtctcgaactcctgacctcaggtgatccgcccacctcggcctcccaaagtgctgggattacaggcgtgagccactgcgtccagccaaaaagctatttttgaatgtgatctgtgtgaaaataattccctatggtatgacatatgataggcagggatgatgtatctcagaaatcatactcctgtcttgatatcccatcaaatatcaatgtttacatttagcgtttggatgtctggcaggacattaaaaaattggcagagctgtcccacacatgcagaacatctatagcgttcttgcctcctcaaaggtaatcttcatggtgacaacaccaacaacaaaaaaaaaaaaaaaagaaagaaaaaa

SEQ ID NO: 6495 - DNA, 2401 bp, Homo sapiens
gttgggcagagagggggcttaaggcccctgggcacaggctgggatcagggcagtgagcgaagggcagctgtgtcctgccctcccttctggaggctggaggggagaggccaagcccttggaaaatgtagcaaatgtctggatgtcgcataagtgcgtgtatgtgcgggacaggccccgagaagctagtgactcctgcacacccccattgcacaaatgaaatcacagcccaggagggagggtagcttggcactggctgagaaatagagctctctccccgcccctccccctaaccacaagggattgtcctgacaacttgtggggatagaagggctcacagggcaggggtctcagctgcccccatccttagggcaggggagttagtgtggagccgagagcaggtcccagctccccctgccagccgcactgtcccaggcccagggacctctgccgggtcctcccagcccttgccacacagcctagacgtagtagcctgggcttccagcaggtggcgagctggttcgtgctggaaatttctcctgggtttcttggggtcaaacatgccaacctccaagaccccatcctcacgtctcccacttttctggcgctggagtgtgcagggcgtaggacctgcatgtgtgggtgtgagaatgggggcggtggacaccagggggcgagtgtgtgactaggtgtgtgtgcacatgtgtagggtgcagacgcatgggtgccatcctttgcgttcagtgactgtgcgtccagacccctcaccagcggcccccccaccacaccctggtcctcccaggcagctgtcccagggcgcccaggcctgccttgcaccacagccctcaggaaatccggcaaggaggcccctgcaggttggttcaggcccccaggtagcaaaacagagacaacagcagccccgcctgaccccctgcccctctctgtggaggcccgggacccccgcaataagcaccacatgggtgaggctgtccctgtcagggtcccctgccagggtccctcctggggttctgggccatttgaggggctctttgatgggccaggccggccagagtgaactccgagcactttctggctggtgccccaacctctccactccccactcattcccaccttgaaaaagggctataggtcccctgccctgcccgggtccagtttacaaacagtgtggggtggccccagggcctggccccactctccctgctgtgcccactcctctccagactccacctccccagtgggtatgggccctccacatgccaggtaagtagcaaacccccactccctccaaggaccaggtctcagagaaggccctggtcactgcccccggcccacctggagcccatcggggctgcctctcccagccgcgacttctccttttgccttaggcctcgcgacatcctgatctctcctgcaataactaggaatcgagattccacagtagacgtcccttgccgtgctcgctctctctctcgcgcgctctctctctctctctctctctctctctctctctctcctctctttctctctctccctctctctgttaagatcctgttcgggagtttccccagccgttgtagtgtatagtatgttagagttgggaggggaccaatagttatgtagcccagccccctcattcccagaggcacccagagggccagcctccagcctgaccccagagcagaaccggaacaccaggttggggccctggtgctgccacctcctctgctggtcgggctgggaccctttgccccttaggagaggtgttggtcacagatgtttacctcagtttatgtcactgtcgaagaaacaaaaaataatagcaaaaaataacactgtagacatgaagacttagaagacaaaaaaaaaaaaatcacacaaaaaatctcccttgttgcgattcttctgtgaaggtacagtgtgtatgtgtgtatgtgtgtatgtgtgtgcgtgtctctgtcccagaccctgtgtcccccacactgccccctgtccttcggtgcttcccagagacccctctgagctggcctgtggggcacgggaagccccctggatgggaggcggggccacaggtcggctagagggtctccaccaggcccactgaacagaaccccacggctgccagaatgttccctgagcccacactgtggccagtgggacagtcctggtggctgacatcagcgtccatgcttggctcagggcctggggcggggtcctgggtagagtcctagccccagagccccagcccctcatgtcttgccgcccttcctccatgtgtttgtaaatactctggcatcctttggccctgagaaggtttttaaatgtgttatttacttctctaaacatgacgattgctataaaaataaacaaaagtttagaaaaatga

SEQ ID NO: 6496 - DNA, 4692 bp, Homo sapiens
attttggtttccaatgcctctttgaccacatcagtgcccacccctgttataaatagtacttttacccctacaaccctgcagactatcttttcagtaagcacttctgaaaacagcacttcagctttagctgatgtatcatggacccaatttaacatcatcattttgacagtcatcatcattgttgtggtgctgctaatgggatttgtgggggctgtatatatgtaccgcgagtaccaaaaccggaaactcaatgcccccttttggaccatcgagctgaaagaagacaatatcagtttcagcagctaccatgacagcattcccaatgcagatgtttcgggattgttggaagatgatggcaatgaagtggctcccaatgggcagctgaccctgacgacgcccatacataactacaaagcctaaggagctagaactgttctgaattgttaaaccacagtgcttgctaagacagagtcagcccctgggccagacaaagcctggctagagtttgctgagaaagcaaaggcaaatagtgcatctgaaattttcaggtacaaatttgtaatgcgcttagcctatctattgctcttagttttcccatgaagatctgaagcgttcactgtcattaggacttgaagtaaagtatatttttgtaccaaaccacatgggagtatggaaaggctgaaccccatagtgcagcccaaaaccactttgacctccagatagactcctggggaagcattcaccaagccagtggtaacaagatgatgaatgtggagggggaaaagactgctggaagacttcatctccattcctgaaacattttttttaaaacagtgtcagggattatattcgttttactatacaaaaggacatcattgaggaaaagcttgtttctaggctgtatcacagtaaataatcttgattgtttctagaacaggggtagaaaagtcccaagatcttcagaagggcttggttttttcctcccaggattcttgctcagtgatgagttgaaagcacaggataagcttctaagggaggaaggcagcattggggagcaggaggctgatggtcctcctcagggtctcagtgtaaatgataaattgtctaaaaataaggaatattcctgcctctagagaaataaggtgtacatagttaatgtagcatatctggtcgacgttgtatttgtatctatttgtaaaaaaaaaatcatgtcatattttatcatctggaatttatttgtacagcagttaatggtgttgtaaaaagaaaaatatggggattgcttaaaatactgtaaaatagatggcaatattgctagagctgggactctggtgagcatccgtcatttttagtccttcttgaggacattgctgaaatttataagaggtcgaatgtttctttctttcctttctcagtctaaaagtagagttatatgctctttgacttactatgattcaagcaatagattttgaagtcagtaatcgttaagctgggacataggatgcattctccaaaaacattaatctaattagacattagccaccctatatattttacatagattaatataaaacatatcctcattaaaaaatgtttttcttgaatgtaaaagatagtcttccaaaggatagaaatattttagttccaagagaaaagccatcatattacttgggatctgtagttttcatgcctatgaaatatttataatcctccctcaccccaaataaaaaatctcctacatgtgaacatagcctgtcactcatttgccatgaggtatgtgccatctccctgcagtgctatagttctcccattgtcttcctgtctggttaatgagcagctttgtagatgggtgtgtctagttagttcttgctttttgatggagttttttcctagaggccaactactgttgctctcgtttattatgatattgacattttgggttaagcaaggtgggtgggaaaggtggtcagatgttaaatataacttattaggaggaacagtgaactgtgaagtggttagaaaaaaaataaaaacttcttattagattagacctaggaaattcaagctgacccctttgcctaacttccctagagaaaaacctagaacttggtcatccctttataggagacccctaagttgttctcagggtttggagatgatgttctggagggagtacaagcaaataatctacttctggtaatctgagggtgctttgcgtatttggccattgctcagaagaatagaggttacattatattacattatatgaaaattatttagtttttctatagccctttgtagtttgcaaagcacttttccatatgtgtgtcctctcttccacaccatagccccctgaggaagtaattgttgtccccattttatagatgaaaaggctgaggcacagaggagctaaatatcttgttcaaggctatacaatgtgtgtgattattaggcttggaatcagggcctctaactctaaagcacatgttttttcaactatatgcagaaattgcctagccatggacacaagaaagctgggaggaagagttctacttgtggatgtttttaattttttttaaatatcaggagcaatccagggccatacagctatgaagcacttagtgaaaagaacacaagaagatttactaactgaagttagtattagtgattagaaaacaaaactgccagtttgtgcttcattaaggtgaactcatctctccaagcaggaagggaaaatttgctttccctagcagttgctgcatatgtgtgtacagactgcacaattctaagaaattgtgcaaaatggcatacctgtctttctcccagatacaccgccccctgccccccccaaaaaaggtcaggattaaaggtggtgagaagtgaacatttattaaacagaagttaaaccaatagagagaaaggaggtttgttggagtctaagaggattttgaccatgtagaaattccttgaaacagaccttaaaaggtattgaaaaattgaatcacaaagaaagtttacctttaaatacttgttaatggctcctagatcatggttataatttttctcaatgggaaaaaaagtcttaaaatttgttttaaataagatcctctaatgtctcgagctttttgattctggaaataatttgctttaaaatataaatcaatcagaaagtgatctaccactgaaatcattctaggaaactagcatgggatgcactgcacaatgttctttcctctaaaggcatgggccccataaactgtggcatctggcagcaggatgccatcagtcctttagaaagcctaattttgggccgggtgcggtggctcacgcctgtaatcccagcactttgggaggccgaggcgggtggatcacaaggtcaggagttcgagaccagcctggtcaacatggcgaaatcccgtctctactaaaaacacaaaaattagccgggtgtacgtgcctgtagtctcagctacttgggaggctgaggcaggagaatcacttgaacctgggaggcagaggttacagtgagccgagatggcgccatttcactccagcctgggcgacagagcaagactctgtctcaaaaaaaaggaagaaaaagaaagcctaatattgggagaatgtttgtgtaaggattggaaatctgtttatttttaaataagatagcactgatgtgaatcttatttggaaattacagatactgccattaagcgatgcttttatcttcattaattcattttggtaagcgcctatgcatttctgatggttaggtgccctaggtagtgttaagtatgtccgtgtcctcccttactcccctctcgctccctctaccctctatcccctagggttcttttattaatggaatttctccagttatagagaaaaaaatgacatttgaaaactaaagctcatttatattaatactaaggtcctgtgggcctagtgcgttactcttcccagtgatacctagattttaagagtagagaacagaggaaacatgggatgagaggagagaggttttttagacaacatttgtagacacctcaaattatatcactgttctctagcgccaatattcccaggtaaattgaccattaaagcaatactcactgacctactagtttattttggtcagctgagtaccatcaggatatttaaccctttaagtgctgttttgggagtagaaaactaaagcaacaatacttcctcttgacagctttgattggaatggggttattagatcattcaccttggtcctacactttttaggatgcttggtgaacataacaccacttataatgaacatccctggttcctatattttgggctatgtgggtaggaattgttacttgttactgcagcagcagccctagaaagtaagcccagggcttcagatctaagttagtccaaaagctaaatgatttaaagtcaagttgtaatgctaggcataagcactctataatacattaaattataggccgagcaattagggaatgtttctgaaacattaaacttgtatttatgtcactaaaattctaacacaaacttaaaaaatgtgtctcatacatatgctgtactaggcttcatcatgcatttctaaatttgtgtatgatttgaatatatgaaagaatttatacaagagtgttatttaaaattattaaaaataaatgtatataatttgtacctattgta

SEQ ID NO: 6497 - DNA, 4692 bp, Homo sapiens; identical to SEQ ID NO: 6496

SEQ ID NO: 6498 - DNA, 4692 bp, Homo sapiens; identical to SEQ ID NO: 6496

SEQ ID NO: 6499 - DNA, 1682 bp, Homo sapiens
aagctgaattggccgggcgcggtggctcacgcttgtaatcccagcactttgggaggccgatgcgggtggatcacgaggtcaggagatcgagaccatcctggctaacacggtgaaaccccgtctctactaaaaatacaaaaaaattagccgggcgtggtggtgggcgcctgtagtcccagctactcgggaggctgaggcaggagaatggcgtgaacccgggaggcagagcttgcagtgagccgagattgcgccactgcactcccgcctcggccacagagcgagacttcgtctcaaaaaaaaaaaaaaaagttaagctgaattaaaaacgtttttcatgagatgatagcattaggagtgttgacaggctgaaaatcaacattctatctaaatcaatgttaaaattgcagttttacctataagttagtctttcaaggcaattttatgaggaattattgtagtaattgtacaggctttctagtacttccgtgtacaaaatgaaagccatcagacaatgttaaatttacaatgtgctgcttgtttgtattaataataagtagattttaaaccttgtctgttgaatggaacactgcacttcaaacagttgcaaaagaaaacaggcaaaatgttttctttgtatgtaataagagtaggtttgggtaataaaagaagtatttgggaggaaatcttcttttgtggtttcctttgtgttgttagacaaactgctgaaattgtatatgtcagtattggttctttcaatctttgacccaaagaaggaaaagtctcagctcttgccacgttaattactattccaattcaaccatgttaaactcatacaatttcctacatatgccaggttatatgatgtcttcctcctttgctggtactgtttcccctacctataatatccttgagaatgctcattcattctttgcaaacctttgataaaggaaagttgatcaattcttaaatttgtacctccattttgcctaatgaatacttctactactgcatatattttattataaatacttgttagtttgtgccttccccagtgaactctgtattccttgaaattaggagcgtttattcttctgcctctggcatctggcatgttgctggtacattgtgggtgctcagtaagtgatggtttatgtacaaaaggtagttgacaatacaagagttggtatgtgaacttatttgttgaagtatggcaacaaaacttctattcagtggatacgataatatttcttattcaagagaggtgtcaattttacataggcttcagaggttctgagaaacccttgaaatttcatgccgttttgtttattgatgcaattgtgtttctttttttctggagagaagacccatactttaatcattgtctcaaaaggatccatgatcggcccggcacagtggctcatgcctgtaatcccagcattttgggagaccgagatgggtggatcacctgaggtcaggagttcgagaccagcctggccaacatggtgaaaccccatctctactaaaatacaaaattaagccaggcatggtggcgggtgcctgtgatctcacttactcagggggctgaggcaggaaaattgcttgaacctgggaggcggagtttgcagtgagccgagtttgtgccagtgcactccagcctgggtgacagagcaagactctgtctc

SEQ ID NO: 6500 - DNA, 2931 bp, Homo sapiens
aagctgaattggccgggcgcggtggctcacgcttgtaatcccagcactttgggaggccgatgcgggtggatcacgaggtcaggagatcgagaccatcctggctaacacggtgaaaccccgtctctactaaaaatacaaaaaaattagccgggcgtggtggtgggcgcctgtagtcccagctactcgggaggctgaggcaggagaatggcgtgaacccgggaggcagagcttgcagtgagccgagattgcgccactgcactcccgcctcggccacagagcgagacttcgtctcaaaaaaaaaaaaaaaagttaagctgaattaaaaacgtttttcatgagatgatagcattaggagtgttgacaggctgaaaatcaacattctatctaaatcaatgttaaaattgcagttttacctataagttagtctttcaaggcaattttatgaggaattattgtagtaattgtacaggctttctagtacttccgtgtacaaaatgaaagccatcagacaatgttaaatttacaatgtgctgcttgtttgtattaataataagtagattttaaaccttgtctgttgaatggaacactgcacttcaaacagttgcaaaagaaaacaggcaaaatgttttctttgtatgtaataagagtaggtttgggtaataaaagaagtatttgggaggaaatcttcttttgtggtttcctttgtgttgttagacaaactgctgaaattgtatatgtcagtattggttctttcaatctttgacccaaagaaggaaaagtctcagctcttgccacgttaattactattccaattcaaccatgttaaactcatacaatttcctacatatgccaggttatatgatgtcttcctcctttgctggtactgtttcccctacctataatatccttgagaatgctcattcattctttgcaaacctttgataaaggaaagttgatcaattcttaaatttgtacctccattttgcctaatgaatacttctactactgcatatattttattataaatacttgttagtttgtgccttccccagtgaactctgtattccttgaaattaggagcgtttattcttctgcctctggcatctggcatgttgctggtacattgtgggtgctcagtaagtgatggtttatgtacaaaaggtagttgacaatacaagagttggtatgtgaacttatttgttgaagtatggcaacaaaacttctattcagtggatacgataatatttcttattcaagagaggtgtcaattttacataggcttcagaggttctgagaaacccttgaaatttcatgccgttttgtttattgatgcaattgtgtttctttttttctggagagaagacccatactttaatcattgtctcaaaaggatccatgatcggcccggcacagtggctcatgcctgtaatcccagcattttgggagaccgagatgggtggatcacctgaggtcaggagttcgagaccagcctggccaacatggtgaaaccccatctctactaaaatacaaaattaagccaggcatggtggcgggtgcctgtgatctcacttactcagggggctgaggcaggaaaattgcttgaacctgggaggcggagtttgcagtgagccgagtttgtgccagtgcactccagcctgggtgacagagcaagactctgtctccaaaaaaaaaaaaaaaaaaaaaaaaaagatacatgatccccaaaggataaacaactaattgaaggattattacttcatttttcagcaatcaaaatcctcccactgaatgcaaattggcacaattggtaaattggtctttatttcaggaagtccacttctaggaaatcttcataaggaaatgacctaaaaagcagaggctccacaaaattttttttcagactggtgtataaagtttcaaaacttgggaataaattctagatgttcaagaacagagatgtagcctggcacggtggctcacacctgtaatcccagtactttgggaggctgaggcaggtggatcacttgaggtcaggagttcgagactagcctgaccaacatggcgaaaccccgtctctactaaaaatacaaaaattagccaggtctggtggcgcatgcttgtaatcccagctacttgggaggctgaggcagaatggcttgaacctgggaggtggaggttgcagtgagccgagatcatgccattgcactccagcctgggagacagagtgagacgccttctcaaaaaaaaaaaaaaaaaagaatagagatgtagtttagtgcatatacttcatgagataacatacagtcactaagagggattagggagaattattaaaaactgaatcaaagttaaatgaagaaaaatggtttgttttgaagatgtgcatgtaatttcactcctggtatatagtttagagaaactcatatatgtgcaccagaagctgcatttcaaattcttcactgcagcattatttattatagcaaaataattggaaacagtccaaatgtctgtcagtagaagaactgtggtctatccatatactttgaacagaattttatgcagccgtggaaaatgaatgaattacagctatatacatcaatgtggatgaatcacaaaaacaatgttgagcaaaaaaaagtaagtcatagaggccaagtatgtaatcccagcactttgggaggccgaggtgggcagatcacttgaggtaaggagttcgagaccagcctggccaacatggtgaaaccccatctctactaaaaataccaaaattagccaggcgtggtggcaggcacctgcaatcccggctactcgggaggctgaggcaggagaatcgcttgaacctggaaggcagaggttgcagtgagccgagatcatgccactgcactccagcctgggtgacagagtgagactctgtctcaaaaaaaaaagaaa

SEQ ID NO: 6501 - DNA, 161 bp, Homo sapiens
attggccgggcgcggtggctcacgcttgtaatcccagcactttgggaggccgatgcgggtggatcacgaggtcaggagatcgaggccatcctggctaacatgcagaaaccccgtctctactaaaaatacaaaaaaaaaaaaaaattagccaggtgtggtgg

SEQ ID NO: 6502 - DNA, 9139 bp, Homo sapiens
agaagaacggaaggaacagagggggcaaagccaacaaccccccgtatttgccccccgaggtgagcacctgagaagtggtagggcgggaagaagccactctttccggcccaggactctagggaggcgggacccagataattaatctccccttccggtgtcgagaccccagggaggaggggcacgggaggagaacacctctttcaggtcccgggaccccagggaggaagggcagagactggactctcaggtgacaggacctcagggaggaagagtggagagggaggactcccccttctgatctagattaccccaggagagaagtagagaaaggggatcccaggaagagcaccccgaccaactgcgtgtgccgccatagggcaagagagactgcatcctgggacgagaggcagacagtaaccaccacttcttctaaacttgttccacagggagaaggggagtacccgggaaaagagcaatatgttccacacggacacacacacagtactcgggaaaagagcagtatgttcactacacacacacacacacacacacacacacacacacagcctaagccagtggttatcaaactttggcatgtatcgaatcacccggattgctggcccccaacgcctggccaattttatttttttattatttatttatttattttttttgagacggagtctctgttacccaggctggagtgctgtagggctatctcagctcactgcaacctcggcctcccgggttctcaagcgattcttctgctgcagcctcccgagtagctggcattacaggtgcccgccaccacgcccagataatttttgtatttttagtagagatggggtttcaccatgttggccaggctggtctcaaactcctgacctcaggtgatccacccgcctcggcctcccaaagtgctgggattgcaggcgtgagcctccgtgcccagcctagaatttctgattctttcttactagtgaggatgggcctgagaatttgcatttcttataagttcccgtgtgatactaatgctgctggtcccaggacctcactttgggaaccattggtctgggccctagactgtcattcttgtaccacattttttgaagccacccatccccagaaaaatgattaaaaggtttttattgatggggaaaaaaaataatctccttaacacaccatgaagtggagattatgagtgaagacctgttagggcctgggagccagacagccttgaagggatggaatgataggaagggaagaggaaaactaaaatatccagagaggcgggtagaaaaatgcagactggccaaacaggcaaatcccatatccctttgtacctgggaggggaagcctcaggtaacagggtgcttctgtgctgtgctacccactggagctagaagagactgtggggtggattcaggatttcacctccactgaggttagggggcaagaggtaaaggccatagcgagtctgtccgcttcattacattttctgagtttttctgttcctctcagccccagctttggagctcttctcctctctcacctagatcttctcggtcatcaggcttgtagtgaccattgctgagctcaccctttggctctgatccagaacctcttgcagcctcttactctagatgacatcagctgaaaggggcaggcagggaggaaatggtgtttcctagaccagtgacaaagaaaggttttaacagcctgggcacagaggagacatagacttctgggaaaagcaggtttgaggccctggaggtggggaggaagggatgatcttgcatctaggaagaacgtgctgccagtgatcaaagaatggattgattcagtgttctgttcctggcttaaatgggtgactccttgtgtccttataggccttcccttcatagaggctatgctgggggtgaatagaggatcttgtctgccactgacctttgacaggcacttgcctaaccaagtgccagtggggcttcctgctttctcaagttagctacctggacccagtgggaattgaggggaagtagggattgggtctgtacagtgtatggtaactgctcactgtttcttttcaggctgaagatggaaacattgaatataaagtgagtcctaggctggggaaaagcaggggctggggtaggttgtccttgccagtgtgggataatttcttttttctttctttcttttttttttttgagatgaagttttgctcttgttgcctaggctggagtgcagtggcgcaatctcagattctcctgcctcagcctcccaagtagctgggattacaggcatgcgccaccatgcctggctaattttgtatttttagtagagatgaggtttctccatgttggtcaggctggtctcgaactgctgacctctggtgatccaccagcatgggataagttctctgagagccttccaacttcataattatagcagtttaaggatatggttcaggttaagggctctgtacctcgttctgttggagggggatcaggtatgagtttaagtggaaagagaaagtcctggtccttgcagcagaacaggtggggaccatgtaggtttgggaggaacacctctgatttcaccttatgataccccacttgccctaagttgaagctggtgaatccatcccagtaccgctttgagcacctggtgacacaaatgaagtggcggctccaggagggacgtggtgaggccgtctaccagattggggtagaggacaatgggctgctggtggggctggctgaggaggaaatgcgagcttcgctcaagaccctgcaccggatggcagagaagtatgcttccccttccccaccagttctcctttacctgacttggggggacccatgcatacccagttacctagggcctgaggggccaaggtgggactttccttctcttgacaaagggctgaagtggggagggttagtgttttggtcccctcctcactggacctaggctgttttgctccttgaattaagatatgtatatttgttttaaagggaactgtgaatgaggaatagattggagggtggtaggaagtgcactaaggtattgggagctctgtgggaggtgcaggaagtctgtaggtccagagcgagcctggaataggagaaggacaggtgagatatggcagctgtggccttgctgtgacagggttggggcagacataaccgttcttcgagagcgagaagtggattatgatagcgacatgccccggaagatcaccgaggtgctagtacgaaaggtccctgacaaccaacaggtgagcacacacccatccctgtctctcatgtccacactgtggaagggccctgtggtggcaggctgtctcctggcctgggatcctgggggcttccagttcatcacttgctccctagggagcgtcactgcccttgacccagtcttcagttagaggggtgagagattggagttcttatctctggcaattcatccacagttcctagacctccgtgtggccgtcctggggaatgtggactctgggaagtcaactctgcttggagtcctgacccagggagagctggacaatgggcggggccgggctcggctcaaccttttccgccacctgcatgagattcagtctggccgaacctccagcatcagcttcgagatcctgggctttaacagcaagggagaggtgcatgggatcaatgggacccaatggggccagactctgaggatgggatggtagtagtgaaggacataggatgggggtagagtgtggagactttttgaaatagtatagatgaatgccctgaggggactgtgaacaagctctgcccctcttaggaaatcaatggggaatcaactaaattaaataaaaaatggggtcaagattaagaggcagggtcacccagggaatggtttaggtcctggcaactctgaaggggttggaagggctggcaggaggcactgagggccctgggccctgggccaggtggtgaattacagcgactcacggacagcagaagagatctgtgagagcagctccaagatgatcaccttcatcgacctggcaggccaccataagtacctacacaccaccatctttggcctcacatcatactgccccgactgcgccctgctcctcgtcagtgccaacactgggattggtacgaggcattagggcagggacagggctgaaggggggtgctgactctcctaccctgggcctcaaatcttggagacagaccaatgctcctcttcttccctctcctccctcctgcattctcactcttctctcctgctgcttgctgtccttatgaggcagctggcaccacaagggaacatctggggctggccctggccctgaaagtgcccttcttcatcgtggtcagcaagatcgacctatgtgccaagaccacagtggagaggacagtacgccagctggagcgggtcctcaagcagcctggctgccacaaggtccccatgctggtcacctctgaggatgatgccgtcactgctgcccagcagtttgctcagtcacccaagtaagcccaccttactctaaagccctgatccactaggaaggctgccacagagcccagggcccagaagcatgatatcctacttctccagggccagaccagttctggcttagttctgcgggtgtttcagcttgggattgtggaggggcatcttgctaaagggcttgaccctcctcccgagccaacctggagcactgctgatgcctgggaccatggcgatgaagtgctataccaggcatttgctgtttcccttgggctcggatgggctttttgtgtgacattgctcgactggctcacaagaaggcccagagttcctgagccatttgcagacaggagagaggggcccccagccagaacaaagctcacctttccatgtatggggctctggcctctgcctcctgtttggactgtcttcatctgtccattccatgcctccctctacagtgtcacccccatcttcacattgtccagtgtgtctggagagagtctggacctcctcaaagtctttctgaatattctgccgccactcaccaacagcaaagagcaggaggaactcatgcagcagctgacggagttccaggtagttgactgcccaaacatctaataggctgggaaacagggaggggctgcttcagaccaaacccagagtctgtttagagattttggacccaccagccctacttggcaggccattgatagcgttttctttggcttcaggtggatgaaatctacacagtaccagaggtggggactgttgttggaggaacactttccaggtaaattgtcttgcttgctaccctccccactcagccctcacctatatactcaaagacatcctggcccaaaggaggagaccctggaattgaacggaacccatttaaaggacatgcttatttgcagattaggctttcactatcagaagagctggagaacggtagtctgttggctttggagggaagaaacagtattgctgcctattggggaatctccaggcccctgagagagaagtgtgggtcttgagctccaggaagaaaactagagtgtattcaactgacttcatctcacacagggaaatgagagacgtcacttaagactcttctttctttctttctttcttttttttgagacagagtctcgctctgttgcccaggctggattgcagtggagcgatcttggctcactgcaacctctgcctcctgggttccagcaattctcctgcctcagccttgagtagctggaattacaggcgcctaccaccatgcccggctaatttttgtatttttagtagagatggggtcgtcaccatattggccaggctggtcttgaattcctgacctcaagtgatccacctgcctcagcctccccaagtgctaggattacaggtgtgagccaacgcggctggcctaagactctgcaaagcagagaatgaaacccaaggggataacttgctccttcagtgattaggtgttcggtgttgttaaaccagcaagtgtctctctgtccaccatcactgctggccttttatgaaattagtcttctgattctgaactctggcagtgagccctgttacatccaagtcagaatttagggttcttccccacttgagggactcaaccctagaagggaaggaatgctctgggtgatcctaatagagaagtaggtatggggaccttggctgacactgtgccacctgccctctgggctgcagtgggatttgccgtgagggggaccagctggtggtgggccccacggatgatggctgcttcctggagctgagagtatgcagcatccagcgcaaccgctctgcctgtcgtgtgctgcgagctggtcaggctgctacactggcgcttggggactttgaccgtgcactgcttcgcaaggtgaggtgggtgcatgggttggggagggaacgctaagagaagtgcctaggagactggctactgaatgagcacctatctaaggtgcttcagagaaactcagaggaaacacactctctgacccaagaagcttctggtctagctacgtagactataaaaacagcttaacgtactcatgaggtacagataactaaatatgaatcactatgttacactgtttttaatgaacactatttttagtgttcaggaccctaaaaatgtgaagcgttagatgggctagaggacgtaggaggtgggtaaagactcattccctctgagagttttgattattgtcttttgaggtctttgtgtttagagttgtgtagaggaagaggaaattcaggagctataaagggtgtggggtggctggggagggagagtctgatgttagagctgcccttcctgggcctggggtctgttcctccccagggcatggtgatggtgagcccggagatgaatcctaccatctgctcggtgtttgaggcagagatagtcttactgttccatgccaccaccttccgacgaggattccaggtgacagtacacgtgggcaacgtacgtcagacggcagtggtggaaaagatccatgccaaggtgagagggacctggccttccatttctccagaggtcagaaaagagggaggcctgccccagactggcagagaactccttgatcccacaatgggaataaaaccccacttagggtgggtagcggcctgataggcctctggagggtggagagccacggctggcagagaatgggacagaaggcactggccaggggagtgaccacttatttgctgcaggacaaactgcggacaggcgagaaggcagtggtacgtttccgcttcctgaaacacccagagtacctgaaggtgggcgccaaactgctgttccgggagggtgtcaccaagggcatcggccatgtcactgatgtacaagccattacagcaggagaagcccaggccaacatgggcttctgaacccttcaggcagggacagttctattgctgtccctacaatatataaggtgacttctggccatgctgccctgccattggcggctctgtgtgttaataggctagggagagaggggtgctgtctgccacttgctccctgccaactttctggagaggtgccaaacttggtgtggccaggaaagggcagtcctgagggagaagacaggattcagggcagtgctccgaagctgtgtgctcacctggttggctcatcaaacctggcaaccctgtggcctgtctgccggagctgactggatccactcatcaattcttcgtccccactactaagactgggcatgttttgctggtgtggtctctgcacttcaggaatggtcacaacagggggtagccctcaaaagcactcctttttctatacctcttctcaaggccatgtaagttgcccatctctacctggctgtggacaaaaggttatctgctcttggccatctggtggtggtggcggcccagagtctgaagaaatggcacagggacagtgaatggtagtgttgccaccctgtgctgaggcctgaggcctcttcctcagctttatctccctttccttcactcaagggccatttccccagtccctatctcccccatcccctcccggcttataggccccacaggtgctatttgttgtgctggcccaggcgtggggctaccaagcaaaggcttggcatataccaaaggccagctgcatgcccatcagtctggtctttttcctctgcggtcatgttggctttcatgctggatcaaatgttttactttcccagactggtggcatctgagttccccatcctaccactctcaccccactttcctgccccacctaaaccctcgttttagtaatttgtagtgactgttcccttccctctgttgcagggaaccaggaggaaagggaaagatgttgccatatttcctactctttaggcatggactctcctttccctttgttagtgtcctgggttcccatggactcagggatttgttggctaaggtttctctgtgcatatatatatatatacatatgtatatatatttaaatacacatatatattgtacagaataaaaatgttttattgaatacactgtgcttatgcgttagctacaggctcagcttccttccagggctagatacctcttcaggattagagacaagtgaaaccccaacactgctgagccctgaatgtggaaagagcccagctggtatctcgttcaccattgtttttctctcctccacataggttcagagttccagtattgtaaccaagtattgtggcctattttccgtagttcaagtgagcagaatactgaggcctttcacgtgaaataggtagctaccctgtatttgaagagttggccacttgctagtggtcagaatagtaaggagcccacttctgtgccctggcagagatacagtgccagctacttaaagaagagtagaatttagagacaaaaggtaatctggtcccatatttttcaagtttacatagcctaaattactcttggaacaatgagggccacttgaccaaaccttagtccctgctcctgtttccatgttcatactacttgattttgacattttatgggtaaataggggccaaagtcaactgtaaatagaaactgcattttgaggagaccctggaaaagaaatatgtgacccaaagtcctatgtggcatt

SEQ ID NO: 6503 - DNA, 7210 bp, Homo sapiens
  SITE (1157): n equals a,t,g, or c
gatcttgtctgccactgacctttgacaggcacttgcctaaccaagtgccagtggggcttcctgctttctcaagttagctacctggacccagtgggaattgaggggaagtagggattgggtctgtacagtgtatggtaactgctcactgtttcttttcaggctgaagatggaaacattgaatataaagtgagtcctaggctggggaaaagcaggggctggggtaggttgtccttgccagtgtgggataatttcttttttctttctttcttttttttttttgagatgaagttttgctcttgttgcctaggctggagtgcagtggcgcaatctcagattctcctgcctcagcctcccaagtagctgggattacaggcatgcgccaccatgcctggctaattttgtatttttagtagagatgaggtttctccatgttggtcaggctggtctcgaactgctgacctctggtgatccaccagcatgggataagttctctgagagccttccaacttcataattatagcagtttaaggatatggttcaggttaagggctctgtacctcgttctgttggagggggatcaggtatgagtttaagtggaaagagaaagtcctggtccttgcagcagaacaggtggggaccatgtaggtttgggaggaacacctctgatttcaccttatgataccccacttgccctaagttgaagctggtgaatccatcccagtaccgctttgagcacctggtgacacaaatgaagtggcggctccaggagggacgtggtgaggccgtctaccagattggggtagaggacaatgggctgctggtggggctggctgaggaggaaatgcgagcttcgctcaagaccctgcaccggatggcagagaagtatgcttccccttccccaccagttctcctttacctgacttggggggacccatgcatacccagttacctagggcctgaggggccaaggtgggactttccttctcttgacaaagggctgaagtggggagggttagtgttttggtcccctcctcactggacctaggctgttttgctccttgaattaagatatgtatatttgttttaaagggaactgtgaatgaggaatagattggagggtggtaggaagtgcactaaggtattgggagctctgtggnaggtgcagaaagtctgtaggtccagagcgagcctggaataggagaaggacaggtgagatatggcagctgtgcccctgctgtgacagggttggggcagacataaccgttcttcgagagcgagaagtggattatgatagcgacatgccccggaagatcaccgaggtgctagtacgaaaggtccctgacaaccaacaggtgagcacacacccatccctgtctctcatgtccacactgtggaagggccctgtggtggcaggctgtctcctggcctgggatcctgggggcttccagttcatcacttgctccctagggagcgtcactgcccttgacccagtcttcagttagaggggtgagagattggagttcttatctctggcaattcatccacagttcctagacctccgtgtggccgtcctggggaatgtggactctgggaagtcaactctgcttggagtcctgacccagggagagctggacaatgggcggggccgggctcggctcaaccttttccgccacctgcatgagattcagtctggccgaacctccagcatcagcttcgagatcctgggctttaacagcaagggagaggtgcatgggatcaatgggacccaatggggccagactctgaggatgggatggtagtagtgaaggacataggatgggggtagagtgtggagactttttgaaatagtatagatgaatgccctgaggggactgtgaacaagctctgcccctcttaggaaatcaatggggaatcaactaaattaaataaaaaatggggtcaagattaagaggcagggtcacccagggaatggtttaggtcctggcaactctgaaggggttggaagggctggcaggaggcactgagggccctgggccctgggccaggtggtgaattacagcgactcacggacagcagaagagatctgtgagagcagctccaagatgatcaccttcatcgacctggcaggccaccataagtacctacacaccaccatctttggcctcacatcatactgccccgactgcgccctgctcctcgtcagtgccaacactgggattggtacgaggcattagggcagggacagggctgaaggggggtgctgactctcctaccctgggcctcaaatcttggagacagaccaatgctcctcttcttccctctcctccctcctgcattctcactcttctctcctgctgcttgctgtccttatgaggcagctggcaccacaagggaacatctggggctggccctggccctgaaagtgcccttcttcatcgtggtcagcaagatcgacctatgtgccaagaccacagtggagaggacagtacgccagctggagcgggtcctcaagcagcctggctgccacaaggtccccatgctggtcacctctgaggatgatgccgtcactgctgcccagcagtttgctcagtcacccaagtaagcccaccttactctaaagccctgatccactaggaaggctgccacagagcccagggcccagaagcatgatatcctacttctccagggccagaccagttctggcttagttctgcgggtgtttcagcttgggattgtggaggggcatcttgctaaaaggcttgaccctcctcccgagccaacctggagcactgctgatgcctgcgaccatggcgatgaagtgctataccaagcatttgctgtttcccttgggctcggatgggctttttgtgtgacattgctcgactggctcacaagaaggcccagagttcctgagccatttgcagacaggagagaggggcccccagccagaacaaagctcacctttccatgtatggggctctggcctctgcctcctgtttggactgtcttcatctgtccattccatgcctccctctacagtgtcacccccatcttcacattgtccagtgtgtctggagagagtctggacctcctcaaagtctttctgaatattctgccgccactcaccaacagcaaagagcaggaggaactcatgcagcagctgacggagttccaggtagttgactgcccaaacatctaataggctgggaaacagggaggggctgcttcagaccaaacccagagtctgtttagagattttggacccaccagccctacttggcaggccattgatagcgttttctttggcttcaggtggatgaaatctacacagtaccagaggtggggactgttgttggaggaacactttccaggtaaattgtcttgcttgctaccctccccactcagccctcacctatatactcaaagacatcctggcccaaaggaggagaccctggaattgaacggaacccatttaaaggacatgcttatttgcagattaggctttcactatcagaagagctggagaacggtagtctgttggctttggagggaagaaacagtattgctgcctattggggaatctccaggcccctgagagagaagtgtgggtcttgagctccaggaagaaaactagagtgtattcaactgacttcatctcacacagggaaatgagagacgtcacttaagactcttctttctttctttctttcttttttttgagacagagtctcgctctgttgcccaggctggattgcagtggagcgatcttggctcactgcaacctctgcctcctgggttccagcaattctcctgcctcagccttgagtagctggaattacaggcgcctaccaccatgcccggctaatttttgtatttttagtagagatggggtcgtcaccatattggccaggctggtcttgaattcctgacctcaagtgatccacctgcctcagcctccccaagtgctaggattacaggtgtgagccaacgcggctggcctaagactctgcaaagcagagaatgaaacccaaggggataacttgctccttcagtgattaggtgttcggtgttgttaaaccagcaagtgtctctctgtccaccatcactgctggccttttatgaaattagtcttctgattctgaactctggcagtgagccctgttacatccaagtcagaatttagggttcttccccacttgagggactcaaccctagaagggaaggaatgctctgggtgatcctaatagagaagtaggtatggggaccttggctgacactgtgccacctgccctctgggctgcagtgggatttgccgtgagggggaccagctggtggtgggccccacggatgatggctgcttcctggagctgagagtatgcagcatccagcgcaaccgctctgcctgtcgtgtgctgcgagctggtcaggctgctacactggcgcttggggactttgaccgtgcactgcttcgcaaggtgaggtgggtgcatgggttggggagggaacgctaagagaagtgcctaggagactggctactgaatgagcacctatctaaggtgcttcagagaaactcagaggaaacacactctctgacccaagaagcttctggtctagctacgtagactataaaaacagcttaacgtactcatgaggtacagataactaaatatgaatcactatgttacactgtttttaatgaacactatttttagtgttcaggaccctaaaaatgtgaagcgttagatgggctagaggacgtaggaggtgggtaaagactcattccctctgagagttttgattattgtcttttgaggtctttgtgtttagagttgtgtagaggaagaggaaattcaggagctataaagggtgtggggtggctggggagggagagtctgatgttagagctgcccttcctgggcctggggtctgttcctccccagggcatggtgatggtgagcccggagatgaatcctaccatctgctcggtgtttgaggcagagatagtcttactgttccatgccaccaccttccgacgaggattccaggtgacagtacacgtgggcaacgtacgtcagacggcagtggtggaaaagatccatgccaaggtgagagggacctggccttccatttctccagaggtcagaaaagagggaggcctgccccagactggcagagaactccttgatcccacaatgggaataaaaccccacttagggtgggtagcggcctgataggcctctggagggtggagagccacggctggcagagaatgggacagaaggcactggccaggggagtgaccacttatttgctgcaggacaaactgcggacaggcgagaaggcagtggtacgtttccgcttcctgaaacacccagagtacctgaaggtgggcgccaaactgctgttccgggagggtgtcaccaagggcatcggccatgtcactgatgtacaagccattacagcaggagaagcccaggccaacatgggcttctgaacccttcaggcaggacagttctattgctgtccctacaatatataaggtgacttctggccatgctgccctgccattggcggctctgtgtgttaataggctagggagagaggggtgctgtctgccacttgctccctgccaactttctggagaggtgccaaacttggtgtggccaggaaagggcagtcctgagggagaagacaggattcagggcagtgctccgaagctgtgtgctcacctggttggctcatcaaacctggcaaccctgtggcctgtctgccggagctgactggatccactcatcaattcttcgtccccactactaagactgggcatgttttgctggtgtggtctctgcacttcaggaatggtcacaacagggggtagccctcaaaagcactcctttttctatacctcttctcaaggccatgtaagttgcccatctctacctggctgtggacaaaaggttatctgctcttggccatctggtggtggtggcggcccagagtctgaagaaatggcacagggacagtgaatggtagtgttgccaccctgtgctgaggcctgaggcctcttcctcagctttatctccctttccttcactcaagggccatttccccagtccctatctcccccatcccctcccggcttataggccccacaggtgctatttgttgtgctggcccaggcgtggggctaccaagcaaaggcttggcatataccaaaggccagctgcatgcccatcagtctggtctttttcctctgcggtcatgttggctttcatgctggatcaaatgttttactttcccagactggtggcatctgagttccccatcctaccactctcaccccactttcctgccccacctaaaccctcgttttagtaatttgtagtgactgttcccttccctctgttgcagggaaccaggaggaaagggaaagatgttgccatatttcctactctttaggcatggactctcctttccctttgttagtgtcctgggttcccatggactcaaggatttgttggctaaggtttctctgtgcatatatatatatatacatatgtatatatatttaaatacacatatatattgtacagcccaaaaatgttttattgaatacactgtgcttatgcgttagctacaggctcagcttccttccagggctagatacctcttcaggattagagacaagtgaaaccccaacactgctgagccctgaatgtggaaagagcccagctggtatctcgttcaccattgtttttctctcctccacataggttcagagttccagtattgtaaccaagtattgtggcctattttccgtagttcaagtgagcagaatactgaggcctttcacgtgaaataggtagctaccctgtatttgaagagttggccacttgctagtggtcagaatagtaaggagcccacttctgtgccctggcagagatacagtgccagctacttaaagaagagtagaatttagagacaaaaggtaatctggtcccatatttttcaagtttacatagcctaaattactcttggaacaatgagggccacttgaccaaaccttagtccctgctcctgtttccatgttcatactacttgattttgacattttatgggtaaataggggccaaagtcaactgtaaatagaaactgcattttgaggagaccctggaaaagaaatatgtgacccaaagtcctatgtggcatt

SEQ ID NO: 6504 - DNA, 9139 bp, Homo sapiens; identical to SEQ ID NO: 6502

SEQ ID NO: 6505 - DNA, 502 bp, Homo sapiens
ttttgagacagggtctcaaactgtcacccaggctggagtgcagcggcacaatcatggcttattgcagccccaaactcccagattcaggggatcctcccaacctcagcctcctgagtaggtacgactacaggcataagccaccatctttgtattttttgtaaagactgttttgccatgggggctaggcccggttttgaactccagggctccagtagtccacccaccctcagcctcccaaagtgttaggattacaagcatcagccaccgggactggctaaatattgtcttttattagatattcaagtatcataaaagcagaaaatatttttgaagaaaaaaattaaaaggtaaatctagtggttttcaaatcttccccacctcttcaaactaaatatagaaccccccccccaatttataaataaaataaaaagtagaagttggggctggcctggtggctcaggcctgtaatcccagcactttgggaggccagggcgggtggatc

SEQ ID NO: 6506 - DNA, 123 bp, Homo sapiens
ggactcgcgggtatcggagctgttcggcggctgctgccggcccggagggggcccggccgtgggcggaaccctcaaggctaggggggccggcagcagcagcggctgcggggggccaaagggaaa

SEQ ID NO: 6507 - DNA, 132 bp, Homo sapiens
atttttgtatttttagtagagatggggtttcaccatgttggccaggctggtctcaaactcctgacctcaggtgatccacccgcctcggcctcccaaagtgctgggattgcaggcgtgagcctccgtgcccag

SEQ ID NO: 6508 - DNA, 602 bp, Homo sapiens
ttttgagacagggtctcagactgtcacccaggctggagtgcagcggcacaatcatggcttattgcagccccaaactcccagattcaggtgatcctcccaacctcagcctcctgagtaggtacgactacaggcataagccaccatctttgtattttttgtaaagactgttttgccatgtggcttaagccggttttgaactccagggctccagtagtccacccacctcagcctcccaaagtgttaggattacaagcatcagccaccgtgactggctaaatattgtcttttattagatattcaagtatcataaaagcagaaaatatttttgaagaaaaaaatttcctggtaaatctagtggttttcaaatcttccccacctcttcaaactaaatatagaaccccccccccaatttataaataaaataaaaagtagaagttggggctggcctggtggctcaggcctgtaatcccagcactttgggaggccagggcgggtggatcacttgagatcaagagttcaagaccagcctggccaacgtggcgaaaccccatctctactaaaaatacaaaaattagccaggcgtgatggtgcatgcctataat

SEQ ID NO: 6509 - DNA, 123 bp, Homo sapiens; identical to SEQ ID NO: 6506

SEQ ID NO: 6510 - DNA, 602 bp, Homo sapiens
ttttgagacagggtctcagactgtcacccaggctggagtgcagcggcacaatcatggcttattgcagccccaaactcccagattcaggtgatcctcccaacctcagcctcctgagtaggtacgactacaggcataagccaccatctttgtattttttgtaaagactgttttgccatgtggcttaggccggttttgaactccagggctccagtagtccacccacctcagcctcccaaagtgttaggattacaagcatcagccaccgtgactggctaaatattgtcttttattagatattcaagtatcataaaagcagaaaatatttttgaagaaaaaaatttcctggtaaatctagtggttttcaaatcttccccacctcttcaaactaaatatagaaccccccccccaatttataaataaaataaaaagtagaagttggggctggcctggtggctcaggcctgtaatcccagcactttgggaggccagggcgggtggatcacttgagatcaagagttcaagaccagcctggccaacgtggcgaaaccccatctctactaaaaatacaaaaattagccaggcgtgatggtgcatgcctataat

SEQ ID NO: 6511 - DNA, 1756 bp, Homo sapiens
gcggccgcgagcccggagcctgcccgcgcgcccccggaacccgcgcccccggccgaggccaccggggccccggcgccgtcccgcccctgcgcccccgagccggcggcctcgcccgcggggccggaggagcctggagagcccgcggggctgggggagctcggggagcctgcgggaccgggggagcccgaagggccaggggatcccgcggcggcgccagcggaggcggaggagcaggcggtggaggcgaggcaggaagaggagcaggacttggatggtgagaaggggccatcatcggaagggcctgaggaggaggacggagaaggcttctccttcaaatacagccccgggaagctgaggggaaaccagtacgagaagatgatgaccaaagaggagctggaggaggagcagagaactgaagaataacgaagttatccttagcgtcctcctaaaggcttttccttttggcatcttaaaagcttgagagataaaatggaaaccccagagaggagtctgggcaggcgcccagggtgcatgctgcctccataaatctgctgagctctagaccctcaatcaggacttgtcccttggctagcaggatcctgagaacacctttggccctgccctgtgtagagatgttcatgtctgttcctgtgggtcactttgttaagctgaagagttttaagagttagagctcagaccctggactgggatttttcttaccactcaaacttgctatccacacaccctgcacaccttagataaaacgaacattttaaaagcagagttcactttcactccagtcccccctcttttgccctcactgaagccaaaccacagaagactttgaggaatgagagacaaatgaggtagagctcacctgtgctcaccagctccgtcagggtggtcagccgacccttttccctgggaaccccacttctctctctggctggcttggttgtcgggggtgagatgccatattgattacagggcagcaaagaaccagtaccaggaatttacttgaccattccccttatttttcatctagaggaatctcggattcagccctttcattgctaagacaccttttcactgaggttcttaccagctcagccaaatctccactctgctatagcagaagcaataatgtttgctttaaaaagatttcttgacctatgccttttcttagaaagtttgatagattagttagaacttcagatcatcagatcagtctcaaatgcgtttcttggaattttatatttgacaatatttatactataccaaactcatttgcagttcttaggtttgttggttaaaacatttttttaaagcagtaagtttatagaaaatgttttcatttaatggaaggctggggaatgtccagcatcaacccctatggcatgcattcccagtggccttctcatctgggcctggaacctttggttcagggcttaggggagaacaggccacatggcaacagccacacagtcattgccttcaacacagagccacgtgtccccaaacagcaatagtcatgcccttgtccaggctgggatctaattgatacaataggtcgttgactccctcctagtagagctatctaggtttgtctggaaagtttccgaccctggcttataggcaccacacctcatgtactcctcatggcttggatctctgtattcagcctttgttcagtccaataaactttgagtagatgatctcaaaaaaaaaaaaaaaaaaaaattcattaacaaaataa

SEQ ID NO: 6512 - DNA, 359 bp, Homo sapiens
aagatgtatactataaaccctaaagcaaaaaataaactaacaaaacaagttatagctagaaattcaacaaaggggatataatggaatcattacaatatccaattaatctcaaaggagtcagagaaaggaaaaaaatgacaaaagaacaaatgagaaaattattaagcaaacagcaaaatgaaagatttaaacttaacgacattcaataattttgtgaaatgtaaattacttaaatatctgaattaaaaagctgagactatgactggattttaaaaaaaaaaagcaaaacacaacatctcaaaatctaactacacgctgcctacaagaaacttatttcaaataggttaaataaagatcca

SEQ ID NO: 6513 - DNA, 893 bp, Homo sapiens
aaaatatctaccataacactttacattttttcttctgtaattagaaaatatgataattttttttcaccaggcactgtgtagatgcctccaaatgccctcctgttgtccagtgtgctaaatttttttttgctgacaagttttgtttgcaatgttaaaagggttgagaagcatcattctagtcaaatgtactcattttgtatgaagaaaactgaaatctacatagcaggctcagggatttgtccagtgtcctacagttggttggtgtgaggctggatttgaaaattggggatcttggatcttgactcttcagctctcatcacctcacactgaccccctctccccccgaaacatgagggaatattggaggaaggcattgatgataattgaaagacaaaaatacagaacctcagaggaattattaaaagaactgcacatatgtagttcagaaatctttgagaccctactgtatctaatagtgcttagaatcttcttatataataatattattaatattctataatctagaatagattatagtaggattcgttttatgatgacttgggctgtatctttaagaaaacaaaagattatagcaaaaggagtttagggcaaacataaataaaaattgatactaaaatcgtatgtatgctatttccaaaaaagggaggagggaatatatgagacctttcaagttcctctggtactataattacattttctctcatcttgcttttgattggattagaattcacgcaattaaagataatctagggccaggcacctataatcccagcactttgggaagcagaggcaggaagattgcctgagcccaggattttgagaccagtctgggcaacatggcaagaccccgtctctttaaaaaaaaaaaaaaa

SEQ ID NO: 6514 - DNA, 2152 bp, Homo sapiens
gacgttatgccactgcattccagcctgggcatgacagatcgagaccctgtctcagaaaaacagaaaagaatcttgtttgtaatactttaaaatactgtaaatagtatataaatagcaagttttgtttttatttctaattactgaaagtaattgctattttatcttttctatagttttattagactcctttttagaattatgtgattaaaattgttacttattcaatattgaatatctgtgttcaatacaatattgaagccagcctctgcttgactaggagaaaaaaacatccttattcactgtcatcgagtttgtagctttgtggtaaatacagataaaaacagcagttacaatataatgattgtaatgttcttgtcttatttcactttatttcataatcttattctgtagaaacatagtgatttcattggaattattttcctttatgggttttttgaaccaaaattagcacacattggattataatggaattgtttctaggtttattttctccactagattagaaacaagaaagcccaggcctttttctacaactaaaaatactcagatttcattgaatgtttgggtaattgaatttgagtggttttgtttctttgttttattgatgaatttattattgagtaaggacacttcctttttaaaaattacttggtatcctacatagattactatattaaagcattatttggctgttctcaatcagtgttttctttgttcagtgtgccaagatcatactctttagaacattgcattatgaaaatgaagttttgacagtcagttgtggagtttttgttttgtgtgtgtgtgtgtttatttgttttttaccttcccagttcttcagccctcttcccaccaccacaatgaccccatcaagagagacaataaatgtacccataatgtttgtgtaggatcagaatttattccagtattcacagcttttgaagcaagctttaagattgcataaatccttagtaatcatggtttaagagaaacaatcccagctcctataatttttcttcactccaatcagaaaggcaactggccatgaaatctcagctggaatatttaaaaggaaattcagatatggcttgctcgtttgttaacttattaccaaatgtattaaccaaaggaaagaatttaggccaaatctgacagggtcatatgacatatgcagggaaaagccaacaggttcctattaggctactcgaactcatcctactactactactcttttgcggggttaggggtaggttttttaaaatgttcttgtgtccatcagtcacaagaggaggtagttttcactaaagataaaaaattgaggcaacttttggaactatacattacccccttttgatagggtaatggaaattgacagggtgggttattgatggaaatgatgtcataactagtctgaagactatgttatgttaactaagtatgttattacttagtctgtttaaattccccttgatgaatgagggaagattgttaaataccttgtatggtgatagtctgccctttatttttttaagtttaaccagtaaagactataataaaaggtaagatttttaaaaattgctgatagaaaagaatcacaagcaatagaaacggaaacaacagatttttattttgtattttagaacacttggcttgtaatttgcatctaatgtttgcttgcatattgtcataaaattaacagttttaaggtagtacgtttgacatgtgtgtatttttataacagcctattaaaatgatgtggaagattatacttttaaatatgcccactttgtttttttaaactcattgtagtcttagtctttcctccaataaaattgttgtgtctttatatggcaaatgtatagttattataagcattctcacgcatgtgatcccagcactttgggaggccaaggcaggtggatcacgaggtcaggagatcaagaccatcctgactaacatggtgaaaccctgtctctactaaaaataaaaaaaaattagccgggcgtggtggcgggtgcctgtagtcccagctactcgggaggctgaggcaggagaatggcgtgaacctgggaggcggagcttgcagtaagctgagaccgtgccactgcactccagcctgggtgacagagtg

SEQ ID NO: 6515 - DNA, 143 bp, Homo sapiens
gtaatcccagtactttgggaggccaagacaggtggatcacgaggtcaggagatcgagaccatcctggctaacacggtgaaaccctgtctctactaaaaatacaaaaaaattagctgggcatggtggcgggcacctgtagtccc

SEQ ID NO: 6516 - DNA, 163 bp, Homo sapiens
ctgggcgtggtggctcacgcctgtaatcctagcactttgggaggccaaggcaggtggatcacgaggccaggagatcgagaccatcctggctaacatggtgaaaccccgtctctactaaaaatacaaaaattagctgggcatggtggtgtgtgcctgtaacccc

SEQ ID NO: 6517 - DNA, 303 bp, Homo sapiens
ccaggcgcggtggctcacgcctataatcccagcactttgggaggccgaggcaggtggatcacgaggtcaggagattgagaccatcctggctaacatggtgaaaccccgtctctactaaaaattacaaaaaattagccaggcgtggtggcgggtacctgtagtcccagctgcttgggaggctgaggcaggagaacggtgtgaacccaggaggtggagcttgcagtgagctgagattgcaccactgcactccagcctgggcgacagagcgagactccatctcaaaaaaaaaaaaaaaaaaaaacc

SEQ ID NO: 6518 - DNA, 264 bp, Homo sapiens
cagcactttgggaggccgagacaggcagatcacgaggtcaggagatagagaccatcctgactaacacggtgaaaccctgtctctactaaaaaactacaaaaaaattagccgggcgtggtggcgggcgcctgtagtcccagctattcgggaggctgaggcaggagaatggggtgaacccaggaggcggagcttgcagtgagtcgagatcgcagccactgcactccagcctaggcgacagaggcagactccgtctcaaaaaaaaaa

SEQ ID NO: 6519 - DNA, 146 bp, Homo sapiens
ctggtgcggtggctcacgcctgtaatcccagcactttgggaggccgaggcgggtggatcacaaggtcaggagatcaagaccatcctggctaacatggtgaaacactgtctctactaaaaatacaaaaaattagccgggctaggttg

SEQ ID NO: 6520 - DNA, 296 bp, Homo sapiens; identical to SEQ ID NO: 5466

SEQ ID NO: 6521 - DNA, 182 bp, Homo sapiens
ctgggcatggtggctcacgcctgtaatcccagcactttgggaggccaaggcgggcggatcacgaggtcaggagatcgagaccatcctggctaacatggtgaaaccccgtctctactaaaaattcaaaaaattagccaggcgcggtggcgggcacctgtagtcccagctactcagtaggctga

SEQ ID NO: 6522 - DNA, 4727 bp, Homo sapiens
ttgggaggccaaggcaggcggatcacgaggtcaggagatcgagaccatcctggctaacacggtgaaaccctgtctctactaaaaatacaaaaaattagccaggcgtggtggcgggcgcctgtagtccaggctactcgggaggctgaggcaggagaatggcctgaatccaggaggtggagtttgcagtcagccaagatcgtgccactgcactccagcctgggtgacacagcgagactctgtctcaaaaaaaaaaaaaaaaccctcggtttctgcatacctgtgtacttgtacctgttggtgcctgtatacctgaatggcctcacaactcaggcacctgctaatcagctcattagacagaccaaagagaaagctcattattgttttcatttacattttttatttccaagcacaagtaatctgcatcattgtttttttgagggttggatttattcttatcatagcattctttttatattatggttattaaacctctgactaacgtattttggcaagttagttttcctttctgttatttgcctctcatctcttcgttactttgggatgtgcacgttttaacagccgtcagatacagatgcatattttcacagtggtcagatagagcttgcctcctctgtcaggccgcgtggtacaggtgacagtcccgagctgagctttgtcactctcagcagaactcacctgcctgggcttcagcctccacacttgtaaaaaagggagccagttgtcgtctctcatttccctccagctccggaaagataaactgtctagtgactcagtgcaaggcaaactcagttcatccttcctaaacttcataaatagcaaatgttgccaataaggattaggtgacacataaaatcagagtctctcagacaacctgaggggcatgatttgtttgctgcaaacttacgatttttccttaagtaccttacacatggctaacatttgttcattttactttgcctatcctagaacaggagtcttcaatccctgggctgtggtctgggaccagtccgtggcctgttaggaactgggccacacagcagcaggagagctgcaggtgagtgaacctgactgcctgagcttggccccctgttagatcagtggcagcattagattctcataggagcacaaatcctattgtgaactgcacatgtgagggatctaggttgcacactccttatgagagtcgaatgcctgatgatctgaggtggaatagtttcatccccaaaccatacccctcccccaatcgcccatctgtggaaaaaagtgtcttccacgaaacagatgcctggtgccaaaaaggttggggaccctgtcctaaaacacaggattaaaataaaaaattcttgtctgagttttgagatccttgttgatctaagtcccaggaaatgatgtttcaaatagagactgaaacagcaataatgatgctttacctagtagctccatctgtctcagagtgaaaagtagcacccttcctttctgtatttaggaagaagagaaacacaattcactatttggggaacttacggtctttattatgttcttaacctttttcactgtggtctctgggaaccaattctctctccattcatcttaactcacaccagaagtgaccagtttcttatgagcagatgaccttaagacccgcagcatggacttcatttggggttggccctttgtcgcctgaggagaggcttatcttctttagtgctttatttaatggaatattcttcacctttgagctgttagtagcaaatggtgagtggcttctcgtcaccagttttcagactatttcagagaaaactggtgatcaatggttgataattctctgacttgaatcctaattgccaaatgcaatccaaagttattccgacaatgaaacattaacacatgaatactcacttgccctagtttagtaacagagacctgtacggtctaaatctacggatggatgttaggtgacaagttagccacccaatatgctcaagtgtaggtaaaactgtatttattttctaaacacagtgagctgaagaccagaaaagggaatgcatggtatgtctcagaccctgtgttaggtgctttatatatgtggccttgttgaattctcacagcaaacatgagaagcagaagtatcatctccagttcataggtaactgaatttcaaagggttttattcacttaatgaaaccacttttgcaaaaattatgacagaaaagtctgacctaggaaaattatgacagtgaaagaaatctgacctaactgactccattttgtttctaagctctaagttgcccttggttcattcttgggcccagcctaactaactttgggaggaattcagcttatagttcaactttaaaacgaagaagataacagcccctccccaaaacaaaccccgttcttacttggagaccagactgccttcgttaaactaacaaagtagccacaagattagaatttatggctagggagtcatgcagccagaggccacaaggttccaaacttggccaattgctcctacggataactagtaccactgtaacacctaaaactgatgtttgtggtatttttcagactgtgcattgtgatggaccagctggtgccacccagaccagtaaactggtttaactatttatgtgatcccactcaggaatgaaaaacaagaagacagttttggtccctatgatttcatccccgacttgactagtcagcattccccagccccttgcccaccaaactatctctaaaaaaaaccccagccttctaattttttaattgtggggggaggctgatttgaggaaataataaaactcctgtctcctgtctagcaggctctgtgtgcattaaattctttctctactgcaatttctgtatctcaataaatcagctctatctaggcagcagtcaagaactcgacgggcacttacattgttatggccctaatatgtacatactccagcccatacacatctgtctgattccaaagaatgactctgactatgcagatagtcatagttctcataatcaactggatatctggaggatcccagtgctgccacacattcatctgcatgtgcattttcccttctgatggtcaggccttctgttagctgctgctgcctgaagtgtacattttaaagggattcctccatcattcctgccaatactgccatattatttgcacgaggttccctgtccagcatttgcaggctttgtgtaggtgctcacacatctgtgatgtaatgctgatttcctcacccatagtaattgacatttgaatggaaattggccattttgattgcaaacattctggaactgctatgttgccaattgaaacggaaccctcaaaaccattattcaacaacaaaggaagtcacaggatacccatttggatgataggtcataggtgagaatcactacgctaaaataaattgatcaaattgttcctacaagcaattccatttcagtccctggaatttgttttcactttcctattcagccacatgaatacagaggctgcatccactctattttgctcttgcgaccaaggggtaaagacggtgccttcagatgcctgtgatggctcaggaaggggcctgggaggttgttggaggcagccatggaaccactgtcaatggtacaagtcatgcactattctttagcttgttgaagtttcattttctgtttgaaaaatgaaaccaataatttatctaaaacaagttaaggctgggcgcagtggctcatgcctgtaatcccagcactttgggaggctgaggcaggtggatcacttgaggtcaggagttcaagaacagccttgccaaggtggtgaaactccatctctattaaaatacaaaaattagccaggcgtggtggggagcgcctttaatcccagctacttgggaggctgaggcaggagaatcgcttaaacccaggaggtggaggttgcaatgagccaagatcgtgccactgcactccagcctaggcgacagagagagactctggctcaaaaaaataaataaataagtaaataaataaataacaggttaagtatcatgatgatggcaaatggaaagctgaaaatcttgagactattttcaacaaacttgactgaaatataccattttccaaacaggttcacctggtagtctgaatagagagtagaaagaggaagatggaaatgaggaagaaatacatgttctttgtcaagaaaggagtagtttattagcataatccagcatgttcctggagagcaagcaccatccaccatgagcaccggcctgcactgggccacccatggggaggcacaccagaaagttacattgtaaaagcatcttgttgccagtattgtcaggaatcatggaggaatccctttaaaaagcacacttcagggagtggcaactaacagaaggcctgaccatcagaagggaaaatgaggctgggcgtggtggttcacacccgcaatcccagaactttgggaggccgaggcgggtggatcacaaagtcaggaatttgagaccaacccggccaacacggtgaaactcggtctctactaaaaatacaaaaattagccaggcatggtggcacgcccctgtaatcccagctactcaggagtctgaggcaggagaattgcttgaacccgggaggtggaggttgcggtgagtcgagatcatgccactgcactccagcctgggcgacagagcaagactcca

SEQ ID NO: 6523 - DNA, 270 bp, Homo sapiens; identical to SEQ ID NO: 5591

SEQ ID NO: 6524 - DNA, 453 bp, Homo sapiens
aaaattcagcctaattattagctgtgctttcttggataagttatttagattctctaagctgttgtctcacaagtaaaatggagatatgtctgcctcataggctattaagaggatagcattctcatacagcagtgttacaaatgatgtatcataaaataatagtccaaccacctgccacatttcagaaacaaaaaaagatttatactttacatgcaatagacatacaaaaaattttaaattctgagggaaaaaaatgaaaatgccccacacatttgagtcatttatatattaatctggaaagaaatgctatctttctgtaacttctgttttatatttttatttcagcattcaccctgtgtgcatgagctgtattaaatgtatctgacatacatatatatatatatattttgtttgttttgttttgtttgtttagacagggtcttgctctattgc

SEQ ID NO: 6525 - DNA, 106 bp, Homo sapiens
ttacaggcgcctgccagcacgcccagctaatttctgtatttttagtagagacgggttttcaccatgttggtcaggctggtcttgaactcctgacctcaggtgatcc

SEQ ID NO: 6526 - DNA, 970 bp, Homo sapiens
tttccatcttatacacaataaatttgaggcatagagaggttaaatttgagcagtgtcactgtaactcacttttaaaaactgtgtgataattaaatggcagtccttagttttaacccagttatggctggctgtaagttccatcccgtcatgaccattatgtttcctcaacttttctattttcctacttcctttgctctgctctcagtcactgggagacgaaagtgctgctggttagcacagaagaaactgctgctgctgcggcttctactgttgtctgccatctctgttaccatcgagaccggggctgtgtatgctcgaggtgcagggagctaatgtataaggagttaaatgaactcttgctgctgccaaatatgttgttatcactaactgcaccgctgctgtcattagtgctgctgccaacactgcaagccctgctgctgccagtgccaattctgctgatgccttgggctctccatgtcccagggtgattccatagacaagcagctgcttttagatttcacttgctcattacctgtagatcctttgccttaggactcaagcttaagcccatgaagcctgggatagaagacaattggaggtatgttttatcttctctagcatctgggacaactggccttgaaccaaacatgtgcacctcgtttttcttttcccttcttcctctgagatttcttttcccataggctcttatttcatgcaatgatccactagccctggaaacaggaacataaacactcgaaccctagaatgaacataatttagtcttaactacattagatattttagtttgaaagaaatcactcacatttcataatcctgaaacatataaatttatacttagttatctgtgcaaaaattgaatcatgataattattaaagaattactatgcaagtgtaaatagctttggtattaaccaagagtggtttcagtgtgcttttgtaaaaaaaaaaa

SEQ ID NO: 6527 - DNA, 6044 bp, Homo sapiens
gggaggagccaagatggccgaataggaacagctctggtctacagctcccagcgtgagcgacgcagaagatgggtgatttctgcattttcgtctgaggtactgggttcatctcactagggagtgccagacagtgggcgcaagtcaatgggtgcgcgcaccatgcacgagccgaagcagggcgaggcattgcctcactcgggaagcgcaaagagtcagggagttccctttcctagtcaaagaaaggggtgacagatggcacctggaaaatcgggtcacttccacccgaatacagcgcttttccgacgggcttaaaaaacgccgcaccaggagattatatcccgcacctggctcggagggtcctacgcccatggagtctcactgattgctagcacagcagtctgagatcaaactgcaaggtggcagcgaggcttggggaggggcgcccgccattgcccaggcttgcttaggtaaacagagcagccgggaagctccaactgggtggagcccaccacagctcaaggaggcctgcctgcctctggaggctccacctctgggggcagggcacacacaaacaaaaagaccgcagtaacctctgcagacttaaatgtccctgtctgacagctttgaagagagcagtgtttctcccagcacgcagctggagatctgagaacgggcagactgcctcctcaagtgggtccctgacccctgacccccgagcagcctaactgggaggcaccccccagcaggggcagactgacacctcacagggctgggtactccaacagacctgcagctgagggtcctgtcagatagaaggaaaactaaaacagaaaggacatccacaccaaaaacccatctgtatatcaccatcatcaaagaccaaaagtagataaaaccaccaagatggggaaaaaacagagcagaaaaactggaaactctaaaacgcagagcgcctctcctcctccaaaggaacataattcatcaccagcaacggaacaaagctggacggagaatgactttgacgagctgagagaagaaggcttcagatgatcaaattactccgagctacaggaggaaattcaaaccaaaggcaaagaagttgaaaactttgagaaaagtttagaagaatgtataactagaataaccaatacagagaagtgcttaaaggagctgatggagctgaagaccaaggctcgagaactacgtgaagaatgcagaagcctcaggagccgatgcgatcaactggaagaaagggtatcagcgatggaagatgaagtgaatgaaatgaagcaagaagggaactttagagaaaaaagaataaaaagaaacgagcaaagcctccaagaaatatgggactacgtgtaaagacgaaatctacgtctgattggtgtaactgaaagtgatggggagaatggaaccaagttggaaaacactctgcaggatgtcatccaggagaacttccccaatctagcaaggcaggccaacattcagattcagaaatacagagaacgccacaaagctactcctcgagaagagcaactccaagacacataattgtcagattcattgaagttgaaatgaaggaaaatatgttaagggcagccagagagaaaggtcgggttacccacaaagggaagcccatcagactgacagcagatctctcagcagaaattctacaagccagaagagagtgggggccaatattcaacattcttaaagaaaagaattttcaacccagaatttcatatccagccaaactaagctttataagtgagggagaaataaaatactttacagacaagcaaatgctgagagattttgtcaccacgaggcctgccctaaaagtgctcctgaaggaagtgccaaacatggaaaggaacaactgataccagccgctgcaaaatcatgccaaaatgtaaagaccatcgagactaggaagaaactgcatgaactaatgagcaaaataaccagctaacatcataatgacaggatcaaattcacacataacaatattacctttaaatgtaactggactaaatgctccaattaaaagacacagactggcaaattggataaagagtcatgacccatcagtgtgctgtattcaggaaacccatctcacatgcagagacacacgtaggctcaaaataaaaggatagaggaagatctacgaagcaaatggaaaacaaaaaaaggcaggggttgcaatcctagtctctgataaaacagactttaaaccaacaaagatcaaaagagacaaagaaggccattacataatgggaaagggatcaattcaacaagaagagctaactatcctaaatatatatgcacccaaaataggagcacccagattcataaggcaagtcctgagcgacctacaaagagacttagactcccacacaataataatgggagactttaacaccccactgtcaacattagacagatcaacgagacagaaagttagcaaggatatccaggagttggactcagctctgcaccaagcggacctaatagacatctacagaactctccaccccatatcaacagaatatacatttttttcagcaccacaccacacctattccaaaattgaccacatacttggaagtaaagctctcctcagcaaatgtaaaagaacagaaattataacaaactgtctctcagaccacagtgcaatcaaactagaactcaggatgaagaaactcactcaaaaccgctcaactacatggaaactgaacaacctgctcctgaatgactactgggtatataacgaaatgaaggcagaaataaagatgttctttgaaaccaacgagaacaaagacacaacataccagaatctctgggatgcattcaaagcagtgtgtagagggaaatttatagcactaaatgcccacaagaggaagcaggaaagatccaaaattgacaccctaacatcacaattaaaagaaccagaaaagcaagagcaaacacattcaaaagctagcagaaggcaagaaataactaaaatcagagcagaactgaaggaaatagagacacaaaaaacccttcaaaaaattaatgaatccaggagctggttttttgaaaggatcaacaaaattgatagaccgctagcaagactaataaagaaaaaaagagagaagaatcaaatagacgcaataaaaaatgataaaggggatatcaccaccaatcccacagaaatacaaactaccatcagagaatactacaaacacctctacgcaaataaaccagaaaatctagaagaaatggataaattccttgacacatacactctcccaagactaaaccaggaagaagttgaatctctgaatagaccaataacaggatctgaaattgtggcaataaacaataccttaccaaccaaaaagagtccaggaacagatggattcacagctgaattctaccagaggtacaaggaggaactgataccattccttctgaaactattccaatcaacagaaaaagagggaatcctccctaactcattttatgaggccagcatcatcctgatagcaaagccgggcagagacacaaccaaaaaagacaattttagaccaatatccttgatgaacattgatgcaaaaatcctcaataaaatactggcaaactgaatccaacagcacatcaaaaagcttatccaccatgatcaagtgggttcatccctgggatgcaaggatggttcaatatacgcaaatcaataaatgtaatccagcatataaacagaaccaaagacaaaaaccacatgattatctcaatagatgcggaaaaggcctttgacaaaattcaacaacccttcatgctaaaaactctcaataaattaggtattgatgggacgtatctcaaaataataagagctatctatgacaaacccacagccaatatcatactgaatgggcaaaaactggaagcattccctttgaaaactggcacaagacagggatgccctctctcacgactcctattcaacatagtgttggaagttctggccagggcaatcaggcaggagaaggaaataaagggtattcaattaggaaaagaggaagtcaaattgtccctgtttgcagatgacatgattgtatgtctagaaaactccattgtcttagcccaaaatctccttaagctgctaagcaacttcagcaaagtctcaggatacaaaatcaatgtacaaaaatcacaagcattcttatacaccaacaacagacaaacagagagccaaatcatgagtgaactcccattcacaattgcttcaaagagaataaaatacctaggaatccaacttacaagggatgtgaaggacctcttcaaggagaactacaaaccactgctcaaggaaataaaagaggatacaaacaaatggaagaacattccatgctcatgggtaggaagaatcaatatcttgaaaatggccattctgcccaaggtaatttatagattcaatgccatccccatcaagctaccactgactttcttcacagaattggaaaaaactactttaaagttcctatgaaaccaaaaaagagcccacatcgccaagtcaatcctaatccaaaagaacaaagctggaggcatcacactacctgacttcaaactatactacaaggctacagtaaccaaaacagcatggtaccggtaccaaaacagagatgtagatcaatggaacagaacagagccctcagaaataatgccgcatatctacaactatctgatctttgacaaacctgacaaaaacaagcaatggggaaaggattccctatttaataaatggtgctaggaaaactggctagccatatgtagaaagctgaaactggatcccttccttacaccttatacagaaatcaattcaagatggattaaagacttaaatgttagacctaaaaccataaaaaccctagaagaaaacctaggcagtaccattcaggacataggcatgggcaaggacttcatgtctaaaacaccaaaagcaatggcaagaaaagccaaaattgacaaatgggatctaattaaactaaagagcttctgcacagcaaaagaaactaccatcagagtgaacaggcaacctacaaaatgggagaaaattttcacaacctactcatctgacaaagggctaatatccagaatctacaatgaactcaaacaaatttacaagaaaaaaacaaacaaccccatcaaaaagtgggtgaaggacatgaacagacacttctcaaaagaagacatttatgcagccaaaaaccacatgaaaaaatgctcaccatcactggccatcagagaaatgcaaatcaaaaccacaatgagataccatctcacaccagttagaatggcaatcattaaaaagtcaggaaacaacaggtgctggagaggatgtggagaaataggaacactttgacactgttggtgggactgtaagctagttcaaccattgtggaagtcagtgtggcgattcctcagggatctagaactagaaataccatttgacccagccatcccattactgggtatatacccaaaggactataaatcatgctgctataaagagacatgacacgtatgtttattgcggcattattcacaatagcaaagacttggaaccaacccaaatgtccaacaatgatagactggattaagaaaatgtggcacatatacaccatggaatactatgcagccataaaaaatgatgagttcatgtcctttgtagggacacggatgaaattggaaatcatcattctcagtaaactatcacaagaacaaaaaacccaacaccgcatattctcactcataggtgggaattgaacaatgagaacacatggacacaggaaggggaacatcacactctggggactgttgtggggtggggaaagtggggagggatagcatggggagatatacctaacgctagatgatgagttagtgggtgcagcacaccagcatggcacatgtatacatatgtaactaacctgcacattgtgcacatgtaccctaaaacttaaagtataataataataaattaaaaaaaaaaaacaaaacaa

SEQ ID NO: 6528 - DNA, 16386 bp, Homo sapiens
ggtttctggaataggaaaagttacagagaaaatgttaaaggcccttggaattattacatgtacagaactttaccaacagagggcattgctttctctccttttctctgaaacatcttggcattatttccttcatatctccttgggtctaggttcaacacacctgacgaggtatctatatgtattgtcattctgctttttcttcagcatttgctgcaatatcagttttaaccattgagatgaggctatatggataacatgttttaaaattctttcaggctagtttaattcaaaatataatgtttgaattagagtcaacagattggatgtaggaggaaagaaaagaagaataaagaatcactcctaggttgtggtgtcagcagttgtgtagagagacaagaggaatgatagtttcttttttatccctaccttgttctttgttcagaacctaagagaaatgccagtagtcaggttgttgtggaaagaaagatggccgtattccataattcaccctttaaggaaggagatgtaatgattcttcgaaagccttaaactacatttcttttcttttccggattcattcattcagtactgactactttactttgtgttaggcactattctaggcactgtagataacagcagcgaataggacaaattcctgccctcatggagtttacagactagtgtgagagatagaaaataaccaaataaacaaatgaagaaagtaaagcagagtgagggtatagaaaatgactggggggtaagtgtgagggttagcaaccatcatccaaaggcggagagacctgagggagccagccatgcaaaggctggaagagggaacaggtggaggaaataccctgggttttcttccctgccactctttcatctaggtcttaaaaagaggaaccctagaggtagaaggtaaattgttgtgggatagtaggtgaaaagaaggaaattttaaaagactgggaatcgtggaagtcaactctgggcactatttttacaattttgtcatcaccttgtcagcctgtcctcaaaatgactcctttatattcttgtatttaaactaaaggacaacaatagaaatcaatgaggatgcatataaaattgatggactaattaagcctactaaattttacagagattgcaaggcttgttgtgttgcttttctcatctcttcctgctcttcaatcttttgagtccacagttagctgactttgatcttcagtgggcataatgaaagatgaagatatcacagcactataaataattatatttgaagatagcaggaaataaaactttatttttaatccaaaaatttttttatttccatagtgcttgaaaacaatatagttctgatgtaacataacatatattaacttgtggtatttagagatccaggtaaggcttttacatgcaattcataggtaatttataataacaaataccaaacctgcctttccctctgtccatattctctattcccctattctgctttgctttttaatctgagtacttctcccattctaatccattccatatttactactatatttgttatctgtctttctccaatatataagttttctgagggcaagtacttggtctatttccttcattactatatcctcaagttctagaacagtgcttgaatcataataggttcactaaatatttggaaaatgagtactctacatgtcatttcaactttttggttttaactaatcctgtcagagcagctagaatacagccaaactaggtgattcagattcccaatcttcatcctatagctgtgtaccaaattctgactgaggttctattatagagtggtataaatgaataatgaataggctatgggagaaagaagttaatatactaaaccaaaaactagataactgattttaaattatttaacatttaattatattttgtaactggaagatattacgctatcacttcctatttgtttttataagttgtggtttttgatagtcaggtttttaatagaagcaatttctaatatctacctattttcaagtttgttctcttcaatagatatagacttgattcataatcatattagcatcttacctacctatgttctttggtgatttgtttttagataaaaaactgtttttcatgatgtataaattttaataaaaaatttgagagctctaaaaggtaattgataatgttaaatcctcttggttaactaaaaaaaactcagtctttgaaaaataaagacctttttttttcatttcaagggatggagagaggaaaagtatgagcgttgagaggtaatgttttattatttattgttaattgtgcataattcatgttattttaaactaatattgaattaatttttagtaaatatcactgaaataagaaatctatttgcaaattactataacagtttttagtagtttacactccctgcaataaatgccttagtataagactattattttcagttgctataatctcaaaaattaacttcagctattttttaatgttggttttaatcctacctagtgaaaaccaagcattttagaatttcatatcttaatttctagcttgtttataaggacaattgagtatttacttcggaaatttaagaagtaacaatgggaattcttcctaaaattctttcaacattggtgattaagcagaagcttaatcaaacagtaaaatattactgataaaagagagcttaaagatgatctagtttagtggtttacaatcctgtttgaaaaccaaatgaaataatgatggaaacttaccgtttggggaaataagtcattgtttgaaacatccctcaattatctcctcaaagcagcaagtttccactgagacatttaagaaacactgacctagggcccggcaaggtggctcacccctgtaatcccagcattttgggaggctgaggtgggcagatcacttgaggccaggagttcgagaccagcctggccaacatggcaaaaccctgactctactaaaaatacaaaaatcagcccggtgtggtcgcttaaactttaatcccagctacttgggtggctgaggcacaagaattgaacccaggaggtggagtttgcagtaagctgagatggcaccactcactccactccagcctaggtgacagagtgagactctgtctcaaaatcaaaacaagacaaaacaaaacactgacctagtacaagattgtgttcatatttcacatatattatttgtggtcagaaaagctgattaacttttacaatacaacataataaatggctttgataaaaattgctattttaggttttggtccatatgaaagcaatcaaagagagagagaaaaaaaaaatccaaaagcaaaatagtattgccatatttgataaatttctctgccattttctctgctattgggaaaactattttatgtacaggaatgtgttctccactttttttttctggaaactttctccccttggctttctaaaatgggcaatataacatcaaatttggtatgaagttgggggaaaggaggttgcaatttatatcacaaactaactaacttctctaatatagaaagaactcataatcaataaaaaggaacagtaagccaacagaagaaatgaacaaagttctaaataattaacagaaaaggaaatacaaatggctcttaaaacaagtgaaattactaccattttcatttataattaaagaaatacagattgaaagttctctcagatacctttctttcactagtcaggttggcaaagattctaacatactctattggcaagactgtaggagtgaaaaatgtgtaaactttagagggagtacattaggtttttttattgctattaaaacaaatttctacaaatttagtggctcaaaacaaaacaaatttattctctatcattctgaaagtcagcggttctaaagttaatgtgttggtagagttccatttcttctagaagctctgggagagagtccatttctttatgaaaagcttctagaggccacagaatctttggctcatagcctcagcaacttctttctctgactctaaccctcctgcctccttcttataaggacccttgggattacgttgggcacagctggacattccagagtaatctctgtccgtcagaatttaatcacctctgctaaatcccttttgtcatgtaagatactaggttcacagattccagggattaggatgtggacatctttagggaccattatctagcctaccacagggggtaagaaatttcataatatgtatcaaaatcacagatacacatgtactttgatgccataattcttttactaagaattaattccacagatttagtcacatgtcattttacatatatacagggttactcactgcattttttatgatagaaaaaaactgtaatatccatgaatagagaattggttaaattaccttacatcattaaattagaatattatgctgctgtataaaaatgaggaaatcatttactcatggggaactctcaccatgataaattgagaaaagcagggtactaaacaatgtatctaaaattctactgtttatataaaaaatgagaggaaaatgtcttcttgtttgcttattttatatatatacacacatacacacacacacacacacacacacacacacacacacacacacacacacacgtggaatatttcttttttttgtttgtttttgagagggagtctcgctctgtcgcccaggctggagtgcagtggtgcgatctcggttcactgcaagctccgcctcctgggttctcgccattctcctgcctcagcttcccgagtagctgggactacaggcgcccgtatacgtggaatatttctaaggaattcataagaataagaagctgacacattggttgccactagggaagagaactgagtagctgaggataaggttagaagtagaaaggggactctttactgaagagtcacttgctcagggtccatactcatcattctggtctctttgtattatcctcttttaagttaatatcacttgtcaacttctttcaacacttttttgcagatgaattcaaaatacctacatttaatcttatcagccttctattttcagctgtctattaaacaactctgcgtaggttccatgagccaaccccttaaatctacttaaagatgtttctcatccataaaatccatgtgcagtaattggaatgatgttctcatttggactttcttaagataatcttctgtaataaagtctatatatacatataccctaatctgttttaagttctggaggcattaccattatctgttggtaattttaattatcttttttgtgatataatagagcaagagcataaaattgtttctttgctaatcaagctttcctgtttaggtgggtttccattatttatatagatcttagatgtttttacttaattaaattttagttcatctgaaaactttattttgtaatacagaaaaatataacttaatgctagccatataaacatgcataccatttccaaattatcctggattatagtttactttgtgcgccaaaattattcttgtctttctaggacattcagtgagataaataaagcggaagagcaatacagcctatgtcaagaactttgcagtgagcttgctcaggatctacagaaagaaagacttaaggtgctttattttgatatggtgtccttagtttttaagttttttaatagtaaaatgctaccttaaaagctagagttagattacacatttcttaaagatgaatacaaattaataaacgtcagaatagtgtattcctatccccaacagtcagatacaaatccaattctgacccatatctggagtctgtgatgaggtgattctatgaagaagcaccttatgagaatagagtggttcagtataattcagaggactttacttctgtacctcaggagtacatttgaataagttaaaaccaaagttacactggcattagagaataaggcaaaagaaaggatttccagagaattgtattcacatattacaaatgtctttccaatcatcctttaatgtttttcttacttagacaatgaccttctaaaataggcattttgtttcaaggttgtagtccaggttgcttaacacaggacaacaaaacctataaggctttgaacttgctattttataatcttcactcacaacaatttatatttagtgtattcccaacactctcaaaccagaggtagagtcagtacaaagcgtaataaaaaggtattttaaaattgctacacaggtacaaatatctggtttgatagaagaaataagacctagtgttcaatagatcagtaaggtgactatagtgtacagtaatctgtgttacataccagaatagctagaagagaataatttgaatgtttctcgcataaagaaaatacaaatatttaaggtgatagatatccgaagtacacttatttgatctttacaaagatcaaaactatgaggtacatgtgataatttactatgttcatataatgcatcagtaaaactattatgctaatcagtaaaaaatttgttttaaaaaaattactacaaagagtggaatatctgatgagtatctttctctatcataccttgaatttaaagaattttctttttaaaaaatatttaaataaacatttaattttatgatcattttagatttccagaaaagtcacaaaaataatagaatttcagcatactcctcacctggtttcctccattattaacatattaccagagtacatttgtcaaaaataagaaactgacatttaatacattgtcaattattaaccccagactttatttggagtttacttatttttccattaatgtcgtctctgccttccagaattcagtccaggggactacattgcatttagctgtcatgtctctccagtttcctggtctgtgatagtttcttagtttttccttctttttcatgaccttgacagtgttgggtagtactatacaggtattctgcagaatgtcgcccaatttgggtttgtctgatgattttctcatgattagatcagggttatggatttttagaaagagtatcacaaagaggaagtgtccttctcataacatcctatcatggggtgtataatagccacatgatgtcatggttgatattaaccttcatcacttggttagtgtttgctaggcttctccactgtgaagttagtgtttttccctttggaagtaagtcagtaaatctaactaccctcagatgagagagagcaggaattaacttcctcctccaggggatactaaaatatacataacataaaatttacattttaaccatttttaagtgtacagttcatattgttttataaccatcaccaccacccatctctagaactgtttcattgtctccactgaaaccctgcactcataaaacactaagtgtaaagggaattcttacattaaattgtttggcatagcatctggcaatgcagaaggcacacaataagtgtgaactattcataagtcgttttcagtgagacacttttagaaagatttttttccttcctttgtaggtaattaatcaacctccaaaagagattcagtaaaaataaaagtgatcatttaacctttccctcttgtaatggtcttttataaaaattcagttggggggccaggcacggtggctcattcctgtaatcccagctctttgggaggccaaggcagggggatcacctgaggtcaggagtttgagaccagcctggccaacatggtgaaaccccatcactactaaaaatggtggcgggcacctgtaatcccagctactctggaggctgaggctggagaatcacttgaacctgggaggcagaggctgcagtgagccaagatcccgccactgcactccagcctgggcatcagagtgagactctgtctaaaacaacaaaaaaaaaaacaaacaaaaaaattcagttgggaaggggaataaaaattactggctaaaatgggattttaggtcaggcatagtggctcatgcctgtaatcccagcacattgggaagctgaggccagaggattgcttgagcccaggagttcaagaccagcctggacaacatagcaaaatcacgtctctacaaagaaaatgtaaaaattagctgggcatggtggcacgagtgtgtagtcccagctacttgggaggctgaggtaggaggatagcatgagcctgggaggtcaaagctgcagtgagccacgatcatgccactgtactccagcctgggcaatagaatgggacccccatctcaaaaacaaaataaaatgggattttagcttatgtttggaaagggaagtaaacgtttttggctaaaatggtattttaattattctttttttttctgagacagagtcttgccctgtcacacaggctggagtgcaatggtgtgatctcggctcaatgcaacctccatctcctggcttcaatctattctcctgcctcagcctccccagccgctgggattacaggtgcctgccatcacgctcagctaatttttgtatttttattagagacagggtttcaccatgttggccaggctggtcttgaactcctgacctcgtgatccgcccgcccaaaatgctgggattacaggcgtgagccactgcagccggcctcttattctttatgatatgtttatcaccatgttttataaataattggttataattccatattcttatgtccgtaaacctttctgaatttttctaacatgtaaatgacttttttctagaagttaggaagtcatacagaataatgtattctggttgggtgcagtagctcatgcctataatcccaacactttgggaggccaggatcgcttgtggccaggaatttgagactagcctgggtaacatagtgagactctgattctacaaaaaaataaaaaattagctggtgtactggcacgcacttgtaatcttagctactcaggaggctgaggcaagaggattgcttgaacccagaagttgaaggctgcagtgagctacagctgtgccagcgcactccagcatggacaacagagagagaccctgtctcataaataaataaataacatattgtatatgttatagggtagaactgttaccattaagttgaagaatgtgaattttgaagtaaaaactcgtgcatctacagtttcatctgttgtttctactgcagaagaaatatttgccattgctaaggaattgctaaaaacagaaattgatgctgattttccacatcccttgagattaaggcttatgggtatgactttttcatttttttgtttttccttaaatctgctagattttcccaaataatcaactttgggaatacagggggcccccaacttaacaatggttcaacttaatgatttttcaactttgcgacagtgggaaagctgtatgctttcagtacactcttgacttacaaggtggttacatcccgataaacccatcataaattgaaagtattgtaaattgacttattatgttttcaatttacagcgggtttatctggatacaatcctactgtaactcaatgagcacctgtattctcgccttcattttatttcttaaacctgtttacgaagttcttcctttgctgctgccatttgtcttagttattagaccctgatgtgtgaagccatgatcattagtttaattccagtaagggtcaattaaagttgttattttccttataacttaatgaaattcttgtggccaggtgtgtttcaaaattcaaaacttttcagattttagaaagcaaattcagtgcatgtagagtatattacgttgtaatacttctttgtggatctggggcaacaccccctgttcaaacacattaatatttctgtagcaaaacaaaatattcagagactgtaaagactgatgacattaatttagtcatcaggtatcacttgttgcttacaattttcagaactttttggattttggaattacagataaaggattgtgacattgtgaaatcacatctccagccactacatggtaaaaagtaacaagccatgtttccaaagtgtactggttgaaagtatatatgtggatcaccactccaaatgcacattttactagtaaggagtgggtcactagccataattttatttatgaaagatatagcacacactgaaatcaactgaataaagtgttaattgaaagagccaggctgggcgcggtggctcacgcctgtaatctcaacactttgggaggccaaggcaggtggattgcctgaggtcaggagttcaagaccagcctggccaacatagtgaaactgcatctctacaaaaactacaaaaaattagctggacatggtggcgggcacctgtaatcccagctacttgagaggctgaggcaggagaatcgcttgaacccgggaagttgcagtgagctgagatcacgctgttgcactccagcctgggcaacaagagtgaaactccacctcagaaaaaaaaaaaaaaaaaaaaaaaaagcccaagagcagatatctatagaagcttaattcataattgccaaaactttgaagcaagcacgatgtccttcggtacgtgaatggataaataaactgtggtacatacagacagtggaataatattcagcacagaaaataaatgaattatcaattcatgaaaagacacgaatgaaacttaactgcataatgttaagtaaaagaagccagtctgaaaaagctaaatactgtgtgattccaaccatatgagattctggaaaaggcaaatatgagtaccataaaaaataattgattgtcaggagttaagaggggcaggaggtataaataggcaaaacacaggaattttagggcaatgaaatgattccgtatgattctataatgacacgtcattataaatttgtccagcgcccaggatgtattccaagggtgaaccctatgtaagctatggactttgagtgacaatgttgtggcagtgtaggtttatagattgtaacaaatgtaccactctagtgccacatgttgatagttggggtggtggaggggtgtgcatgtgtagggaaaggggatctttgggaactcattgtaccttctgctcaattttgctgtgaacctaaaattcctctaaaaaataaagtctattagaaaaaaaagagctaaagagtctgtatagttgactccagttagttactggtattaatttaatggtattatgtgtcacatatgaattaaaatcctacatcattatactaactccaaatagttaatatttaatgatattcttttataaaggaaggtaaatctgtacttataataccagctttgaaatgttacttatagtttctctctagccaaccttttgtatatgtcatagcactagacaaaatgtttttatgcattgtgagtgaattggctttgttcaatttgaaattgattgtgattggtttaatttaggtgttcggatatctagttttcccaatgaagaggacaggaaacaccaacaaaggagcattattggctttttacaggctggaaaccaagccctgtcagccactgagtgtacattagagaaaactgacaaagataagtttgtaaaacctctagaaatgtctcataagaagagtttctttgataaaaaacgatcagaaaggaaatggagtcaccaagatacatttaaatgtgaagccgtgaataaacaaagtttccagacatcacaaccattccaagttttaaagaagaagatgaatgagaatttggaaatatcagagaattcagatgactgtcagatacttacctgtcctgtttgctttagggctcaagggtgcatcagtctggaagccttgaataaacatgtagatgaatgtcttgatggaccttcaatcagtgaaaactttaaaatgttctcgtgttcacatgtttctgctaccaaagttaacaagaaagaaaatgttcctgcttcttcactttgtgagaagcaagattatgaagcccatccaaaaattaaagaaatatcttcagtagattgtatagctttagtagatactatagataactcatctaaagcagaaagcatagatgctttaagtaataagcatagcaaggaagaatgttctagtctcccaagcaagtcttttaatattgaacactgtcatcagaattcttcttctactgtttcattggaaaacgaagatgttggatcatttagacaagaataccgccagccttacttatgtgaagtgaaaacaggccaagctctagtttgtcctgtttgtaacgtagaacaaaagacttcagatctaaccctgttcaatgtgcatgtggatgtttgcttaaataaaagttttatccaagaattaagaaaggataaatttaacccagttaatcaacccaaagaaagctccagaagtactggtaagtgtgtaattgttttaaactgcatgattttctaggaatatgtattattaaaattaatgagattgttgttaaatctgaaacatatactattaaatgggtagtttgtgtatgccgccatttagggaaatgttggttacattgccataggttagaattaactcaagcctgtagattgtgaatttggggaaaactttggtttgatcttgatttagcacagaatgaactcaaaggtttaaggagctgagtgatctaatcaaacaaattccttcagagaacatctgtgaaggcacagtggtaaattaactataactgcataactagaaagcctctttaacttattttttggtagtgctgactctacccaaatttcaccaataaaattaagtgtaatgctaataaaattagtaaattacaaagaaattatagtttttggtgtgtttacatatgaactatatagtactaaggaagtttaatcaataagttttaactttttaaatttgtatacaactttttaattatttcatattattcattatggaatttcttgactttctttcctctaaaggtagctcaagtggagtacagaaggctgtaacaagaacaaaaaggtatggctaatttgagctttaataaagctggctacaatatgaaaattcaattattttataaattattaagtaatcaatattaaaaatgaattattttctagaatctcttcctgcattttaattgtgtgttccttttcattctaggccaggattgatgacaaagtactcaacatcaaagaaaataaaaccaaacaatcccaaacatacccttgatatattttttaagtaaacattgaacattttatcattaatttttaattgaaactagttattttataatcaatgaatttgttctttctgattttaagtttgcagatttatttagtgaaggcaagtgcaataatccttcctcagatgatgtttgcttttctaagatacatatactgattctgtgtatcttttttataaccatgagaattttacttccattatacatcaattggaaatcaatcctgttaagagataattcttaaaagggaaattaggaatgggataagaaggtgatttttttattatttttatactgaatataaaaacatttgtaagggctctcaaagattcacacatgcctatattatcataagaatttttcagcacttaactactttgttggcattgatcctagtgtctttaaatacttcatgagcattcataattaaaatttatcttaagttctatgaagagtattaatgtaactagcataagtggttttcttcaggaaaataaatatcacagtattatctgtgttaaaatggtttttgcctaaaatataatttttaatttggcttttcttatttaaaattccattatcttatgaataagcacttgaatcagtttttaaaatatttagtctaagatgattcaaagtagttttattttaatacaggacttttaaatggcagtatttcatttcttgtcaattatgttggtactttccacaaatctataaagaaggataaattgtaccatcattttattataatcctcaagagaaaatgtgtaattcaaaagattaatgtgtattaaaacacattatgtatcttagttacatttctatcagtacttttattaatatttgtgaaagaagacagcttaatagtagttagcttaagtagtttctccaagtacttttgtgctatcaatgagttcttctcaaaaaataattagttaggccaggcacaatggctcacacctgtaatgccagccctttgggaggccgaatgggcagatcacttgaggtcaggagtttgagaccagcctcgccaacatggtgagaccctgtctctactaaaacgataaaaaaaaaaaaaaaattagccaggcttggtggcacacgcctgtaatcccagctactcagatggctgaggcaggagaactacttgaacctgggaggtcaaagctgcagtcagccaagatcttgccactgtactccagcctgaagagcgagactctgtctcaataatataataatagttattatttaattgcaacatgaagttggaagccattttctgttacttctttaaggagctaaatcttttatatttttgttttctctccccttgcgtttcatattttagcttatgatctaaatatatattttgtatattataatattttaggaatagcttaattaagaactcacagactttgacaaagtggtaactagacttttaattactagattcttcaaattaggcttaatgcctgctagcatgccaatccaatcccatgactgatgttattatacactatggcaaatacaaagttgtagtattatggttcttgatggtgtgatttacttatgtaaattatgtacaaatttaagttcaatgaaacactgatttaatgtactgaaaggtaaatagtaccatagtgaattattttctgtcttgccttaggtttatttttattatcttcaatattagaataaatgctaaattattttcatttaaggatttatgtagttgaatattatcatttagtaatatttaatcatttgaaataaaatttaaagctttaattgatctaatagagatggttttctacttttccactcttcctccctcttatgccttcacttttgttttctgtgcccagaattttcttcacattctttactacctgttttgtctattatatccaacccattttctttttattataattttgatttggggcatttgaagaaaatacagcaaaactacaagaactggtaataagcatgcataatctcacctacttagtgaacctaatataaacctaatataaagaaccaccgtatttgcaatatatataactggtgaaaaactagtgtccagaatatataaatgatccctatgaatcagtaagaaaaagacagtcaatagaaatttggacaaaagactttatatggcatttcaagtgaaaggaaatccagatgaccaagaaacatgaaaatattcccagccatattaatatttgagaagtaaaaaataaaactacaaggaggtattacatctttaccttatttgcaaaaatgaaatgatctaatgatactaagttttggtgatgatgtcagctcttacattgaaaacaatcactgtggaaaaatttgtccctcagtaaatttaaagataaacatgctcaaaacctagcaattgcactctgaagtatacatctttgcaggttatctttcattacagttatttttttccctgtcaggaccctaactaatacaatgccttgggaaaactaatgaacatgtatcctaggaagcatgtacaagaaagttcttcccagtcaggaaggtggccaagaaaaaaattttttaatgttcatagcagcactgcaatatccaaaagttagaaatgaaccaaatattcagcaatggtagaatggttaaattgtaccatggcatttatattgaaacagtagaattctacacagtggtgaaaatgaaggaaatagctaaccacaacatagatgaatatcacagacatagcatagagcaaaagaagcaaatcacagaaggatgccatcaacatgattccatttgtataaagtttaaaacagtataaactgaacaactatattgttttaagggtatatagttatatatatgagatacaactgtaaagaaaagcaagtgttttgctgtccccagaaccagaataatgatttcctctgtggagaagtacagcagtgtgattggggagtggcacctggtgcttctgggatgctggcaatgttctatttcttgtcttgggtggtgattgcatggatgttcacttttaaaatactctttatacatatatattttatatattcttgttcatatataacctttataataaagagaaaaaaatggcaaaaa

SEQ ID NO: 6529 - DNA, 10806 bp, Homo sapiens
taggacattcagtgagataaataaagcggaagagcaatacagcctatgtcaagaactttgcagtgagcttgctcaggatctacagaaagaaagacttaaggtgctttattttgatatggtgtccttagtttttaagttttttaatagtaaaatgctaccttaaaagctagagttagattacacatttcttaaagatgaatacaaattaataaacgtcagaatagtgtattcctatccccaacagtcagatacaaatccaattctgacccatatctggagtctgtgatgaggtgattctatgaagaagcaccttatgagaatagagtggttcagtataattcagaggactttacttctgtacctcaggagtacatttgaataagttaaaaccaaagttacactggcattagagaataaggcaaaagaaaggatttccagagaattgtattcacatattacaaatgtctttccaatcatcctttaatgtttttcttacttagacaatgaccttctaaaataggcattttgtttcaaggttgtagtccaggttgcttaacacaggacaacaaaacctataaggctttgaacttgctattttataatcttcactcacaacaatttatatttagtgtattcccaacactctcaaaccagaggtagagtcagtacaaagcgtaataaaaaggtattttaaaattgctacacaggtacaaatatctggtttgatagaagaaataagacctagtgttcaatagatcagtaaggtgactatagtgtacagtaatctgtgttacataccagaatagctagaagagaataatttgaatgtttctcgcataaagaaaatacaaatatttaaggtgatagatatccgaagtacacttatttgatctttacaaagatcaaaactatgaggtacatgtgataatttactatgttcatataatgcatcagtaaaactattatgctaatcagtaaaaaatttgttttaaaaaaattactacaaagagtggaatatctgatgagtatctttctctatcataccttgaatttaaagaattttctttttaaaaaatatttaaataaacatttaattttatgatcattttagatttccagaaaagtcacaaaaataatagaatttcagcatactcctcacctggtttcctccattattaacatattaccagagtacatttgtcaaaaataagaaactgacatttaatacattgtcaattattaaccccagactttatttggagtttacttatttttccattaatgtcgtctctgccttccagaattcagtccaggggactacattgcatttagctgtcatgtctctccagtttcctggtctgtgatagtttcttagtttttccttctttttcatgaccttgacagtgttgggtagtactatacaggtattctgcagaatgtcgcccaatttgggtttgtctgatgattttctcatgattagatcagggttatggatttttagaaagagtatcacaaagaggaagtgtccttctcataacatcctatcatggggtgtataatagccacatgatgtcatggttgatattaaccttcatcacttggttagtgtttgctaggcttctccactgtgaagttagtgtttttccctttggaagtaagtcagtaaatctaactaccctcagatgagagagagcaggaattaacttcctcctccaggggatactaaaatatacataacataaaatttacattttaaccatttttaagtgtacagttcatattgttttataaccatcaccaccacccatctctagaactgtttcattgtctccactgaaaccctgcactcataaaacactaagtgtaaagggaattcttacattaaattgtttggcatagcatctggcaatgcagaaggcacacaataagtgtgaactattcataagtcgttttcagtgagacacttttagaaagatttttttccttcctttgtaggtaattaatcaacctccaaaagagattcagtaaaaataaaagtgatcatttaacctttccctcttgtaatggtcttttataaaaattcagttggggggccaggcacggtggctcattcctgtaatcccagctctttgggaggccaaggcagggggatcacctgaggtcaggagtttgagaccagcctggccaacatggtgaaaccccatcactactaaaaatggtggcgggcacctgtaatcccagctactctggaggctgaggctggagaatcacttgaacctgggaggcagaggctgcagtgagccaagatcccgccactgcactccagcctgggcatcagagtgagactctgtctaaaacaacaaaaaaaaaaacaaacaaaaaaattcagttgggaaggggaataaaaattactggctaaaatgggattttaggtcaggcatagtggctcatgcctgtaatcccagcacattgggaagctgaggccagaggattgcttgagcccaggagttcaagaccagcctggacaacatagcaaaatcacgtctctacaaagaaaatgtaaaaattagctgggcatggtggcacgagtgtgtagtcccagctacttgggaggctgaggtaggaggatagcatgagcctgggaggtcaaagctgcagtgagccacgatcatgccactgtactccagcctgggcaatagaatgggacccccatctcaaaaacaaaataaaatgggattttagcttatgtttggaaagggaagtaaacgtttttggctaaaatggtattttaattattctttttttttctgagacagagtcttgccctgtcacacaggctggagtgcaatggtgtgatctcggctcaatgcaacctccatctcctggcttcaatctattctcctgcctcagcctccccagccgctgggattacaggtgcctgccatcacgctcagctaatttttgtatttttattagagacagggtttcaccatgttggccaggctggtcttgaactcctgacctcgtgatccgcccgcccaaaatgctgggattacaggcgtgagccactgcagccggcctcttattctttatgatatgtttatcaccatgttttataaataattggttataattccatattcttatgtccgtaaacctttctgaatttttctaacatgtaaatgacttttttctagaagttaggaagtcatacagaataatgtattctggttgggtgcagtagctcatgcctataatcccaacactttgggaggccaggatcgcttgtggccaggaatttgagactagcctgggtaacatagtgagactctgattctacaaaaaaataaaaaattagctggtgtactggcacgcacttgtaatcttagctactcaggaggctgaggcaagaggattgcttgaacccagaagttgaaggctgcagtgagctacagctgtgccagcgcactccagcatggacaacagagagagaccctgtctcataaataaataaataacatattgtatatgttatagggtagaactgttaccattaagttgaagaatgtgaattttgaagtaaaaactcgtgcatctacagtttcatctgttgtttctactgcagaagaaatatttgccattgctaaggaattgctaaaaacagaaattgatgctgattttccacatcccttgagattaaggcttatgggtatgactttttcatttttttgtttttccttaaatctgctagattttcccaaataatcaactttgggaatacagggggcccccaacttaacaatggttcaacttaatgatttttcaactttgcgacagtgggaaagctgtatgctttcagtacactcttgacttacaaggtggttacatcccgataaacccatcataaattgaaagtattgtaaattgacttattatgttttcaatttacagcgggtttatctggatacaatcctactgtaactcaatgagcacctgtattctcgccttcattttatttcttaaacctgtttacgaagttcttcctttgctgctgccatttgtcttagttattagaccctgatgtgtgaagccatgatcacttagtttaattccagtaagggtcaattaaagttgttattttccttataacttaatgaaattcttgtggccaggtgtgtttcaaaattcaaaacttttcagattttagaaagcaaattcagtgcatgtagagtatattacgttgtaatacttctttgtggatctggggcaacaccccctgttcaaacacattaatatttctgtagcaaaacaaaatattcagagactgtaaagactgatgacattaatttagtcatcaggtatcacttgttgcttacaattttcagaactttttggattttggaattacagataaaggattgtgacattgtgaaatcacatctccagccactacatggtaaaaagtaacaagccatgtttccaaagtgtactggttgaaagtatatatgtggatcaccactccaaatgcacattttactagtaaggagtgggtcactagccataattttatttatgaaagatatagcacacactgaaatcaactgaataaagtgttaattgaaagagccaggctgggcgcggtggctcacgcctgtaatctcaacactttgggaggccaaggcaggtggattgcctgaggtcaggagttcaagaccagcctggccaacatagtgaaactgcatctctacaaaaactacaaaaaattagctggacatggtggcgggcacctgtaatcccagctacttgagaggctgaggcaggagaatcgcttgaacccgggaagttgcagtgagctgagatcacgctgttgcactccagcctgggcaacaagagtgaaactccacctcagaaaaaaaaaaaaaaaaaaaaaaaaagcccaagagcagatatctatagaagcttaattcataattgccaaaactttgaagcaagcacgatgtccttcggtacgtgaatggataaataaactgtggtacatacagacagtggaataatattcagcacagaaaataaatgaattatcaattcatgaaaagacacgaatgaaacttaactgcataatgttaagtaaaagaagccagtctgaaaaagctaaatactgtgtgattccaaccatatgagattctggaaaaggcaaatatgagtaccataaaaaataattgattgtcaggagttaagaggggcaggaggtataaataggcaaaacacaggaattttagggcaatgaaatgattccgtatgattctataatgacacgtcattataaatttgtccagcgcccaggatgtattccaagggtgaaccctatgtaagctatggactttgagtgacaatgttgtggcagtgtaggtttatagattgtaacaaatgtaccactctagtgccacatgttgatagttggggtggtggaggggtgtgcatgtgtagggaaaggggatctttgggaactcattgtaccttctgctcaattttgctgtgaacctaaaattcctctaaaaaataaagtctattagaaaaaaaagagctaaagagtctgtatagttgactccagttagttactggtattaatttaatggtattatgtgtcacatatgaattaaaatcctacatcattatactaactccaaatagttaatatttaatgatattcttttataaaggaaggtaaatctgtacttataataccagctttgaaatgttacttatagtttctctctagccaaccttttgtatatgtcatagcactagacaaaatgtttttatgcattgtgagtgaattggctttgttcaatttgaaattgattgtgattggtttaatttaggtgttcggatatctagttttcccaatgaagaggacaggaaacaccaacaaaggagcattattggctttttacaggctggaaaccaagccctgtcagccactgagtgtacattagagaaaactgacaaagataagtttgtaaaacctctagaaatgtctcataagaagagtttctttgataaaaaacgatcagaaaggaaatggagtcaccaagatacatttaaatgtgaagccgtgaataaacaaagtttccagacatcacaaccattccaagttttaaagaagaagatgaatgagaatttggaaatatcagagaattcagatgactgtcagatacttacctgtcctgtttgctttagggctcaagggtgcatcagtctggaagccttgaataaacatgtagatgaatgtcttgatggaccttcaatcagtgaaaactttaaaatgttctcgtgttcacatgtttctgctaccaaagttaacaagaaagaaaatgttcctgcttcttcactttgtgagaagcaagattatgaagcccatccaaaaattaaagaaatatcttcagtagattgtatagctttagtagatactatagataactcatctaaagcagaaagcatagatgctttaagtaataagcatagcaaggaagaatgttctagtctcccaagcaagtcttttaatattgaacactgtcatcagaattcttcttctactgtttcattggaaaacgaagatgttggatcatttagacaagaataccgccagccttacttatgtgaagtgaaaacaggccaagctctagtttgtcctgtttgtaacgtagaacaaaagacttcagatctaaccctgttcaatgtgcatgtggatgtttgcttaaataaaagttttatccaagaattaagaaaggataaatttaacccagttaatcaacccaaagaaagctccagaagtactggtaagtgtgtaattgttttaaactgcatgattttctaggaatatgtattattaaaattaatgagattgttgttaaatctgaaacatatactattaaatgggtagtttgtgtatgccgccatttagggaaatgttggttacattgccataggttagaattaactcaagcctgtagattgtgaatttggggaaaactttggtttgatcttgatttagcacagaatgaactcaaaggtttaaggagctgagtgatctaatcaaacaaattccttcagagaacatctgtgaaggcacagtggtaaattaactataactgcataactagaaagcctctttaacttattttttggtagtgctgactctacccaaatttcaccaataaaattaagtgtaatgctaataaaattagtaaattacaaagaaattatagtttttggtgtgtttacatatgaactatatagtactaaggaagtttaatcaataagttttaactttttaaatttgtatacaactttttaattatttcatattattcattatggaatttcttgactttctttcctctaaaggtagctcaagtggagtacagaaggctgtaacaagaacaaaaaggtatggctaatttgagctttaataaagctggctacaatatgaaaattcaattattttataaattattaagtaatcaatattaaaaatgaattattttctagaatctcttcctgcattttaattgtgtgttccttttcattctaggccaggattgatgacaaagtactcaacatcaaagaaaataaaaccaaacaatcccaaacatacccttgatatattttttaagtaaacattgaacattttatcattaatttttaattgaaactagttattttataatcaatgaatttgttctttctgattttaagtttgcagatttatttagtgaaggcaagtgcaataatccttcctcagatgatgtttgcttttctaagatacatatactgattctgtgtatcttttttataaccatgagaattttacttccattatacatcaattggaaatcaatcctgttaagagataattcttaaaagggaaattaggaatgggataagaaggtgatttttttattatttttatactgaatataaaaacatttgtaagggctctcaaagattcacacatgcctatattatcataagaatttttcagcacttaactactttgttggcattgatcctagtgtctttaaatacttcatgagcattcataattaaaatttatcttaagttctatgaagagtattaatgtaactagcataagtggttttcttcaggaaaataaatatcacagtattatctgtgttaaaatggtttttgcctaaaatataatttttaatttggcttttcttatttaaaattccattatcttatgaataagcacttgaatcagtttttaaaatatttagtctaagatgattcaaagtagttttattttaatacaggacttttaaatggcagtatttcatttcttgtcaattatgttggtactttccacaaatctataaagaaggataaattgtaccatcattttattataatcctcaagagaaaatgtgtaattcaaaagattaatgtgtattaaaacacattatgtatcttagttacatttctatcagtacttttattaatatttgtgaaagaagacagcttaatagtagttagcttaagtagtttctccaagtacttttgtgctatcaatgagttcttctcaaaaaataattagttaggccaggcacaatggctcacacctgtaatgccagccctttgggaggccgaatgggcagatcacttgaggtcaggagtttgagaccagcctcgccaacatggtgagaccctgtctctactaaaacgataaaaaaaaaaaaaaaaattagccaggcttggtggcacacgcctgtaatcccagctactcagatggctgaggcaggagaactacttgaacctgggaggtcaaagctgcagtcagccaagatcttgccactgtactccagcctgaagagcgagactctgtctcaataatataataatagttattatttaattgcaacatgaagttggaagccattttctgttacttctttaaggagctaaatcttttatatttttgttttctctccccttgcgtttcatattttagcttatgatctaaatatatattttgtatattataatattttaggaatagcttaattaagaactcacagactttgacaaagtggtaactagacttttaattactagattcttcaaattaggcttaatgcctgctagcatgccaatccaatcccatgactgatgttattatacactatggcaaatacaaagttgtagtattatggttcttgatggtgtgatttacttatgtaaattatgtacaaatttaagttcaatgaaacactgatttaatgtactgaaaggtaaatagtaccatagtgaattattttctgtcttgccttaggtttatttttattatcttcaatattagaataaatgctaaattattttcatttaaggatttatgtagttgaatattatcatttagtaatatttaatcatttgaaataaaatttaaagctttaattgatctaatagagatggttttctacttttccactcttcctccctcttatgccttcacttttgttttctgtgcccagaattttcttcacattctttactacctgttttgtctattatatccaacccattttctttttattataattttgatttggggcatttgaagaaaatacagcaaaactacaagaactggtaataagcatgcataatctcacctacttagtgaacctaatataaacctaatataaagaaccaccgtatttgcaatatatataactggtgaaaaactagtgtccagaatatataaatgatccctatgaatcagtaagaaaaagacagtcaatagaaatttggacaaaagactttatatggcatttcaagtgaaaggaaatccagatgaccaagaaacatgaaaatattcccagccatattaatatttgagaagtaaaaaataaaactacaaggaggtattacatctttaccttatttgcaaaaatgaaatgatctaatgatactaagttttggtgatgatgtcagctcttacattgaaaacaatcactgtggaaaaatttgtccctcagtaaatttaaagataaacatgctcaaaacctagcaattgcactctgaagtatacatctttgcaggttatctttcattacagttatttttttccctgtcaggaccctaactaatacaatgccttgggaaaactaatgaacatgtatcctaggaagcatgtacaagaaagttcttcccagtcaggaaggtggccaagaaaaaaattttttaatgttcatagcagcactgcaatatccaaaagttagaaatgaaccaaatattcagcaatggtagaatggttaaattgtaccatggcatttatattgaaacagtagaattctacacagtggtgaaaatgaaggaaatagctaaccacaacatagatgaatatcacagacatagcatagagcaaaagaagcaaatcacagaaggatgccatcaacatgattccatttgtataaagtttaaaacagtataaactgaacaactatattgttttaagggtatatagttatatatatgagatacaactgtaaagaaaagcaagtgttttgctgtccccagaaccagaataatgatttcctctgtggagaagtacagcagtgtgattggggagtggcacctggtgcttctgggatgctggcaatgttctatttcttgtcttgggtggtgattgcatggatgttcacttttaaaatactctttatacatatatattttatatattcttgttcatatataacctttataataaagagaaaaaaatggcaaaaa

SEQ ID NO: 6530 - DNA, 9411 bp, Homo sapiens
taggacattcagtgagataaataaagcggaagagcaatacagcctatgtcaagaactttgcagtgagcttgctcaggatctacagaaagaaagacttaaggtgctttattttgatatggtgtccttagtttttaagttttttaatagtaaaatgctaccttaaaagctagagttagattacacatttcttaaagatgaatacaaattaataaacgtcagaatagtgtattcctatccccaacagtcagatacaaatccaattctgacccatatctggagtctgtgatgaggtgattctatgaagaagcaccttatgagaatagagtggttcagtataattcagaggactttacttctgtacctcaggagtacatttgaataagttaaaaccaaagttacactggcattagagaataaggcaaaagaaaggatttccagagaattgtattcacatattacaaatgtctttccaatcatcctttaatgtttttcttacttagacaatgaccttctaaaataggcattttgtttcaaggttgtagtccaggttgcttaacacaggacaacaaaacctataaggctttgaacttgctattttataatcttcactcacaacaatttatatttagtgtattcccaacactctcaaaccagaggtagagtcagtacaaagcgtaataaaaaggtattttaaaattgctacacaggtacaaatatctggtttgatagaagaaataagacctagtgttcaatagatcagtaaggtgactatagtgtacagtaatctgtgttacataccagaatagctagaagagaataatttgaatgtttctcgcataaagaaaatacaaatatttaaggtgatagatatccgaagtacacttatttgatctttacaaagatcaaaactatgaggtacatgtgataatttactatgttcatataatgcatcagtaaaactattatgctaatcagtaaaaaatttgttttaaaaaaattactacaaagagtggaatatctgatgagtatctttctctatcataccttgaatttaaagaattttctttttaaaaaatatttaaataaacatttaattttatgatcattttagatttccagaaaagtcacaaaaataatagaatttcagcatactcctcacctggtttcctccattattaacatattaccagagtacatttgtcaaaaataagaaactgacatttaatacattgtcaattattaaccccagactttatttggagtttacttatttttccattaatgtcgtctctgccttccagaattcagtccaggggactacattgcatttagctgtcatgtctctccagtttcctggtctgtgatagtttcttagtttttccttctttttcatgaccttgacagtgttgggtagtactatacaggtattctgcagaatgtcgcccatttgggtttgtctgatgattttctcatgattagatcagggttatggatttttagaaagagtatcacaaagaggaagtgtccttctcataacatcctatcatggggtgtataatagccacatgatgtcatggttgatattaaccttcatcacttggttagtgtttgctaggcttctccactgtgaagttagtgtttttccctttggaagtaagtcagtaaatctaactaccctcagatgagagagagcaggaattaacttcctcctccaggggatactaaaatatacataacataaaatttacattttaaccatttttaagtgtacagttcatattgttttataaccatcaccaccacccatctctagaactgtttcattgtctccactgaaaccctgcactcataaaacactaagtgtaaagggaattcttacattaaattgtttggcatagcatctggcaatgcagaaggcacacaataagtgtgaactattcataagtcgttttcagtgagacacttttagaaagatttttttccttcctttgtaggtaattaatcaacctccaaaagagattcagtaaaaataaaagtgatcatttaacctttccctcttgtaatggtcttttataaaaattcagttggggggccaggcacggtggctcattcctgtaatcccagctctttgggaggccaaggcagggggatcacctgaggtcaggagtttgagaccagcctggccaacatggtgaaaccccatcactactaaaaatggtggcgggcacctgtaatcccagctactctggaggctgaggctggagaatcacttgaacctgggaggcagaggctgcagtgagccaagatcccgccactgcactccagcctgggcatcagagtgagactctgtctaaaacaacaaaaaaaaaaacaaacaaaaaaattcagttgggaaggggaataaaaattactggctaaaatgggattttaggtcaggcatagtggctcatgcctgtaatcccagcacattgggaagctgaggccagaggattgcttgagcccaggagttcaagaccagcctggacaacatagcaaaatcacgtctctacaaagaaaatgtaaaaattagctgggcatggtggcacgagtgtgtagtcccagctacttgggaggctgaggtaggaggatagcatgagcctgggaggtcaaagctgcagtgagccacgatcatgccactgtactccagcctgggcaatagaatgggacccccatctcaaaaacaaaataaaatgggattttagcttatgtttggaaagggaagtaaacgtttttggctaaaatggtattttaattattctttttttttctgagacagagtcttgccctgtcacacaggctggagtgcaatggtgtgatctcggctcaatgcaacctccatctcctggcttcaatctattctcctgcctcagcctccccagccgctgggattacaggtgcctgccatcacgctcagctaatttttgtatttttattagagacagggtttcaccatgttggccaggctggtcttgaactcctgacctcgtgatccgcccgcccaaaatgctgggattacaggcgtgagccactgcagccggcctcttattctttatgatatgtttatcaccatgttttataaataattggttataattccatattcttatgtccgtaaacctttctgaatttttctaacatgtaaatgacttttttctagaagttaggaagtcatacagaataatgtattctggttgggtgcagtagctcatgcctataatcccaacactttgggaggccaggatcgcttgtggccaggaatttgagactagcctgggtaacatagtgagactctgattctacaaaaaaataaaaaattagctggtgtactggcacgcacttgtaatcttagctactcaggaggctgaggcaagaggattgcttgaacccagaagttgaaggctgcagtgagctacagctgtgccagcgcactccagcatggacaacagagagagaccctgtctcataaataaataaataacatattgtatatgttatagggtagaactgttaccattaagttgaagaatgtgaattttgaagtaaaaactcgtgcatctacagtttcatctgttgtttctactgcagaagaaatatttgccattgctaaggaattgctaaaaacagaaattgatgctgattttccacatcccttgagattaaggcttatgggtatgactttttcatttttttgtttttccttaaatctgctagattttcccaaataatcaactttgggaatacagggggcccccaacttaacaatggttcaacttaatgatttttcaactttgcgacagtgggaaagctgtatgctttcagtacactcttgacttacaaggtggttacatcccgataaacccatcataaattgaaagtattgtaaattgacttattatgttttcaatttacagcgggtttatctggatacaatcctactgtaactcaatgagcacctgtattctcgccttcattttatttcttaaacctgtttacgaagttcttcctttgctgctgccatttgtcttagttattagaccctgatgtgtgaagccatgatcattagtttaattccagtaagggtcaattaaagttgttattttccttataacttaatgaaattcttgtggccaggtgtgtttcaaaattcaaaacttttcagattttagaaagcaaattcagtgcatgtagagtatattacgttgtaatacttctttgtggatctggggcaacaccccctgttcaaacacattaatatttctgtagcaaaacaaaatattcagagactgtaaagactgatgacattaatttagtcatcaggtatcacttgttgcttacaattttcagaactttttggattttggaattacagataaaggattgtgacattgtgaaatcacatctccagccactacatggtaaaaagtaacaagccatgtttccaaagtgtactggttgaaagtatatatgtggatcaccactccaaatgcacattttactagtaaggagtgggtcactagccataattttatttatgaaagatatagcacacactgaaatcaactgaataaagtgttaattgaaagagccaggctgggcgcggtggctcacgcctgtaatctcaacactttgggaggccaaggcaggtggattgcctgaggtcaggagttcaagaccagcctggccaacatagtgaaactgcatctctacaaaaactacaaaaaattagctggacatggtggcgggcacctgtaatcccagctacttgagaggctgaggcaggagaatcgcttgaacccgggaagttgcagtgagctgagatcacgctgttgcactccagcctgggcaacaagagtgaaactccacctcagaaaaaaaaaaaaaaaaaaaaaaaaagcccaagagcagatatctatagaagcttaattcataattgccaaaactttgaagcaagcacgatgtccttcggtacgtgaatggataaataaactgtggtacatacagacagtggaataatattcagcacagaaaataaatgaattatcaattcatgaaaagacacgaatgaaacttaactgcataatgttaagtaaaagaagccagtctgaaaaagctaaatactgtgtgattccaaccatatgagattctggaaaaggcaatatgagtaccataaaaaataattgattgtcaggagttaagaggggcaggaggtataaataggcaaaacacaggaattttagggcaatgaaatgattccgtatgattctataatgacacgtcattataaatttgtccagcgcccaggatgtattccaagggtgaaccctatgtaagctatggactttgagtgacaatgttgtggcagtgtaggtttatagattgtaacaaagtgtaccactctagtgccacatgttgatagttggggtggtggaggggtgtgcatgtgtagggaaaggggatctttgggaactcattgtaccttctgctcaattttgctgtgaacctaaaattcctctaaaaaataaagtctattagaaaaaaaagagctaaagagtctgtatagttgactccagttagttactggtattaatttaatggtattatgtgtcacatatgaattaaaatcctacatcattatactaactccaaatagttaatatttaatgatattcttttataaaggaaggtaaatctgtacttataataccagctttgaaatgttacttatagtttctctctagccaaccttttgtatatgtcatagcactagacaaaatgtttttatgcattgtgagtgaattggctttgttcaatttgaaattgattgtgattggtttaatttaggtgttcggatatctagttttcccaatgaagaggacaggaaacaccaacaaaggagcattattggctttttacaggctggaaaccaagccctgtcagccactgagtgtacattagagaaaactgacaaagataagtttgtaaaacctctagaaatgtctcataagaagagtttctttgataaaaaacgatcagaaaggaaatggagtcaccaagatacatttaaatgtgaagccgtgaataaacaaagtttccagacatcacaaccattccaagttttaaagaagaagatgaatgagaatttggaaatatcagagaattcagatgactgtcagatacttacctgtcctgtttgctttagggctcaagggtgcatcagtctggaagccttgaataaacatgtagatgaatgtcttgatggaccttcaatcagtgaaaactttaaaatgttctcgtgttcacatgtttctgctaccaaagttaacaagaaagaaaatgttcctgcttcttcactttgtgagaagcaagattatgaagcccatccaaaaattaaagaaatatcttcagtagattgtatagctttagtagatactatagataactcatctaaagcagaaagcatagatgctttaagtaataagcatagcaaggaagaatgttctagtctcccaagcaagtcttttaatattgaacactgtcatcagaattcttcttctactgtttcattggaaaacgaagatgttggatcatttagacaagaataccgccagccttacttatgtgaagtgaaaacaggccaagctctagtttgtcctgtttgtaacgtagaacaaaagacttcagatctaaccctgttcaatgtgcatgtggatgtttgcttaaataaaagttttatccaagaattaagaaaggataaatttaacccagttaatcaacccaaagaaagctccagaagtactggtaagtgtgtaattgttttaaactgcatgattttctaggaatatgtattattaaaattaatgagattgttgttaaatctgaaacatatactattaaatgggtagtttgtgtatgccgccatttagggaaatgttggttacattgccataggttagaattaactcaagcctgtagattgtgaatttggggaaaactttggtttgatcttgatttagcacagaatgaactcaaaggtttaaggagctgagtgatctaatcaaacaaattccttcagagaacatctgtgaaggcacagtggtaaattaactataactgcataactagaaagcctctttaacttattttttggtagtgctgactctacccaaatttcaccaataaaattaagtgtaatgctaataaaattagtaaattacaaagaaattatagtttttggtgtgtttacatatgaactatatagtactaaggaagtttaatcaataagttttaactttttaaatttgtatacaactttttaattatttcatattattcattatggaatttcttgactttctttcctctaaaggtagctcaagtggagtacagaaggctgtaacaagaacaaaaggtatggctaatttgagctttaataaagctggctacaatatgaaaattcaattattttataaattattaagtaatcaatattaaaaatgaattattttctagaatctcttcctgcattttaattgtgtgttccttttcattctaggccaggattgatgacaaagtactcaacatcaaagaaaataaaaccaaacaatcccaaacatacccttgatatattttttaagtaaacattgaacattttatcattaatttttaattgaaactagttattttataatcaatgaatttgttctttctgattttaagtttgcagatttatttagtgaaggcaagtgcaataatccttcctcagatgatgtttgcttttctaagatacatatactgattctgtgtatcttttttataaccatgagaattttacttccattatacatcaattggaaatcaatcctgttaagagataattcttaaaagggaaattaggaatgggataagaaggtgatttttttattatttttatactgaatataaaaacatttgtaagggctctcaaagattcacacatgcctatattatcataagaatttttcagcacttaactactttgttggcattgatcctagtgtctttaaatacttcatgagcattcataattaaaatttatcttaagttctatgaagagtattaatgtaactagcataagtggttttcttcaggaaaataaatatcacagtattatctgtggttaaaatggtttttgcctaaaatataatttttaatttggcttttcttatttaaaattccattatcttatgaataagcacttgaatcagtttttaaaatatttagtctaagatgattcaaagtagttttattttaatacaggacttttaaatggcagtatttcatttcttgtcaattatgttggtactttccacaaatctataaagaaggataaattgtaccatcattttattataatcctcaagagaaaatgtgtaattcaaaagattaatgtgtattaaaacacattatgtatcttagttacatttctatcagtacttttattaatatttgtgaaagaagacagcttaatagtagttagcttaagtagtttctccaagtacttttgtgctatcaatgagttcttctcaaaaaataattagttaggccaggcacaatggctcacacctgtaatgccagccctttgggaggccgaatgggcagatcacttgaggtcaggagtttgagaccagcctcgccaacatggtgagaccctgtctctactaaaacgataaaaaaaaaaaaaaaattagccaggcttggtggcacacgcctgtaatcccagctactcagatggctgaggcaggagaactacttgaacctgggaggtcaaagctgcagtcagccaagatcttgccactgtactccagcctgaagagcgagactctgtctcaataatataataatagttattatttaattgcaacatgaagttggaagccattttctgttacttctttaaggagctaaatcttttatatttttgttttctctccccttgcgtttcatattttagcttatgatctaaatatatattttgtatattataatattttaggaatagcttaattaagaactcacagactttgacaaagtggtaactagacttttaattactagattcttcaaattaggcttaatgcctgctagcatgccaatccaatcccatgactgatgttattatacactatggcaaatacaaagttgtagtattatggttcttgatggtgtgatttacttatgtaaattatgtacaaatttaagttcaatgaaacactgatttaatgtactgaaaggtaaatagtaccatagtgaattattttctgtcttgccttaggtttatttttattatcttcaatattagaataaatgctaaattattttcatttaaggatttat

SEQ ID NO: 6531 - DNA, 355 bp, Homo sapiens
gaaggtggaaggactacactggctaagtcttctggcctccgtctttctcctgtgctgcatgtcttctgcccttgaacatcagactccaagttcttcagcttttggactcttggacttccaccagtgatttgccagggactatcaggccttcagccacagactgaagggctgcaccatctgcttgtctgcttttgaggttttgggactcagactggcttcctggcttctcagcttgcagactgtgggacttcaccttgtgattgtgtgagtcaattttcctaagaaactccccttcatatatacatctattagttctgtccctctagaggaccctaatacaccaccaaacaagtca

SEQ ID NO: 6532 - DNA, 14103 bp, Homo sapiens
ttaatggtgtttcaatattatgttgtctaaaagtatgttaacttttttaaaaaattaaggttgacagatttgcaatggaattagaacaaagccgaaatttgagcaataccatagtgcacattgacatggatgctttctatgcagctgtagaaatgagggacaatccagaattgaaggataaacccattgctgtaggatcaatgagtatgctggtaagtaaagatcaaatacaaaaaggaaattttataacgtactcaagtaagctttactgtttcatgaagggggaattctttattgaggtctaccagtttgctgagtatttttctgggtgccttatatatgactcaattactgaatcctttcaacatactttaaggcaggggaccccaacccccagttcacagattggtattggtccatggtctgttaggaactgggcctcacaacaggaggtgagcgtcaggcaagcaaacgaagcttcgtctgtatttacaaccacttcccatcacttgcagtatgcccgagctctgtcagatcagttgtggcattagattctcataggagtgcaaactctattgtgaactgcacatgtgagggatccaggttacatactcattatgagaatcaaatgcctgatgatctatcactgtctcccatcacccccagatgggattctctaattgcaggaaaacaagcttagggctcccattgattctacattatggtgagttgtgtaattatttcattatatattacaatgtaattataataggaataaagtgcacaataaatgtgacgtgcttgaatcatctcaaaactatcaccccaccagtccgtggaaaaattgtcttccacgaaaccagtctctggtgccaaaaaggttaggaactgctgctttaaggtactagtttttatttccatttggcaaaaaagaaaactcagagagatgtttaataacttgcccaaagttacaaacctaataatttccatggcaaattaaatttttccataagtaaccgttctagttaaagagagttgaagaagaaagaaaaggaaatgttattctaaagtattaatagagattttcaaactgatctgcaggccaaatccagctttttattggaacaaagtcacacccatttatttattactattgttgcactaaaagagcagagttcaataattaagtgatctgcaaagcctaaaatgattactatctggacttccacagaaaagaaaaggtttgccaaccctagttctggaataacatacttcgttaatagagtacatttagaatgcagttaaattgtttttcccatgacttagaacttttgcttttctgattactgagttgctcttcctttttaccactctaaccttagaagaaccaggatagctatgtgtggctgaaagtgtgttggaaattaaaagtagcaactaaaatagatgagataatatttaaaaagtattagaaaaacaagaagagttcttccctgttcctaactccttcccatgccttagatagctacaaaactaattcttactgagtgattattttattataaaactataatctgtttgtttttttatctctgcctctgtgagtatgcaggcagctgataagtctgattccaaaacactgttttttgaaaggaaactcccctttcctacaaatcatcaataaatatttcaaaaaatatatttaattttattaagatataacaccataaatttatgtatgtttatgtatgtgtatacatacaaacttgctgtagccatgttaaagctaaaccaactgcttttgaaatctacaaaatattttctttcctacaatttctgtcctcctaaaaatcagttattgtttctaaattcaaaattattgttatatttaaacaaagattaccccttttgtatgttgaacaaatagttttcccttctactaagcataactttttgtcctattaaacatatgaaagtatatctacaaattaatgggagtgattgtttgattattcccactgataaaattcttttttggcgaatttgatggatttttgaaatgttctaacttggcactgagagttgcaactgagatcctacagcagttacctattgctgcataacagcctcccccagtatttagtggacagccaaaatttatttgctcatgattctgtaatttgagcagagtgcgatggcgatggctcaaccttgctctacctggagttggctagggcaatttaactgaggctaaaaaatccaaggtggcttcattcataggtctggcacttcgactgaggagattggaatggattccagcttcagaactttctcctctccattgttgcttcaacatttagtaatctaccccaaaatatttacaatggttgctggattacaaaaagcaaaagcctaggtttcagaactcagtgtcacttccttcacattatttttatcaaggcaagtcacgtggcatgaggaactagaacccacttttgataagagtaacttgtaaagtattgtggctgtgatctacaatataccacaaatctaaaagttagagaaattcttatttaaaagtttgtttgtcctctgctatagatctagcttttatgtcaattatattaaacttatttactaaaccattggttttgtttctagtgctatccacattttctgttccagaacactgaccaaggattagtatagttctgagtactatcaagatgttttaagtgccatttgaaaatcattagacgaaaattcatattattctgaaataatcccttcatttgtttctgttttgcatttctttgaaatttcacttgagattctaaataaggatttaatttgtgataaaatttgttttataaatagtactgtggtctaccacgttcacatagactttcatcagatatcatcaccaacaggatttaataagcaatattctcctttttactctcatacttttgtagttccatctcctagtcaaaatgttttcagcaaaaaagataattaagccttaagaaaaaccttaatttctaaacttattttaagctttaatcacttcattttggagacttaatttggctgaccacatagaccttttatttttgttctagatgaaaagtttccaaaatcccaaatagaccaaattcgaaaagtttactattatactatactattactttatataatgtaacatctatactaattgtactatactattattttatgactattctatacaacttaccatactattactttcatgtaacataactcactatcatccaaattttgatattcattctataataagtatgccttaaaaccaatgaagtttagttggtagaaatataagaaaatctttttattagcacagtcttgcttatacctggtatcacattataaatatagggatagtaatgggagagggtcatggtatcaaaataccgtgacagaataagtcaaaacttggattaaaacagtggcctataatcagagaaatgcaaatcaaaaccacaatgagataccatctcacaccagttagaatggcgatcattaaaaagtcaggaaacaacaggtgctggagaggatgtggagaaataggaacacttttacactgttggtaggactgtaaactagttcaaccattgtggaagttagtgtggcgattcctcagggatctagaactagaaacaccatttgacccagccatcccattactgggtatatacccaaaggattataaatcatgctgctgtaaagacacatgcacacatatgtttattgcggcactattcacaatagcaaagacttggaaccaacccaaatgtccaacaatgatagactggattaagaaaatgtggcacatatacaccatggaatactatgcagccataaaaaatgatgagttcatgtcctttttagggacatggatgaagctggaaaccatcgttctcagcaaactattgcaaggacaaaaaaccaaacaccacatgttctcactcatagatgagaattgaacaacgagaacacgtggacacaggaaggggaatatcacactctggggattgttgtgtggtggggggaagggggagggatagcattaggagatatacctaatattaaatgacgagttaatgggtgcagcacaccaacatggcacatgtatacatatgtaactaacttgcacgttgtgcacatgtaccttaaaacttaaagtataattaaaaaaatatatgatagaatgatgaccttgagtcattaataaaaaacaatgcttaatacattctatttttggaaaacaacaaaaacaaaaacaaaaaactggcctataaatgaaatgtccttgaattgaaaatgcacatattaatgtgtttcttatgaatgcattgatcaatatgtccatttaggtttgtgtatttttttccatgtggtcaattttctttcagtctacttcaaattaccatgcaaggagatttggtgttcgtgcagccatgccaggatttattgctaagaggctgtgcccacaacttataatagtgccccccaactttgacaaataccgagctgtgagtaaagaggtaagttaatgtctcacccctactttaggctttcactgagttcctgtcacctacagaatctcaagtccaagtgccttagcacgtaggatttggtcttagcttatcctttcagttgagcctcctatcacttcttcagcttgtatattgaatactgagctgcatatagcatccagaatacatcattctttttcccaattctttgcctttccatgcagttttcatttgcttagaaaacttcccatttcctcaaactttgaactgccttaatgataatataaaattaaatttagctattttttcttaatgtacaatatacattttttctagaaccacattttatttataacttacagaatctactcatcattaatttcaacctattgtctgaataattacttattaatgttgttaaacagtgacaaaattcatgtattttgattagcctactttacttgccccataatcatttgctgtctaagagactgataattgaaaagggagtaatccattgcttcaaaaaggatctttgaagtagatttgattatttactaaaattgccaaactgtcatatgtgaaaaccgccattttttctattttttatgacaactggtctatcatgcagtgctggaatttaatttttgaattaaaattttagactactacatcaaatacttttagactgctatagtaaaatgtgtttaagactgctgcctgaatggaaacacttaaaaaaactgtgacctaatacttattactctttagttataccaggggtctttaaattcacccctcttatttgtattccacctcattttccctagaagtgacactattccaagtttaaacacaggtttgtttgttttttttctgtccaaggcagtctgtgacagcaagtgctttttgcatacctctgaaaaggtggtggaggagaggggagcacacttacatttggttactgcttatctctttcattgtattcctaattaaaaagagataaaatactaatcataaatatagccttttaagaagttttaaaaatcctacaaaagtttagtaagaaaaggtattttttaaagtcgtactttaactcagcaaaacttctggcagtatgccagtgaaaaccaaagtgtttttagttattttagtctggttatttatgtaagtcagagaactcttcaaatttgagccggatctagctagtttatatgcagataacaaatgagttcttctgtgtaaatgaactgtagaacaaattcatcactgcctatggatacataaatattcatgacttggttagaaaatttaagaaaaagccctcccgttttttttgacacagggtctcaccccatagcccaggctggagtgccgtgactcgatcatacctcactataaccttaaactcttgagttaagcaatcctctggcctcagcctcctgagtagctagattgacaggcatgcatcaccacacccacctaattttaaaatttttttgcagagatagggttttcctatgttgctcaggctaggcttaaactcctggcctcaaaaaattatcctgcccaggcctcccaaagtgctgggattacaggcatgagccatcatgcccagttagccatttttgttttatccaaaatattggagctttaagtgcttgatttttactggaacgtctcttttaattcttacagcaatatcctatgtaaaggaagttaataaatactcaacagtgtctctagggagtacttctcattcagaatcttagttggctgccagttacagacttcacagagtttcattttcattggaaagattctatttgagcacattataacaagaacaaagctaattaaggcactctctgagtaaaacttggccaagtttatatcaccattttctaaaattccctttgactcagctgttcataattatattaagctaaaaacctttgtttttataaaagaagaaacagttttctcatgatacagtagacagttttaaaagctaaatggaagcttaacgtaattcagcaaatatgttttctaatataaattttttttgaggcagggtctcactctgtcacccaagctggaaaatatgcatattattttgacaaccattgcctctaattatagctaatacttaagtggttagaaaaaaaagtcatagttttatgtagtaacactatgttatataaaaggcatttctgaattaaaagccactataattctaatctttatatgtatttcttttatcctaagatgttactccagacttttccccatcatttaaggtaatcatggagtacactatagattgtcatttttttccattccagatcttaataagtaataggaaatagaaaacattccttttcctgtatggattaatgcattaattaatgttaagtggacttttatgtgcatgttataattaattggaatattttctaaagcaacatagtacctttatataagattattcctttttaaaatgaaccaaaaacaataaatcacaaaaggcaggagggaatagaatcctatcattcccacttcagcttctgacgagctacctaaaaccttaaccatttttttgtatgggcctaccagataatgttttctgagatttatttgaattgcttattataactagatataggtagctaaatagagattgtatcaaatgaagctattttatggtcttctgccttcatggtctattttaatacaaaaggaaattttgaaaatattccctggtagtggattatttattccttaaatccatgaactattgactgcaggattgttactgtagttgcaaactaagaatattaacatttcttatcagctacatatgacagaagaagtttgctatcacagcaaaatttaaacttttttttgtttcctttgaaggttaaggaaatacttgctgattatgatcccaattttatggccatgagtcttgatgaagcctacttgaatataacaaagcacttagaagaaagacaaaattggcctgaggataaaagaaggtatttcatcaaaatgggaagctctgtagaaaatggtaagcaacttattaagactatcaaaccaagaagcagtgaaaaaaaaaaacccacaactctttgaattaatccaattaatttattagcctgcataggtagaagggatagatatgtacctttataaaaatgtaaaatcagaaaattttaaaaataccagtgggttttctgagttaaacatgtggaatatcacatataaacaaaatgtgattgttaaatctctgagcttaagagtctgcagagtccctgaacaaagtaattttatagcagttattttcctaaggtctaactaacaaagagtttggatggcattgaagctgaggaagttgtctgtttaaagcggccttttcttgttgttagaaaagactagcctcaaacatatcaaaacattggatgattctatttttcttcattttcctaattttctataatctaattattatagcaattatgactgtttttagctctgccaaaattaatgacttcccactcccttctttgccttagactttataatttcaagactccagggtttttttaaaaaaataatccctttatgacctatccaaaagcaatgccaagaaacatgcagatattacacatactgctttcaacattttgtcaaaggtatgattatgtctgagatgtcctggacccctgaacaaagttcacctggatgaaaaagtgacacagaagggtttgctcacaacccacaggaacatttcatgtgcaccactcattgcttcagacgggccaggcagtgctggggagacctgtttgtaactttccctgaagcaaaaatggtagatccacaatgacattaatctaactctctcacattatttgtgactcacatcatttgatgcaagtttaatatgggcatcaaatacaacttcattaccttatttaaagtgctaagggatagctctctctttttttttataggagcattaaacaataatcatcatttctcgacacaggcacagagcaaaaggttttccttatttggtgtaactttattgtttgaggatgtggaacataaagcctgatgtcactttgtataaaatcttactttattaattccttactttcacaagagaatgggggaaaatcattaaataattatgtcaaagcatcccctgagggcctcccataacaattacttgcatgatgtgttttaaaagctttacattgggattaaagtaaatgttttcattttctactaatttttttcttttttttgagatagggtctcactgtgttgcccaggctggagtgcagtggtgcagtctcagctcactgcaacctccgcctcctgggttcaagcagttctcctgccttagactcccaagtatctgggattagaggcgcgtgccaccacacccgactaattttttgtatttttagtagaggtggggtttcaccatgttggccaggctggtctcaaactcctgacctcaggtgatctgcccgcctcggccttccaaagtgctgggattacaggcatgagccaccacgcccagcctactaatgttcttttcatttattataatgtccaaactcactatgaatatgtgaatttttaatatctattgcttttaacatatttacttgtatattgccctcttcgtgtattttcatattcttaaacaattggaatagttaaacttttcttctcatgtgtaaatacctgtgggctggactttcaggcgtgtctcacctcacatcatgccatgggaaattgtcaatagtgcattggaactgtggaaggcaattgatatatcttcctctaaagtccaagacattgttttgctgtttccccattttctaaaaggtgtttgtctttggaaatatattgctaactaccatctctacatacaaataaaataataattttttaaatgtttactctcccatgtaaatctggatggtgagtgccagataatataagaaactgaaataccatacactttttagcacttgtcttccaaatgaaatgctttaatcctagtgttacattctgattaccttagttatggggattataaagatgtttctgtcacaaagcaaataagaaactacttcagctcttagttacacagccaggcctcacaaaaaagtagaaagtagttcagattgaaaaggtacctgaacattctgcagcagctctgataatgtgtgagaaggcagcattcttcacttcctgctgtatagttctgctctcacagtggctcacctgagggcagggtggtagaggcatgaggtacaaaacatggcataaaaaactctgcagaacgggtttatgaatgtggcagataacttacttggtttgcagtttttctgtagctttctttaccgtgacttctacccatccagatggggaaaagggctccaggtagataccatttcaattgtttcacagtctttattttttttttatttttttttatttttttgagatggagtctcactctgtcaccaaggctggagtacagtggcacaatctcagctcactgcaacctctgcctcctgggttgaagtaattctcctgccccagcctccggagtagctgtgcgccaccattcctggctcatttttgtatttttagtagagatggggtttcaccatgttagccaggctggtctcgaactcctgacctcaggtgatcctcccacctcagcttcccaaagtgctgggattacagacgtgagccaccttgcctggcctgtttcccctctgaattgttctacattttaaaaccagcatattaaaaaatgacaggaactgaagcacataaatatcagctaatgtaagtttgaaaataaggcttattggcgaggcaaggtggttcacatttataatcctagcactttaggaggctgaggtgggaggatcagttgaggccaggagtttgagaccaccctgggcaagattgtgaaaccctatatttaccaaaaaattataaaattagctaagcgtgatggctcgcgcctgtagtcctagctatactccagcctgggcaagagggagaccctgtcttaaaaaaaaaaaaaaaaaaagagagaaagaaaataagcttattgtgtatgtgccctgggaattcagatttggaaaacatctgactgaattaacatctatgacttacttcacactacatattttaaatttttaaattaatcagatgtctgtcatatttattttatattatctttaaaattttttcctaaacagccaaatacatttttcaagtaatatacattcgtatgcatcttaaaactagaaatttaattttttcttctgtattgaccttaatttggaaaatatttatatgtaataaaattacgagatgggatcagaaagctttgttgctaaccttggttgttataaatacatttaaattgtatttcttctacattaagccaagaaaacaggctttaatagatttgttcatggagacatttttagtatcagtatagatttaagaatattttacagtccatttatgaaaaatataaatataaagaggcaataaccagactggtatttttactttactttgtaataatagtttatagcctattaataataacgtctctttttcttaaacttggattatccaatcagaccttcagaatttgtatattcaaagaagcataactttcacaggtaatttctatttattacaaatgtgcccttagtcaaagtgatactttataaacaagcaaatcaaaattaaaatcagcatttgaaagaagaaaattcagattattttaacatctaaaaggtttcttccataaatgaagaaaagttaagtgtttttccttctaaaaacaaaacttattttcagtataattattatatattgtttattatattctaaattctaattttcgaagattctttttcttcctaaagaagaataaagaaaagatttcctttttttttttttaagaaaaaggtaatgtgaactgaaacctaattctgaatttcaattaatttaggtacgaacattagtgagttttacataagatatttccttttaatatttatactgtggaaatggataatagtctttttaagaaaaattcataatcagtgttctctttaatggttataaaacattaaatgataaatgatggcatttctgatcttggatcctagaaactaaactaaactagatttttgtttttgtcttcagaaataatgtagggaaacctaacttatgaagtatatacttcttaaaataaaggtgagttattttcctgtttatgacttagataatccaggaaaggaagttaataaactgagtgagcatgaacgatccatctctccactactttttgaagagagtccttctgatgtgcagcccccaggagatcctttccaagtgaactttgaagaacaaaacaatcctcaaatactccaaaactcagttgtttttggaacatcagcccaggaagtggtaaaggaaattcgtttcagaattgagcagaaaacaacactgacagccagtgcaggtatttaaaagagtattgatggccactgtagttataattttcagactggctaatttaagtgtaatattagtagtttctcattataaagtatatagtaacattttacttacttagtctttcattcaacttctaacaactttacctattcagaatagctgtgaacctagtaagtaaattggaattaagcagactatgagcctgaaggaaaaaaaagattatacgtttctttctttttttttttttttgagatggagtcttgctctgttgcccaggttggagtgcagtggggcgatctcattcagcttactgcaacctctgcctcctgggttcaagcgattctcctgcctcagcctcccaagtaggtgggactacaggcgcatgccaccatgcccagctaattttttgtattttcagtagtgacggtgtttcaccatgttagccaggatggtctccatatcctgacctcatgatccgcccaccttggcctcccaaagtgctgggattacaggcctgagccaccgcgcccgactcataaatttcatatagctatctttttctagcacaaaatatatttttattggttttgcatgtaataacttgagtattagtttttccttgggagacttcaatcctgtccaagattacattgcaggagagaacccagacggccacaaggtaagagacaaaagaaatactaactagcaacatagcaatccagaacaatctggtaaaaggaaaaacaaatttacatatgttgataacccatgaggccatcactgtctcttaacataataactgttattcatcatgaggaccctgaactatcttgtaaaagccatattgtgattaggtaaatcttttctttctacaccaaagcatgagaatgaataatgcattttaggaagatctatataacaattaaaatgaactgtttaatgaatatatttgaatatagctatttcaaattatcttaattaggactcctagaaattgtgaaacatctttttgaaaaatagtaatttgttttgtgaataacataaaaaggatacaccatctaattatcattattttaaatatactgtaaccagaatctttgattttttgctttatgtggataatctacgcaaaagacattttcaaagagtaaacatccaccctaaattatattctgtatcttttcttagagatagatatagaaccactataaaaacaatctgggctgggcatgatggctcacgcctgtaatcccagcactttgggaggccgaagctcgtggactacctgaggtcaggagttcgagaccagcctgaccaatatggtgaaacccccatctctactaaaaatacaaaaattagccaggcatggtgttgcgtgcctctaatcccagctactcgggaggctgagacaggagaatcgcttgaacccaggaggcggaggttgcagtgagccaagatcacgccattgcactccagcctgggcgacagagcaagactccatctgaaaaaaaaaaaaaaaaatctgtattcctactaaaggtagtaagtaagctaatagtaacacttaatattgcttagctcagaaattactcttacattttaaaatgtcatggagaattaaatatttctcatttttgctgccacaatgactgtaactagtacaatttattttcctaaaaccatagcaaaccctggggagatagatggtaatcaaatgttatttttaaagtagcattatatatcatttgagattttttgcaattaactttttttttctgttttgttattgcatatttaaaagtcatacatatcaacttctttgagtcatcagagtattcttcttttaaggcattgccccaaatacaatgttagcaaaagtatgcagtgataagaataaaccaaatggacaataccaaattcttcccaatagacaagctgt

SEQ ID NO: 6533 - DNA, 157 bp, Homo sapiens
atatttcttttttttgtttgtttttgagagggagtctcgctctgtcgcccaggctggagtgcagtggtgcgatctcggttcactgcaagctccgcctcctgggttctcgccattctcctgcctcagcttcccgagtagctgggactacaggcgcccg

SEQ ID NO: 6534 - DNA, 355 bp, Homo sapiens; identical to SEQ ID NO: 6531

SEQ ID NO: 6535 - DNA, 157 bp, Homo sapiens; identical to SEQ ID NO: 6533

SEQ ID NO: 6536 - DNA, 3264 bp, Homo sapiens
gggcttggatattgaggaccagacgctgccaaatctaggacaagacagaccatcaaagcagacttttgtgggctcctctttggggtgaccactgctttcaaagccatctgccaaggctctccagggcaggacctgactggtggggaatgagtgttcagaagccttgggagaggccaaagagccattctagcatgatctgagaaaaccttcctgcagaggccagaaaccttgagcttaggtgcctggggaccagcttcgacattctctccagtttctgattctaatttttgccacgtgtcacaacttttccagtctctgagaaggtcccagcctttctcaaatattctgattttgaaaatatgtatccaaagtgggaggcccctgtgacattttgccaacttaaacgagaaaaagaccccccgcacccggcacactcccccttcctccagccccgcttcagccacatgctccagctgctgcccagtaaagccctgtgcctttttttcccctgaatactgcccaaagcatccccttcccatctgcctctcaggagttggggactttgctaggagattttttaagtgttccttactgggacaacgtggagccacgtttgcaggagctccatttgtatccctgctggtgttgacttctgtgtaggggccagttcatgtccctgactctcacctcccattagataaatgaagcccacccccctttctagagtgatgagagtcaagaagaggggatgtatgaacggccaaattcccatgtgagaggaagatgacctgatccacctagccttttcttctggatctgtcctccctcacccctttcacctgagctgtccacagtaggaaacataaagaaacaatgtcccctacatatccccatgactacataatccatcatcgtaggaaataggaaagcaaatttgattttggttttgtaaaacgtacatgcttcaataattcttttttgtgtcttaaatactcataggggaaaaaaacagctcacccaaggtgttaggtttcacatatatattcatcaactattttagaagatttaattctatcaaatcttgtattacctcagatcattttaaatagcaagccaataacgagctttgaaggctattttaccattcctgttcacaaaaggttctcatggtgcctgacaggttacccttgagggcttgtgtctactttttaaaagtcaatggttttttttcttgtgttctagtttccataataggagagaaaatatagaaatatatgcaaaaattatagttttctttagatcagaaactgatatttttgggtcagccatatgtattttgtttaaaggatttaaaataaagtgccgtcatgtagccctgtggaagggagcacataaccagctgtttggcatgacaggtgacttagtatatttgtaattggttttaaaaccaatacaccatactttctttctgcaaacagccatctttatacttagggaagaaaaattgttgggttctagacttttttaatataaattttgttgatatggaattaggtaagtttaagtgtctatgtgcatatgttttttatataagttttttctattcagtttcactgatccaactggcagtgggtaaatatggcataagttaataacacttttccccaaaatggtgctttggatttgaaaagggtctgatggggagaaggagaacgtatcatcctagcttcctctcttaataaacctagaaaaacgggtagtaaactgtggatagtcaggaaaacacccagcaagggacacagctgtcaggaaatgaatcttccccccaacccccaccatgcagatggatagacagaatctttcctgactagtcattaggatcaggggcctctgttggatttgtgtttcttgaagaatagctggcagagtggtataaaagacacgaatatctcctggtctataaggatactctgatttggggtttgcatttttcatggtttttatttcctgttccccctggagttttccattagtgagtttttgtgcaaggatcttatttgtgatgccttccctcccctagaaagattttgtgcaatatattaaatggggacagaattctaaatggataaaacaatggctggttctagccctgagtgacagtcttaaggctagatccttcccatagtatcatctgtcctctggaatgactctcctgtccctaaaggggttaagagagagatcacctagaaatccctctggacacttgtgggttctttagggtttgagtttcttcttccccttgagcttcagagaggagagttggcatggttaaatctgaatggttacctcactgctgaaaacccagaggggcgtggcacactcgcttgtgtggaaaagcctctaaatgcatcccttcctttctttcctgcttcctttgccttacaattgaagcagcccgtggtaccatcacagtatgcagagacttcctcacctttcatatctagggaccacccccgatgcattggtgagggtgggcacttataaatgcctgctattgttaagccattccagcctcttcctctgaatagaccagacgccctttcacttagttcagtgccagtccttttgccttcccaaccctgctgttaggcctgctgttccctttgctcttgattaggagagatggaaggagatgagctcccataactgaattggcctttggttcatgttttctccccatatgtatatatgccatatgtgaatatgccatatatatgtgccaacaaatctatctacgttgttcttttcaaattagcacgcagataggaattttgagtttcttcttcttttagtaactagtataacaagcactggtatttttgtacaaaaaagaaaaacaaaagattgactattgtggtctgcatgacataaacaaacaaatggtgatatcaaagcaacgtataccccagtccagtgtgtgttgccataatttgcaattcagcttaacagtgcacccaatctatatttgcattttgatattatttaagctctatgtacaaggttttgcatgtatttatatggttcttagggaaaaaaaatgctataaactgcaaatctgaaattcaaatgtgttgttccactgagaccagaagaagaagaggagttttaaaagggataatttgttggagccaataaagctttttgctgatgaacagaaaccaatactgctgtgcactgagaataaaaactcatgcccacttgtaa

SEQ ID NO: 6537 - DNA, 1308 bp, Homo sapiens
agttttaagttcctgcatgctgctgacacaaatgaagattggtttgtctgcctggctgcacagttttcatggtcactcgtcacccaacctgtattatgtgcagattggtgtatgctggctctttgaggtctttaaacagataactaaacctcaatgcataatttttccattccacattcacaaaatgtttggcctcagcacagaaatccacatatctcaatcatctttttaagtttggctatgaatttgcatctagttcccatgtccttgccctccatctaaaagaactaatgaaacttcttgttttctgtttcattttaaaagtagattgtttgggaatgctaacgttgctttgggttttctactttttttaatgcagctttcaaaacgtcctagttgccgtcactcaccccagcccaccccactgcttgaaagttgagccatgtgatgtttctagtgccccatgatctcttctgatgtgtgtttggttttgatgctgagcagtcatgttttatagtctgggttttgtttctctcctaaatccaccatctccttgttctgccggccaattctcacctctctattttctcatcctccttttccttcccctggtatagatcaaagtggtcaaagcgttccatagttccctccacgaaagcattcagaaaccctacaaccaaaagtccatccacagcttcatgacccaccctgaattcgccatagaggaggagttgccacgaacaccactcctggatgaggaagaggaggaaaatcctgacaaggcttctaagtttgggactagggtgctcctgttggatggtgaggtcactccatatgccaatacaaacaacaatgcggtggattgcaaccaagtgcagctcccccagtcggacagctctctacagagcctagagacatcagtttgaattttctttctctgactctcatccctattttacctatttccattttcgtctatcccatctatgaggtgatgatgggacttttcattgtcacgtcagctgctgtgttaacagcagtgtgtgtgaagtgaacctctacctgaccatgaagaggcaagagcacagacttacaaggatttcaacttaagcttgacttggggtttgtagcgggacccagtcaaaccccattcaggtcatggtagaatctactccttggtagtcacttgtcatttttaaagaaatgatgacaatcctcttggcatcaccccaccccacattctccccgatgttcctctcctgaattctggattttgtcctacaagtctgtgccatttataagctaagt

SEQ ID NO: 6538 - DNA, 133 bp, Homo sapiens
caaaaaactagccgggcgtggtggcaggtgcctgtagtcccagctactcgggaggctgaggcaagagaatggcgtgaacctgggaggcggagcttgctgtgagccgagatcatgccactgcactccagcctgg

SEQ ID NO: 6539 - DNA, 487 bp, Homo sapiens
cagacatgcaagtgcatgacctcagcttttttaattcatttgactcttgttttagtacctactgtgaacaagacacaaactctgggctcaaaaatctcatgctctaggtaaggaacacagacatataaagatattatgagactagagcagctttccctgaggaggtcagaaaatccttcacaaaacatgaaaaattctgtcttgagggatatatgggaatttgctgggtagagaaagagaggaaatgcattctggtggcatatagtctcaaagcatggaagagtatgctgtttacatactttcgagtttacaaagtgctttcctatatgtcatatgctttaatcattcactagctttgtatgatatcagatcaaaaggagttaagtgattatgcagtcaccggaataataggtatcagactagagtttgaattaatccatttcttccttgacttagtgcttatctaaatccaaaaactaaaaataaa

SEQ ID NO: 6540 - DNA, 487 bp, Homo sapiens; identical to SEQ ID NO: 6539

SEQ ID NO: 6541 - DNA, 1213 bp, Homo sapiens
cccacaaacagcactagaaaaagacatctgattatacctaggtggtacaggttttaaggattggacctttgactttgtgctcatccttctgtgtggaccagctttgctctttgattccagttattttaattccagttgtaatgatgggttttggacactctcagtctgtattatgaccaacagcatgtatccgtaagatagctaggtcactaatagtctgtggcatggaaaaaaatttgttttgttttaatatggtgctaactaagcatatagagattgactctgtaactttaactccagtaacacactgttatcaccacgcaaattgaccagcctagttagtaacatcatatgcaatatcatacaaactacgtagaaccatgcctggggcactcatctgttagctcttacatgccctttgtgctcaaagagaacaatttgtggttgttgtatgccagtcaattcagtcatcatggagcttagttgtttactgtattgcatgctaagcagtagactctaggaatctaataaatttgattctcacattggtcctgtttgccacaaacattgccatgcctcaagaacctcacaagtttgtttttcttagaacagtgcatatgtagttctcatactctgcaagtgtttgcctcagcataattgtgtttatgtggaattgcactggcattgcaatgtgagaatgacagagttgacaggaccactaacatgtaccctgggaattgtttcccccatccccatagctggctgaagaaactttatttctgagttattatgtagggactgaaaggttttttttttgtttttgtttttgtttttttttacatatatacacagattgttttttacctacaatgagcaaaaataatctggacaaaaaaataatgctctccctgttttttctttcaaatgtatacatatatttgaaatcttaggcatagggaaaaacttttatgtcatcttcagagctacagccatattttttagctagaaccaactcttaaatctctcccgacagaaccttaaggaaggggacaaagtgatctccaatggaaatgtgaaaggcataaaaaggaaaagttagatatctggaggattcagatgacacaaagaaaataagttgaagataaaggaaatgagagggtaaacctagtagtacaatggcatctttcatcttcaactattttaaagtattttt

SEQ ID NO: 6542 - DNA, 1213 bp, Homo sapiens
cccacaaacagcactagaaaaagacatctgattatacctaggtggtacaggttttaaggattggacctttgactttgtgctcatccttctgtgtggaccagctttgctctttgattccagttattttaattccagttgtaatgatgggttttggacactctcagtcggtattatgaccaacagcatgtatccgtaagatagctaggtcactaatagtctgtggcatggaaaaaaatttgttttgttttaatatggtgctaactaagcatatagagattgactctgtaactttaactccagtaacacactgttatcaccacgcaaattgaccagcctagttagtaacatcatatgcaatatcatacaaactacgtagaaccatgcctggggcactcatctgttagctcttacatgccctttgtgctcaaagagaacaatttgtggttgttgtatgccagtcaattcagtcatcatggagcttagttgtttactgtattgcatgctaagcagtagactctaggaatctaataaatttgattctcacattggtcctgtttgccacaaacattgccatgcctcaagaacctcacaagtttgtttttcttagaacagtgcatatgtagttctcatactctgcaagtgtttgcctcagcataattgtgtttatgtggaattgcactggcattgcaatgtgagaatgacagagttgacaggaccactaacatgtaccctgggaattgtttcccccatccccatagctggctgaagaaactttatttctgagttattatgtagggactgaaaggttttttttttgtttttgtttttgtttttttttacatatatacacagattgttttttacctacaatgagcaaaaataatctggacaaaaaaataatgctctccctgttttttctttcaaatgtatacatatatttgaaatcttaggcatagggaaaaacttttatgtcatcttcagagctacagccatattttttagctagaaccaactcttaaatctctcccgacagaaccttaaggaaggggacaaagtgatctccaatggaaatgtgaaaggcataaaaaggaaaagttagatatctggaggattcagatgacacaaagaaaataagttgaagataaaggaaatgagagggtaaacctagtagtacaatggcatctttcatcttcaactattttaaagtattttt

SEQ ID NO: 6543 - DNA, 1621 bp, Homo sapiens
aggagatgataaatggtggttaaatgtggtaatagtttgtggaagttcttttctgattgcttcagttttcttagtgaaatagaaagcaagaccagcagccaagaaagaacgtgaggaaggaggtgttgggtgtttgagttaaaagggaaaggggtaaagtatttatctaggaaagtaaatggactagggaagtatctgtgtgtgcattatagtccactaaaggttcaaagtaatgaatttaaattgagaccaatgagcatggttgtatgtttttttccagccacatttagttgcacaggtgcgggtgtggagtaggcagaaaattggatttaaacaaggttatagttttgccaagcactatgaagggagagaggggagagtgatgataataatgataaatcatggaatgtaagctcgataaagaggagagtgaagggacatcaagagcatgagagacagtggagatttcatgaggttgaacaatgaacaatagttcaggatcaccctagtagaaagaataagctggaaagatacgatgtggagatacagaattgagattatggaggggttatagttttttgtaatggcaacaaaaagttagctgaagaagaaaagaatacttctgaaaagtataaacttccttgtagatactgcatgggtaaggaggtaattataatgagaattacaaaatagttagagctgaacaacaatgaaattacttcacattagatcttgtagagtagctaaagagagaaaactgtaaccttaaatacatgtttaaggttaaaaaattagaaaaagtgaaaataaatgagctaagctttcaactcaagaagttgaaaacagagtaagcccaaagtaagtagaaggaatgaaataaaataaagataaaagcagaaattaatgaacagaaaacagaatagcagtagaaatagtgttaataccagaagctgattctttgaaaagatagaaaattcaataagcctttttattttccaatgtccaccttgactgcagtgttctaggacttctcaaaggcatcttacatgctagtctggggcctgggatgcaaacaaaaacagatcagaggcagttattttggcaacaatagggagagagaagagtcttcaaggtcccttaaagcaacacatagaacaattgagctgcatacataaccagggcatctactttttccagctgctgcacactgagccccatcagggagggtaaaatgcagtaaacctttcaaaagctgatctagagaaaaactataggtgaaaacaaatagtatttggaagagaaatagggacaaaattaagataaacatatttaaaatataagattattttgagcaactttatgacaataagcttgaaaacttagtttaagtggacactcttctgggaaaatataaaatatcaaaatgacttaggaagaaatggcaaaacaaagaagtcccgtaacctttaaagaaatttaatcatacttaaccaccacctccccaacctcctgcccaaaacaccaagcctagagtaatttgggggatgaattctatcaaactgtcaaggaacaagtataataatacttgccttacataaactgtttcagaaaataaaaagaa

SEQ ID NO: 6544 - DNA, 1621 bp, Homo sapiens; identical to SEQ ID NO: 6543

SEQ ID NO: 6545 - DNA, 711 bp, Homo sapiens
gggtaaagaaattttaatgaggattcaaggtttgtagggaagacacagaggaccggcgctcagccccagcctcctcacgtgtacatggctccatggaggttctccagtcggttctgctgctgctgctgttttcgagccttatctcgtctgtgttcctcataagtgtagtcatcagtgggcagctcatggcggcacaagggacaggaatttgtcttgcttagccagggcagaatgcaactggaatgaaaaaggtgttgggaagcatctcaatggcagtctcctcctcagattccaaaagatacacggggcacttgagctcagccttgagagcctctgatgactgtcctggagaggttctcaaccacaatcttggcagccggtggaggcaggtggtggtcccaatctactaccaaccccaagtcttcaaagtccatcctattcaaaagtgaccttacgagctccagcaccatgttggttcgagtctcctgcttgagggtccaacggctcacagtcgtgttcatcgatataggacgccatggctgcccagccgtctgacatgtgatgttttgatacaggtatacaatgtgtaactatcaaatccgagtaactggggtattgatcatcttgagaatttatcatttctttgtgttaggaacagtccaattccactcttttagttattttaaaatatgcaataaattattaactgta

SEQ ID NO: 6546 - DNA, 711 bp, Homo sapiens
gggtaaagaaattttaatgaggattcaaggtttgtagggaagacacagaggaccggcgctcagccccagcctcctcacgtgtacatggctccatggaggttctccagtcggttctgctgctgctgctgttttcgagccttatctcgtctgtgttcctcataagtgtagtcatcagtgggcagctcatggcggcacaagggacaggaatttgtcttgcttagccagggcagaatgcaactggaatgaaaaaggtgttgggaagcatctcaatggcagtctcctcctcagattccaaaagatacacggggcacttgagctcaaccttgagagcctctgatgactgtcctggagaggttctcaaccacaatcttggcagccggtggaggcaggtggtggtcccaatctactaccaaccccaagtcttcaaagtccatcctattcaaaagtgaccttacgagctccagcaccatgttggttcgagtctcctgcttgagggtccaacggctcacagtcgtgttcatcgatataggacgccatggctgcccagccgtctgacatgtgatgttttgatacaggtatacaatgtgtaactatcaaatccgagtaactggggtattgatcaccttgagaatttatcatttctttgtgttaggaacagtccaattccactcttttagttattttaaaatatgcaataaattattaactgta

SEQ ID NO: 6547 - DNA, 711 bp, Homo sapiens; identical to SEQ ID NO: 6545

SEQ ID NO: 6548 - DNA, 301 bp, Homo sapiens
gggcgctgtggctcacgcctgtaatcccagcactttgggaggccgaggcaggcagattacgaggtcaggagatcgagaccatcctggctaacatggtgaaaccccgtctctactaaaaatacaaaaaattagccaggcgtggtggtgggcgcctgtagtcccagctactcaggaggctgaggcaggagaatggcgtgaacccgggaggtggagcgtgcagtgagcagagaccgcaccactgcactctagcctggacgacagagcaagactccgtctcatttaaaaaaaaaaaaaaaaacaa

SEQ ID NO: 6549 - DNA, 837 bp, Homo sapiens
ttttatttcagtgtttgctcttcactagtatatataaaagttacttgagaaattgaaaatatttctgtaagcagaaatagtatttttttcaaaaagtgtttcagatgcttcagttattccttgcatcatttattgttcttttacagattttaatcccctttgttcttgttatgtgtgcttttgaagcagttcagttgactactcagttatcgtcaaaaaggtaagatgaattagtttaagaaacatttgatttgcctatttttaggagatgagagtaaactttcgaagacatttcatatgattgctattaagacactgtaacatagattgtttattacaaaaatgagaaaattttcacccgtttagtcagtgttgcttgtcattagaggaaattagttgattagggcctctagcagacaaacttgctttctcagcaataaaatgttattagagtattattcaagctagtgaagaacctccctagaaaacagtaaaacataaatgttaaattattgtagttaattacttgttataactgtgcctacaaaaagcaaaagatactctaacttttattttggtttatttcttaaatatgttatataaatatgttaacattatttcattttccatgacttaaaattaacttttctacatgtcaaaaatatactcagtttctctgtcatgatttctgtacatttgacaaatggagtaggaagtattctttctgagttttgaggaatttctggagcagtccgtcttaagcaatcaagactgtggaagaaaagctgtcaactcaactatttgctttttttaaccaataaaattgcctcatcagca

SEQ ID NO: 6550 - DNA, 837 bp, Homo sapiens; identical to SEQ ID NO: 6549

SEQ ID NO: 6551 - DNA, 837 bp, Homo sapiens; identical to SEQ ID NO: 6549

SEQ ID NO: 6552 - DNA, 555 bp, Homo sapiens
ttttagtatatttttgcaggatatttacatgaatttaatattgaaagtatttatgccttgtcaatatcacataagagatatttacttagatgcaataaaaactggtgaatgacatgtactttcctgcatctttgttggtggataagatttttagaagggattttaattaaggtttaaataagaagagctggggacatgtggaatgagaaatagaaggctcatcaaaatgtatgtgtgtatgtattcttatatttgtgcgtgtctatagtaatgctatctggaaactagtgcaatgaaaaacaaaacacaacaggagagaactgaggcaaaggtggctcagaaaggtctcttttgacctttaaactcagaagtcactgacatttcttcctggatatcacactgactcatcaaatttaatgtcacacattgaagccagtgatgccttttcttcctattgcaaactagcttctcatcctgttttctttatttaatacatcacacaagctgaagtccagccacccttactgccatactgcttaccaaataatcactgat

SEQ ID NO: 6553 - DNA, 555 bp, Homo sapiens; identical to SEQ ID NO: 6552

SEQ ID NO: 6554 - DNA, 555 bp, Homo sapiens; identical to SEQ ID NO: 6552

SEQ ID NO: 6555 - DNA, 12423 bp, Homo sapiens
agggcaacgtgtttatgtattatggactgtctaatttctatcaaaaccatcgtcgttacgtgaaatctcgagatgatagtcaactaaatggagattctagtgctttgcttgtaagtaaaatgataaatatgaaaatatgatatctgtaaaataagaatatgtagtaactgttcagttagaattgttaggatgaaattaaagtgttgtcatttatagtttgtatagtgaggatttttttccccccgagatggagtctcactttgtcgcccaggctggagtgcagtggcacagtctcagctcactgcaacctccaccccccaggttcaagcaattttgcctcagtctcccgagtagctgggattacaggtgtataccaccacacccagctaatttttgtatttttagtagagatggggtttcaacatgttggccagtctgctttcaaactcctgacctcatgatctgcccacctcggcctcccacagtgctgggattacaggcatgagccaccatgcctggcctgtatcatgaggatttttagttaaaatattttttcctggaattcacacagatgcattgatgcccagactggtttggaaatctgtggactaggggatcttagtttctttactgttcttcagttttccatattagtggttagtgcctatgtatttttttttattttttattttattttatttttttgagacagagtctcactctattgcccagactggagtgcagtggcgcgacctcggctcactgcagcctccacctcctgggttcaagtgattctcctgcctcagtctcccgagtatctgggattacaggtgcgcatcaccaagcccggctaatttttgtatttttagtagagacggggtttcgccacgctggccagactggtctcaaattctggacttcaggtgatctgccctcctcggccttccaaagtgctgggattacaggcttgagccaccgtgtccggccctaagtattttatgttactgttgccaatgcagcaaacattcagaggcccagagcaatttaggatttcttagaattaatgaatctcttagaatacaatttaggactatgttgtgagcagcatgggcctccgaaatgtaaaatataactgctctaggttatcttgattggttttattgctgatcatcagttgctgatgtgtgggattttaagcaatacaagtctacttaaagattccttggtatacacagggttctggttaggcctatgatattttgaatctatgtggggtttattccataggatccaatttttagcactcaaatccagagaagatgttgtactgtgagatacaccaagtttctagacctttctgaatgtgttttttagggattatagatagtgtgtgttccaaaaccccagaaatggtggctgatttacaattattttatttatatatgtgctgtgttcactgagggtaaagaaaactgaaactgattcttttcttccaaactgtaagcaaagatttcaggccacaccaggaatagatcaactttttctgtaaagggtcagatattatgtgtaaggccctgtacaatctggcatcagccttattatcttatatactatttttaatacattaaacaaggcctggctgccctgggccttgtttgctgctccctaaccatgcattgtgacacaagtaatctgctcattttgccagttagcattttatttgcttagaatgtcatttttactgtttccctggaggtcttctcatctcaaggcctgctattttttctaagtgcccttccatgcaaaaatgtgcttctttacatatttacttcatttatttttttgttccaagtcactaccactttttgcttggatgaacaaattgtgtctcacatcatccaatcctgctcctttccaggccattctcatagcagctatagtgaagtttttaaaaagtataaatatcacttccctacctaaaatctttcagtggtcatattagcacttgtagtaaaatctcaggatgatctgagctatgcgtaatcctcttatctcatcacatatcatcctccctcttggcatgctccagctacattcaccattaccttcacagaaataagttcttgtttagtggcatgtggtgttctctttgcttaaaactctcttctgtcttctctttacatggctggctcctggtcttttttttatgtcttaacttaaatgatacctcctccagagtcaaacttttcattaccatagattctaaagcagctcctcctatcctttttccattaaatactcacatagcctcttcataacacttactgtaatttgtaattacatatttgcttatctgttatctttctttccagctatactgtaagctcatgaaggcagggagcatgactttctttaatcactgtttaccaagtgcctggctcgtgcttgcacatggaaggcatttaataaatatttgctgaatgaatgtagacatcttcatcatggctcttatttcgtatgatagttggttttgtaagggtctgcttcccctgttacattttgagttgcttaaaaatagggattgtattcttttcgtttttctgtttttagcacctagtattgtacatgctgcatattaggtactcatcaaatagctttgtttttttttgttgttgttgtttgttgtttttttttttgagacggagtctcaccactctgtcgcccaggctggagtgcagtggtgcgatctcggctcactgcaacttctgcctccccggttcaagcaattctgtgcctcagcctcctgagtagctgggattataggcccccaccaccatgcccggctaatttttgtatttttagtagagacgtggtttcaccatcttaggcaggctggtcttgaactcctgacctcgtgatccaccagcctcggcctcccaaagtgctaggattacaggcgtgaaccactgtgcccggcttgtttttgtttttttctgagacagggttgactttgtcacccaggctggagtgcagtggcacgatctctgctcactgcaacctttgcttcctggactcaagcaaaccacccacctcaccctcctaagtagttgggactaaaggtgcacgccaccatgcctggctaattttttgtatttttgtagagatgggatttcgccatgttgcccaggcttatctcgaacacctggactcaagggatcctcccaccttggcctcccaaagtgctgaaattaggggcatgagccaccgcacccggccctcatcaaatagcttttgtaagccagttaatgcaaagtacctagcattgcttagtttagtacctgacacatagatagtaaatactattttcctttcttttaaaacttccttaagaatttagtggctagcagatatatttgccctattgttaatagctttatcaatacagatggtgtagggaccaaaaagctgagaagtcaaatattgaagagactttatgagatacctaccacagacttccttagccttatcttttccattcacacaagtgcttttatccaatctagacatggagaatatagatacaagtcaaggttagctggtaatgaaatagtcctaagaggtctaattagggtcctcttaatttcaaattgagattatcttggtatgtttatgtgttttgagacatggcttaatgtggcgggagggtcccagctcagacagacccctaacctcagacttgatatgatctctagttgaatcccataactgccacacctctttaagatcctcagtagggagtaagtcaaaaccaaaatctggaccacaggcaaatgttctgccttgtcagcatttttgtttttcttgtacctggatgcacagtttaaagattgatatattctaggaatctgcactagactccttccttcctttcttagatataggatttaaccccaaatcacaaaatttcagattgtatagttggacatgtttattttgtgaggcccagttaaattaaaggaattgcccaaggaactagaacctctagcctctttagttccagtttaagattttcttgttatatcacaactggattggcaatagaccatttcttaatttttcttgggcagaaaaccctttgtggtaatgtttctgtgataagaaaatcaaaaagatgtttatttgatatatgcatatatgacaaaacatatgcaagtaaaggttatattaaaaaggtaaggcagtaatgttcagaatacattttgaatatttaaatgtggtgttatctatagcctacttacattacagacctgtgtattataagtgagaaaaatataggtgttgaattcttaatcagtaatttagggatagctcatagttctcccaaaggcctggataataatttctctcttcttttccttgtaaaaaccagaatcccagtaaggaatgtgaaccttatcgaagaaatgaagacaaaccaattgctccttgtggagctattgccaacagcatgtttaatggtatgatatagatacaaatatagacatatataattaggacaatttgcataatttcattacagatttgatagtttagtaaacatgaatgaaattgagaaactcaaacatttaagactaaatcgagtattgaatggggtattataatgatttgtgattttcttttgagcatacttacattttagagtggatttctgtctctgagaagaaagaagcagaaacattctgctaatcttatttcatataaaaataaaagtcaggctgaccttcccactgacttcatttttatcattgaaaaggagctatagttgatcatttagagcagcactatctgatagaaatataatgtgagctataaatacaagtcctgtaggtaattttacattttctgtctttttttttttttcctttttctttttttgagatggagcgtcattctgtcgcccaggctggagtgcagtggcgcgacgtcggctcactgcaacctctgctccctgggttcaagcatttctcttgcctcagcttcccctgtaactgggattacaggcgcccgcaaccacgcctggctattttttttgtatttttagtagagacggggtttcaccatattggtcaggctggtcttgtattcctgacctcgtgatccgcccacttcggcctcccaagttgctgggattacaggcgtgagccactgcgcctggcctggtaattttaaattttctaatagtcatatttaaaactatgaaaagaaacaagtgaaattaattttagcaatatgttttatgtaacagtatatccaagatactgttatttcggcatataatactatataaaagttgagatacttcatattctaattttttatactaagtctttgatatctgatgtgtattgtacacttatagaacatactcatttggaccaaccacatatgaaagactcagtagccctgtgtgcctagtggctgttgtatgagacaatgcaaacagaaatggataagcaagaagctattggggatgcattattggaaggaaggaaatgcagatttaccttgcaattatagttgggttaatattaaaacatttgatcttactgcatgtcagctagcctatgggtaactgaattagaactctgttaaaggaagagaagtccatctagaattataaagttaccatagttaatccacataggaataaagaacaaatgtgaatcatatgcctactctgtcacaaccacttttggaaacaaatatcaggtccttatttctcatagagttaagcagatgctatgagttttcaagagatagttagtaatgtctttctttgcttgtgtttagatacattagaattgtttctcattggcaatgattcttatcctatacctatcgctttgaaaaagaaaggtattgcttggtggacagataaaaatgtgaaattcagaaatccccctggaggagacaacctggaagaacgatttaaaggtaaaacattactaatatcccttaaaaaattaaactaggagttttaatgaagtattttaaattttctatcttcagaatcttaaagttatgctttgaaaaacacaatttttctttcctcagcttcataccaagttaggtaaatgttctaatgtactaaaattctaaaggaaatgtatacttttaattatgaattcagtttctgtgatgtcttataagcatttcagctataatattttaaaattgcagcaaagcttcttttgaataaacccctatttattatccaaatttattcgtttctccgccactttaatttcacaatgtaatattttgtctccttatcccctccccactccttttaaggtacaacaaagcctgtgaactggcttaaaccagtttacatgctggattctgacccagataataatggattcataaatgaggattttattgtttggatgcgtactgcagcattacctacttttcgcaagttgtatcgtcttatagaaaggaaaagtgatttacatccaacattaccagctggccgatactctttgaatgtcacatacagtatccttttttggctgggtatacagattcatagagcttgaaaggagtcgagtccaaccttatatctgttatgtggcatgttaccttgtgctttagttttggtctctgcatttttacaaaagtatgtgtggtatatgtgagaatgtatttttaaatttacgtcttctagaaatgttttgaattcgcatatacttggtactggggtttgaagcatattgtttggtaaaattacttaaaatataggtgcttgttttattaacaagctaggtatttttacaagggagattgtaattgggcttaatgtaaaggccaatgagagtacctaaaattgggtgttgagtggtactgggctgttttaatatatatattttagatattaaaaatcaacggatgtgttaatttgtatcaatgtaattgttcatgattttgatctattggtagtatcaaaacattttattattagctatattgttccatattaataagttcacattcagtgctgataaatacatttattccactctaactatgtgttaacactgtgctgagtattttccgctcattacttaattcaggcagcagcatatctccctattacagaccagaatacaggaatatcgagcacttaagtaacttagctgactttacacaggtaataataaagagttgaggttcataaccaggctgttgactccaaaggccataattttactctcagctaccaacatagcctgcgtcttagctagttcactcagttacaccaacccatatctgcatagatgcagtcttttttaggagggaaatactcagtaatttcttttattctaaccaaagtctttgcatcttttaatctggagtctatattttacatacactgtgagtgaagagatctctcaatattagaattgtaaatgtttgctgatctttgcatttttatttccataatccaaatgagtcataatccatatgggttttggttttaaaatggattagtaaatggttaaattaatagacccaatttcaaaataaggttttttttgaattctactctcttgatgttgcacctgaatacacaagtaaatatggcctgctatggcaggctaaaagtgaccaagtttttgaaactaaatccacattggagcagttttggacagacagacccacttcaagtgctggtagaaataacattatcctgaggggatagtcaaactagagagtagctctgttaaaattagcatccagaaaatctctagagagtaagggcaaatttagcaacctgtagcctaaggcacaatgaagggaagtctgtgaagcactgaggaatttttagttgatagatgatttccatacaggaattctgcagcagggtcccaggtttgaaagaactatctaaaggaatgcatgatatatggcagattgagaagacttgataagacaggaatttggacctgcaaaacatcaagggttaattatcaaaattgggcataaggtgggaactaaagactagaatgatggcagaagcctgtttctttaggtttgggagactagagagagacaagcatgggtaatttgatactgtatcccacagaatgttgggttagctagaggtcttaaaatcattcctgccttagtttagggttaatttaagaagttagcagaactgaacctgccattgggagttagggacccatagggacccatctgtggggatggagagttgaagaaactagagaaacagatggggcctaaccctagattcaaaagatgcttttgaaaaagttgtaaactttttgcatggagacttggttctgtcttctttgctgccttacctcttgcaaaattctacaactggtccatgtagataattcatctagtacactggtgccctgtttcctaaatctccttaacagcccacccttcactgccactgttagctatcagctgtgtcacagagtgagttttgccattgctccaaatcagcaagttaaaacttttttattaccatgctttttgatcttttgctcagagccttttcatagtctcataactacactcttgatacatgtgttctttgagctcatggagacttctagttcctgatttttccattttctcctggtctgtcagtctccttgtgtgggcttcattgttcacttgaagtatttttttcacattgcattcctttgaggccttttgccccttccatgtaatgagagcaaaagcacctgagaaactacataacctttacatttatttgttttggtaaaatattttggcttttactactaacatttagtttgctaaatcagtctttcaagataatactttgtgtgtgtgtgtgtgtgatttagaacgtaggagtgaggtacctgtatatcctagaattacacaaatgaattaccaacaattaaatggcaacttttaaaattgtattttaaacatcaagtaaccagagatggaaaaatcttcctataccctcttcagattaccctgtacattattttgatggacgaaaacggatgatcttgagcactatttcatggatgggaggaaaaaatccatttttggggattgcttacatcgctgttggatccatctccttccttctgggagttgtactgctagtaattaatcataaatatagaaacagtagtaatacagctgacattaccatttaattttatattatgaaagcaaatcatctgcatgtgcatcaaggccagtcctattcaacctagctttcgaatgctgatatctggttagtatgtcattttgaagttggcacataacttttctaaaaaaaagcagtctttgttgtttgcttcttccctacggatgacttctaaaaatatatgacgggtataaaaaaattagctatattgatcatatcaacactgtaactgctgaaatggcattctaatgtttgctttttattcggacaggccacatgatgcatagagcctctttcatgtgacttgtgtctactgcttaaatctttatgctgtgttgatgatattatattgacatatgaagctgtatatgtgtatgtattttgtggagaaagggattacaagatgtatgagtataatgacttgctaacctttcaggattcagagaaagatgaagaaagaccatatctaaataatacacttcatcattttcatgtgtataaatgcttaaagtaccatctttgttgaggtggttcatgtatccagtttatccagtacagttatttgtcaagcttagctttgatttcaaaggacacgcttaccttgtctggcataagaattaatgctcatgtctgcagtggttgggtaggtcctgcttaggagaattaaaaaattcctctttccgtttggttgaatgttgcagtcaggaaccccaactcacttggaatgtttttatatgtaatcatttcccttgaagcttatactttataagggaagaaagaattcaggtgatatgggaaaactgcttggcagaccttcatcttctgcctcaactgtaaaccacatgtaagtgcttaatggagactgttttcattcttgtgatatttaacattcagaaaattacttcagctttggaaatactcaggctgtttttattctgcaggtaagtgttttgacttaagtactaatattccagaaatttttgaaagcagtaaccttaatttcctatgtatttcattccacttttgcatataggtcaaatagcaatgtgtatgcacattctctttagttaaggcaccaattgttttggttggttttcctaagacatactttaaaaagatgttctataaatttcctaattaaattatggggattttggagtatgtacatgataaattataatatgtatatggttgaagttattttattttttactaatgaattattttaatattccttattgaataaatgctgtaacttgtttgctatggaacttattcttaaagttctagttaaaaataatttttccacatgcatgaaaatatgtattaatcagaggtggcttaattacattgaaattgcttttttgttgttgtttttttactgaaataactcatgtttgtgtagaagaatgcctgtttactcagagtttatattttccttcagttatattttaaatcaaaaggtctgggtaatgtatacttttgattaatatatactttttttaaaaaacaaaaaacaatgtaatggttaatagtagaaatgtgccacacttttcaagttttatataacatatgaaattcagttaaaagaatgtgtgtttcataatgacttttaactggtaaaaatattacttgcacgaagtacttgatgtatggttatcctgaaatttcggagtatttggtgtgttctttgtctaaaaatagtctgttttgtcagtccttcagaatattatttattctgaagattgtccctcttgcacttggcagtttattttcggggatacattgttgggggagaggggtttctgccactctttccagattgagtctgtgctgtttaaggaggactaccatcctgcaactctttttctaactggggcacagaggatgtcgctaaagaaaagttgaagagccctttcagcactttctcatctgtggagaagatggaatcttaaaatacatttggagttttatctgttttacaagtccattgatggcctaagttcctcctgttttctgctgtttgatctctaaggaactcctgttgctaaatatgaagagtatggaacattcgtatagtctctgtgaagcatggggggagggaagacatttctttttcttataggctttatgctcaaatgtcatagtctcctttcaaagaattgtgttgcattttaaatgcacccagcttaagtagaagacattgaaggatgcattaattttcaggaactattttgaattatgaaaagattcccaattgaaaaaattattcaacaagtaaaagctaagaaatttcattgaaatcataaggcagtttaagcataaattgataaaaatagctgtgtactactaattaatagaaaatcattcaaccaagagaagagtcaagtgaatatcgtttgtttatttgctagtgagtttctttgtaacgttgattttattaaatgataatatttggttagtatgtcctatgttaataaaaatgaacaaaattaattttgctatgttcaggtgtcttgataaaataacaatgctccagtgttgttgcttacatttagcactaaattttaacacagcgtcagtgagtccaggttttaacttcttcatgcctggatgggataaaatgtaattcattgttaaattaattcatatttgtatttattaatcactgtgacaacattaaccatttgttcttaccaggaagtggtcagattatcatctgagttacagttagactggctaagtttggtattagatcaaggggaatgtccagtaaacagagaggtaagcatgatggaaataatgaagtggggtacacaggaaaaacctgactagtgaggaggagcagctgagagatagggtcagtgaatgcggttcagcctgctacctctcctgtcttcatagaaccattgccttagaattattgtatgacacattttttgttggttaagctgtaaggttttgttctttgtgaacatgggtattttgaggggagggtggagggagtagggaagtggtccttttacaagaattttgatgcataagtgtctattgtagggtttggatgatctagtaaagtgttttagaacccctttttatcccatgcaccattcagtaaacataaaaatcacaattctgctaatgtcatttggaacttcaaaataaatatcttgtctaaaaacaaatcagac

SEQ ID NO: 6556 - DNA, 12421 bp, Homo sapiens
agggcaacgtgtttatgtattatggactgtctaatttctatcaaaaccatcgtcgttacgtgaaatctcgagatgatagtcaactaaatggagattctagtgctttgcttgtaagtaaaatgataaatatgaaaatatgatatctgtaaaataagaatatgtagtaactgttcagttagaattgttaggatgaaattaaagtgttgtcatttatagtttgtatagtgaggatttttttccccccgagatggagtctcactttgtcgcccaggctggagtgcagtggcacagtctcagctcactgcaacctccaccccccaggttcaagcaattttgcctcagtctcccgagtagctgggattacaggtgtataccaccacacccagctaatttttgtatttttagtagagatggggtttcaacatgttggccagtctgctttcaaactcctgacctcatgatctgcccacctcggcctcccacagtgctgggattacaggcatgagccaccatgcctggcctgtatcatgaggatttttagttaaaatattttttcctggaattcacacagatgcattgatgcccagactggtttggaaatctgtggactaggggatcttagtttctttactgttcttcagttttccatattagtgggtagtgcctatgtatttttttttattttttattttattttattttttgagacagagtctcactctattgcccagactggagtgcagtggcgcgacctcggctcactgcagcctccacctcctgggttcaagtgattctcctgcctcagtctcccgagtatctgggattacaggtgcgcatcaccaagcccggctaatttttgtatttttagtagagacggggtttcgccacgctggccagactggtctcaaattctggacttcaggtgatctgccctcctcggccttccaaagtgcggggattacaggcttgagccaccgtgtccggccctaagtattttatgttactgttgccaatgcagcaaacattcagaggcccagagcaatttaggatttcttagaattaatgaatctcttagaatacaatttaggactatgttgtgagcagcatgggcctccgaaatgtaaaatataactgctctaggttatcttgattggttttattgctgatcatcagttgctgatgtgtgggattttaagcaatacaagtctacttaaagattccttggtatacacagggttctggttaggcctatgatattttgaatctatgtggggtttattccataggatccaatttttagcactcaaatccagagaagatgttgtactgtgagatacaccaagtttctagacctttctgaatgtgttttttagggattatagatagtgtgtgttccaaaaccccagaaatggtggctgatttacaattattttatttatatatgtgctgtgttcactgagggtaaagaaaactgaaactgattcttttcttccaaactgtaagcaaagatttcaggccacaccaggaatagatcaactttttctgtaaagggtcagatattatgtgtaaggccctgtacaatctggcatcagccttattatcttatatactacttttaatacattaaacaaggcctggctgccctgggccttgtttgctgctccctaaccatgcattgtgacacaagtaatctgctcattttgccagttagcattttatttgcttagaatgtcatttttactgtttccctggaggtcttctcatctcaaggcctgctattttttctaagtgtccttccatgcaaaaatgtgcttctttacatatttacttcatttatttttttgttccaagtcactaccactttttgcttggatgaacaaattgtgtctcacatcatccaatcctgctcctttccaggccattctcatagcagctatagtgaggtttttaaaaagtataaatatcacttccctacctaaaatctttcagtggtcatattagcacttgtagtaaaatctcaggatgatctgagctatgcgtaatcctcttatctcatcacatatcatcctccctcttggcatgctccagctacattcaccattaccttcacagaaataagttcttgtttagtggcatgtggtgttctctttgcttaaaactctcttctgtcttctctttacatggctggctcctggtcttttttttatgtcttaacttaaatgatacctcctccagagtcaaacttttcattaccatagattctaaagcagctcctcctatcctttttccattaaatactcacatagcctcttcataacacttactgtaatttgtaattacatatttgcttatctgtcatctttctttccagctatactgtaagctcatgaaggcagggagcatgactttctttaatcactgtttaccaagtgcctggctcgtgcttgcacatggaaggcatttaataaatatttgctgaatgaatgtagacatcttcatcatggctcttatttcgtatgatagttggttttgtaagggtctgcttcccctgttacattttgagttgcttaaaaatagggattgtattcttttcgtttttctgtttttagcacctagtattgtacatgctgcatattaggtactcatcaaatagctttgtttttttttgttgttgttgtttgttgttttttttttgagacggagtctcaccactctgtcgcccaggctggagtgcagtggtgcgatcttggctcactgcaacttctgcctccccggttcaagcaattctgtgcctcagcctcctgagtagctgggattataggcccccaccaccatgcccggctaatttttgtatttttagtagagacgtggtttcaccatcttaggcaggctggtcttgaactcctgacctcgtgatccaccagcctcggcctcccaaagtgctaggattacaggcgtgaaccactgtgcccggcttgtttttgtttttttctgagacagggttgactttgtcacccaggctggagtgcagtggcacgatctctgctcactgcaacctttgcttcctggactcaagcaaaccacccacctcaccctcctaagtagttgggactaaaggtgcacgccaccatgcctggctaattttttgtatttttgtagagatgggatttcgccatgttgcccaggcttatctcgaacacctggactcaagggatcctcccaccttggcctcccaaagtgctgaaattaggggcatgagccaccgcacccggccctcatcaaatagcttttgtaagccagttaatgcaaagtacctagcattgcttagtttagtacctgacacatagatagtaaatactattttcctttcttttaaaacttccttaagaatttagtggctagcagatatatttgccctattgttaatagctttatcaatacagatggtgtagggaccaaaaagctgagaagtcaaatattgaagagactttatgagatacctaccacagacttccttagccttatcttttccattcacacaagtgcttttatccaatctagacatggagaatatagatacaagtcaaggttagctggtaatgaaatagtcctaagaggtctaattagggtcctcttaatttcaaattgagattatcttggtatgtttatgtgttttgagacatggcttaatgtggcgggagggtcccagctcagacagacccctaacctcagacttgatatgatctctagttgaatcccataactgccacacctctttaagatcctcagtagggactaagtcaaaaccaaaatctggaccacaggcaaatgttctgccttgtcagcatttttgtttttcttgtacctggatgcacagtttaaagattgatatattctaggaatctgcactagactccttccttcctttcttagatataggatttaaccccaaatcacaaaatttcagattgtatagttggacatgtttattttgtgaggcccagttaaattaaaggaattgcccaaggaactagaacctctagcctctttagttccagtttaagattttcttgttatatcacaactggattggcaatagaccatttcttaatttttcttgggcagaaaaccctttgtggtaatgtttctgtgataagaaaatcaaaaagatgtttatttgatatatgcatatatgacaaaacatatgcaagtaaaggttatattaaaaaggtaaggcagtaatgttcagaatacattttgaatatttaaatgtggtgttatctatagcctacttacattacagacctgtgtattataagtgagaaaaatataggtgttgaattcttaatcagtaatttagggatagctcatagttctcccaaaggcctggataataatttctctcttcttttccttgtaaaaaccagaatcccagtaaggaatgtgaaccttatcgaagaaatgaagacaaaccaattgctccttgtggagctattgccaacagcatgtttaatggtatgatatagatacaaatatagacatatataattaggacaatttgcataatttcattacagatttgatagtttagtaaacatgaatgaaattgagaaactcaaacatttaagactaaatcgagtattgaatggggtattataatgatttgtgattttcttttgagcatacttacattttagagtggatttctgtctctgagaagaaagaagcagaaacattctgctaatcttatttcatataaaaataaaagtcaggctgaccttcccactgacttcatttttatcattgaaaaggagctatagttgatcatttagagcagcactatctgatagaaatataatgtgagctataaatacaagtcctgtaggtaattttacattttctttcttttcttttttttcctttttctttttttgagatggagcgtcattctgttgcccaggctggagtgcagtggcgcgacgtcggctcactgcaacctctgctccctgggttcaagcatttctcttgcctcagcttcccctgtaactgggattacaggcgcccgcaaccacgcctggctattttttttgtatttttagtagagacggggtttcaccatattggtcaggctggtcttgtattcctgacctcgtgatccgcccacttcggcctcccaagttgctgggattacaggcgtgagccactgcgcctggcctggtaattttaaattttctaatagtcatatttaaaactatgaaaagaaacaagtgaaattaattttagcaatatgttttatgtaacagtatatccaagatactgttatttcggcatataatactatataaaagttgagatacttcatattctaattttttatactaagtctttgatatctgatgtgtattgtacacttatagaacatactcatttggaccaaccacatatgaaagactcagtagccctgtgtgcctagtggctgttgtatgagacaatgcaaacagaaatggataagcaagaagctattggggatgcattattggaaggaaggaaatgcagatttaccttgcaattatagttgggttaatattaaaacatttgatcttactgcatgtcagctagcctatgggtaactgaattagaactctgttaaaggaagagaagtccatctagaattataaagttaccatagttaatccacataggaataaagaacaaatgtgaatcatatgcctactctgtcacaaccacttttggaaacaaatatcaggtccttatttctcatagagttaagcagatgctatgagttttcaagagatagttagtaatgtctttctttgcttgtgtttagatacattagaattgtttctcattggcaatgattcttatcctatacctatcgctttgaaaaagaaaggtattgcttggtggacagataaaaatgtgaaattcagaaatccccctggaggagacaacctggaagaacgatttaaaggtaaaacattactaatatcccttaaaaaattaaactaggagttttaatgaagtattttaaattttctatcttcagaatcttaaagttatgctttgaaaaacacaatttttctttcctcagcttcataccaagttaggtaaatgttctaatgtactaaaattctaaaggaaatgtatacttttaattatgaattcagtttctgtgatgtcttataagcatttcagctataatattttaaaattgcagcaaagcttcttttgaataaacccctatttattatccaaatttattcgtttctccgccactttaatttcacaatgtaatattttgtctccttatcccttccccactccttttaaggtacaacaaagcctgtgaactggcttaaaccagtttacatgctggattctgacccagataataatggattcataaatgaggattttattgtttggatgcgtactgcagcattacctacttttcgcaagttgtatcgtcttatagaaaggaaaagtgatttacatccaacattaccagctggccgatactctttgaatgtcacatacagtatccttttttggctgggtatacagattcatagagcttgaaaggagtcgagtccaaccttatatctgttatgtggcatgttaccttgtgctttagttttggtctctgcatttttacaaaagtatgtgtggtatatgtgagaatgtatttttaaatttacgtcttctagaaatgttttgaattcgcatatacttggtactggggtttgaagcatattgtttggtaaaattacttaaaatataggtgcttgttttattaacaagctaggtatttttacaagggagattgtaattgggcttaatgtaaaggccaatgagagtacctaaaattgggtgttgagtggtactgggctgttttaatatatatattttagatattaaaaatcaacggatgtgttaatttgtatcaatgtaattgttcatgattttgatctattggtagtatcaaaacattttattattagctatattgttccatattaataagttcacattcagtgctgataaatacatttattccactctaactatgtgttaacactgtgctgagtattttctgctcattacttaattcaggcagcagcatatctccctattatagaccagaatacaggaatatcgagcacttaagtaacttagctgactttacacaggtaataataaagagttgaggttcataaccaggctgttgactccaaaggccataattttactctcagctaccaacatagcctgcgtcttagctagttcactcagttacaccaacccatatctgcatagatgcagtcttttttaggagggaaatactcagtaatttcttttattctaaccaaagtctttgcatcttttaatctggagtctatattttacatacactgtgagtgaagagatctctcaatattagaattgtaaatgtttgctgatctttgcatttttatttccataatccaaatgagtcataatccatatgggttttggttttaaaatggattagtaaatggttaaattaatagacccaatttcaaaataaggttttttttgaattctactctcttgatgttgcacctgaatacacaagtaaatatggcctgctatggcaggctaaaagtgaccaagtttttgaaactaaatccacattggagcagttttggacagacagacccacttcaagtgctggtagaaataacattatcctgaggggatagtcaaactagagagtagctctgttaaaattagcatccagaaaatctctagagagtaagggcaaatttagcaacctgtagcctaaggcacaatgaagggaagtctgtgaagcactgaggaatttttagttgatagatgatttccatacaggaattctgcagcagggtcccaggtttgaaagaactatctaaaggaatgcatgatatatggcagattgagaagacttgataagacaggaatttggacctgcaaaacatcaagggttaattatcaaaattgggcataaggtgggaactaaagactagaatgatggcagaagcctgtttctttaggtttgggagactagagagagacaagcatgggtaatttgatactgtatcccacagaatgttgggttagctagaggtcttaaaatcattcctgccttagtttagggttaatttaagaagttagcagaactgaacctgccattgggagttagggacccatagggacccatctgtggggatggagagttgaagaaactagagaaacagatggggcctaaccctagattcaaaagatgcttttgaaaaagttgtaaactttttgcatggagacttggttctgtcttctttgctgccttacctcttgcaaaattctacaactggtccatgtagataattcatctagtacactggtgccctgtttcctaaatctccttaacagcccacccttcactgccactgttagctatcagctgtgtcacagagtgagttttgccattgctccaaatcagcaagttaaaacttttttattaccatgctttttgatcttttgctcagagccttttcatagtctcataactacactcttgatacatgtgttctttgagctcatggagacttctagttcctgatttttccattttctcctggtctgtcagtctccttgtgtgggcttcattgttcacttgaagtatttttttcacattgcattcctttgaggccttttgccccttccatgtaatgagagcaaaagcacccgagaaactacataacctttacatttatttgttttggtaaaatattttggcttttactactaacatttagtttgctaaatcagtctttcaagataatactttgtgtgtgtgtgtgtgatttagaacgtaggagtgaggtacctgtatatcctagaattacacaaatgaattaccaacaattaaatggcaacttttaaaattgtattttaaacatcaagtaaccagagatggaaaaatcttcctataccctcttcagattaccctgtacattattttgatggacgaaaacggatgatcttgagcactatttcatggatgggaggaaaaaatccatttttggggattgcttacatcgctgttggatccatctccttccttctgggagttgtactgctagtaattaatcataaatatagaaacagtagtaatacagctgacattaccatttaattttatattatgaaagcaaatcatctgcatgtgcatcaaggccagtcctattcaacctagctttcgaatgctgatatctggttagtatgtcattttgaagttggcacataacttttctaaaaaaaagcagtctttgttgtttgcttcttccctacggatgacttctaaaaatatatgacgggtataaaaaaattagctatattgatcatatcaacactgtaactgctgaaatggcattctaatgtttgctttttattcggacaggccacatgatgcatagagcctctttcatgtgacttgtgtctactgcttaaatctttatgctgtgttgatgatattatattgacatatgaagctgtatatgtgtatgtattttgtggagaaagggattacaagatgtatgagtataatgacttgctaacctttcaggattcagagaaagatgaagaaagaccatatctaaataatacacttcatcattttcatgtgtataaatgcttaaagtaccatctttgttgaggtggttcatgtatccagtttatccagtacagttatttgtcaagcttagctttgatttcaaaggacacgcttaccttgtctggcataagaattaatgctcatgtctgcagtggttgggtaggtcctgcttaggagaattaaaaaattcctctttccgtttggttgaatgttgcagtcaggaaccccaactcacttggaatgtttttatatgtaatcatttcccttgaagcttatactttataagggaaagaaagaattcaggtgatatgggaaaactgcttggcagaaccttcatcttctgctccaactgtaaaccacatgtaaatgcttaatggagactgttttcattcttgtgatatttaacattcagaaaattacttcagctttggaaatactcaggctgtttttattctgcaggtaagtgttttgacttaagtactaatattccagaaatttttgaaagcagtaaccttaatttcctatgtatttcattccacttttgcatataggtcaaatagcaatgtgtatgcacattctctttagttaaggcaccaattgttttggttggttttcctaagacatactttaaaaagatgttctataaatttcctagttaaattatggggattttggagtatgtacatgataaattataatacgtatatggttgaagttattttattttttactaatgaattattttaatattccttattgaataaatgctgtaacttgtttgctatggaacttattcttaaagttctagttaaaaataatttttccacatgcatgaaaatatgtattaatcagaggtggcttaattacattgaaattgcttttttgttgttgtttttttactgaaataactcatgtttgtgtagaagaatgcctgtttactcagagtttatattttccttcagttatattttaaatcaaaaggtctgggtaatgtatacttttgattaatatatactttttttaaaaaacaaaaaacaatgtaatggttaatagtagaaatgtgccacacttttcaagttttatataacatatgaaattcagttaaaagaatgtgtgtttcataatgacttttaactggtaaaaatattacttgcacgaagtacttgatgtatggttatcctgaaatttcggagtatttggtgtgttctttgtctaaaaatagtctgttttgtcagtccttcagaatattatttattctgaagattgtccctcttgcacttggcagtttattttcggggatacattgttgggggagaggggtttctgccactctttccagattgagtctgtgctgtttaaggaggactaccatcctgcaactctttttctaattggggcacagaggatgtcgctaaagaaaagttgaagagccctttcagcactttctcatctgtggagaagatggaatcttaaaatacatttggagttttatctgttttacaagtccattgatggcctaagttcctcctgttttctgctgtttgatctctaaggaactcctgttgctaaatatgaagagtatggaacattcatatagtctctgtgaagcatggggggagggaagacatttctttttcttataggctttatgctcaaatgtcatagtctcctttcaaagaattgtgttgcattttaaatgcacccagcttaagtagaagacattgaaggatgcattaattttcaggaactattttgaattatgaaaagattcccaattgaaaaaattattcaacaagtaaaagctaagaaatttcattgaaatcataaggcagtttaagcataaattgataaaaatagctgtgtactactaattaatagaaaatcattcaaccaagagaagagtcaagtgaatatcgtttgtttatttgctagtgagtttctttgtaacgttgattttattaaatgataatatttggttagtatgtcctatgttaataaaaatgaacaaaattaattttgctatgttcaggtgtcttgataaaataacaatgctccagtgttgttgcttacatttagcactaaattttaacacagggtcagtgagtccaggttttaacttcttcatgcctggatgggataaaatgtaattcattgttaaattaattcatatttgtatttattaatcactgtgacaacattaaccatttgttcttaccaggaagtggtcagattatcatctgagttacagttagactggctaagtttggtattagatcaaggggaatgtccagtaaacagagaggtaagcatgatggaaataatgaagtggggtacacaagaaaaacctgactagtgaggaggagcagctgagagatagggtcagtgaatgcggttcagcctgctacctctcctgtcttcatagaaccattgccttagaattattgtatgacacgttttttgttggttaagctgtaaggttttgttctttgtgaacatgggtattttgaggggagggtggagggagtagggaagtggtccttttacaagaattttgatgcataagtgtctattgtagggtttggatgatctagtaaagtgttttagaacccctttttatcccatgcaccattcagtaaacataaaaatcacaattctgctaatgtcatttggaacttcaaaataaatatcttgtctaaaaacaaatcagac

SEQ ID NO: 6557 - DNA, 12423 bp, Homo sapiens; identical to SEQ ID NO: 6555

SEQ ID NO: 6558 - DNA, 12421 bp, Homo sapiens; identical to SEQ ID NO: 6556

SEQ ID NO: 6559 - DNA, 3661 bp, Homo sapiens
ggggggtgcgcgcgcccgggtccggcctctcactcgctcccctctcgtccgcagccgcagggccgtaggcagccatggcgcccagccggaatggcatggtcttgaagccccacttccacaaggactggcagcggcgcgtggccacgtggttcaaccagccggcccgtaagatccgcaggtgagccctgcgctcggggctgccctggggctcgtgcccgcggctgcgccttggcttgcgggtggccgatgccagggcggggggcgctgtctgcaaccgtcgcggagcgctggcctggcggccttaggcaagggtgaccgccgctgcgcttctctccaccagacgtaaggcccggcaagccaaggcgcgccgcatcgccccgcgccccgcgtcgggtcccatccggcccatcgtgcgctgccccacggttcggtaccacacgaaggtgcgcgccggccgcggcttcagcctggaggagctcagggtgagtactggcagcgctgcggtgtcaggaaggccccgaagtcccctctgttggcctcagtcgcgtgatgacattctccggaatcgctgtacggccttgatgaaagcacatttgaacccttttccatctgattgctgaggcttttcatccaggcctcggggctggagaaagcccgggcctgtctccatctctctctggttctggggcaggtggccggcattcacaagaaggtggcccggaccatcggcatttctgtggatccgaggaggcggaacaagtccacggagtccctgcaggccaacgtgcagcggctgaaggagtaccgctccaaactcatcctcttccccaggaagccctcggcccccaagaagggagacagttctgtgagtacacggctctctggccgtcctggtgcgcggggacagtgaggcttggctcctttatcagtgacaccggtccctgggtcttgctggggtgagaagaaccaaaacattgtgggtgatgagctaagcgggactgctaaggttcacctgtgcgtttccgcagagataaccttaatggacatggcaaggctgtgtgacttggaggcagctttttccattgacgttgctctccctaaaatgcttcgtattccaaaatatttctagaaagaccttgtaggataaggttgataaagagtccattgtatacgtttccgggtagttaaattagggaacagttttctctgccccgcccgtggttcacaggtagataactgtctcgtgcgtgttgcgtcaactcagtaagatatagtcacctaactaataaggactgttcttaacattggggccacaaagtgtgttgtagaaaaggctcagacactggtcctgaacacggaatccccaggggaaagtttggggccaggtgagggtggagtccttgcagcagtgcggccaaccccacttaactcttctcattcaccaacaggctgaagaactgaaactggccacccagctgaccggaccggtcatgcccgtccggaacgtaagtgaacacttactcaaatccaggcttcagacgagatcagtgggtgaacacgtgggtatctgagatgcgggtgatgggggtcaggcttaagaacgttaatagtggcagttgtgggtgtggaggtttgcggaaaggaacatttcttcttagtttttacttcttgcaaccatgaagccatacattgggaagtatttttgtttgttttgtgtttttttgttgttgttggaaagagagtttctctatgctgcttacattggttttgaattgctgggtttacaggcttgagccgccatgtccagctcagggagggtttttctttttttttttaaatcccagggaaggtgattgactcagggttgcttttcagcagtacttatggcagcgaacctgacccccaatccccgggaggtcctccaggttctcctgacgcttggttgttcccttgccctttggtgcatgtgggtttaacaacctgtctttctcttctaggtctataagaaggagaaagctcgagtcatcactgaggaagagaagaatttcaaagccttcgctagtctccgtatggcccgtgccaacgcccggctcttcggcatacgggcaaaaagagccaaggaagccgcagaacaggatgttgaaaagaaaaaataaagccctcctggggacttggaatcagtcggcagtcatgctgggtctccacgtggtgtgtttcgtgggaacaactgggcctgggatggggcttcactgctgtgacttcctcctgccaggggatttggggctttcttgaaagacagtccaagccctggataatgctttactttctgtgttgaagcactgttggttgtttggttagtgactgatgtaaaacggttttcttgtggggaggttacagaggctgacttcagagtggacttgtgttttttctttttaaagaggcaaggttgggctggtgctcacagctgtaatcccagcactttgaggttggctgggagttcaagaccagcctggccaacatgtcagaactactaaaaataaagaaatcagccatgcttggtgctgcacacttgtagttgcagctcctgggaggcagaggtgagggatcacttaacccaggaggcagaggctgcactgagccaggatcacgccactgcactctagcctgggcaacagtgagactgtctcaaaaaaaaaaaaagagacagggtcttcggcacccaggctggagtacagtgccacaatcatggctcactgcagtcttgaactcatggcctcaagcagtcctccctcagcctcccaagtagaggggtttataggcacgagaccctgcacccaacctagagttgccttttttaagcaaagcagtttctagttaatgtagcatcttggactttggggcgtcattcttaagcttgttgtgcccggtaaccatggtcctcttgctctgattaacccttccttcaatgggcttcttcacccagacaccaaggtatgagatggccctgccaagtgtcggcctctcctgttaaacaaaaacattctaaagccattgttcttgcttcatggacaagaggcagccagagagagtgccaggggtgccctggtctgagctggcatccccatgtcttctgtgtccgagggcagcatggtttctcgtgcagtgctcagacacagcctgccctagtcctaccagctcacagcagcacctgctctccttggcagctatggccatgacaaccccagagaagcagcttcagggaccgagtcagattctgttttgtctacatgcctctgccgggtgccggtattgaggcacccagggagctgttactggcgtggaaataggtgatgctgctacctctgctgctgcactcacagccacacttgatacacgatgacaccttgcttgtttggaaacatctaaacatctagtagatgacttgcaggctgttggctaccagtttcctgtctgaggtgtatatgttaacttcgtgatcagtttgtatgtttgggactcttgtcctatgtaaagttaaggtgggccgggtgcagtggctcacgcctgtaatcctaacactgggaggccgaggcgggtggatcacctgatggtgaaacctcatctctactgaaaatacaaaaattagctgagtggtgacaca

SEQ ID NO: 6560 - DNA, 1191 bp, Homo sapiens
cattttgaggttggttggaagttcaagaccaagcttggccaacatgtcagaactactaaaaaataaagaaatcagccatgcttggtgctgccccacttgtagttccagctcctgggaggcagaggtgagggatcccttaacccaggaggcagaggctgcactgagccaggatcacgccactgcattttagctggggcaacagtgagactgtctcaaaaaaaaaaaaagagacagggttctttcggcacccaggctggagtacagtgccacaatcatggctcactgcagtcttgaactcatggcctcaagcagtcctccctcagcctcccaagtagaggggtttataggcacgagaccctgcacccaacctagagttgccttttttaagcaaagcagtttctagttaatgtagcatcttggactttggggcgtcattcttaagcttgttgtgcccggtaaccatggtcctcttgctctgattaacccttccttcaatgggcttcttcacccagacaccaaggtatgagatggccctgccaagtgtcggcctctcctgttaaacaaaaacattctaaagccattgttcttgcttcatggacaagaggcagccagagagagtgccagggtgccctggtctgagctgggcatccccatgtcttctgtgtccgagggcagcatggtttctcgtgcagtgctcagacacagcctgccctagtcctaccagctcacagcagcacctgctctccttggcagctatggccatgacaaccccagagaagcagcttcagggaccgagtcagattctgttttgtctacatgcctctgccgggtgccggtattgaggcaccccagggagctgttactggcgtggaaataggtgatgctgctacctctgctgctgcactcacagccacacttgatacacgatgacaccttgcttgtttggaaacatctaaacatttagtagatgacttgcaggctgttggctaccagtttcctgtttgaggtgtatatgttaacttcgtgatcagtttgtatgtttgggactcttgtcctatgtaaagttaaggtgggccgggtgcagtggctcacgcctgtaatcctaacactgggaggccgaggcgggtggatcacctgatggtgaaacctcatctctactgaaaatacaaaaattagctgagtggtgacaca

SEQ ID NO: 6561 - DNA, 3902 bp, Homo sapiens
  SITE (3274): n equals a,t,g, or c
attgcggggccgcttcctttccgctcggctgttttcctgcgcaggaggtgagggagactgggtcctggcctttgggcatcatccagcgccatcggcctggcgcttcagccaacgcgggagtggatgggccccttcttcttcgcagacagcgttcggccgctgcccgggctctaggcgcggccggacggcccagtctggagggttcggggcggaggcccgggggggtgcgcgcgcccggggtccggcctctcactcgctcccctctcgtccgcagccgcagggccgtaggcagccatggcgcccagccggaatggcatggtcttgaagccccacttccacaaggactggcagcggcgcgtggccacgtggttcaaccagccggcccgtaagatccgcaggtgagccctgcgctcggggctgcccctggggctcgtgcccgcggctgcgccttggcttgcgggtggccgatgccagggcggggggcgctgtctgcaaccgtcgcggagcgctggcctggcggccttaggcaagggtgaccgccgctgcgcttctctccaccagacgtaagggcccggcaagccaaggcgcgccgcatcgctccgcgccccgcgtcgggtcccatccggcccatcgtgcgctgccccacggttcggtaccacacgaaggtgcgcgccggccgcggcttcagcctggaggagctccagggtgagtactggcagcgctgcggtgtcaggaaggccccgaagtcccctctgttggcctcagtcgcgtgatgacattctccggaatcgctgtacggccttgatgaaagcacatttgaacccttttccatctgattgctgaggcttttcatccaggcctcggggctggagaaagcccgggcctgtctccatctctctctggttctggggcaggtggccggcattcacaagaaggtggcccggaccatcggcatttctgtggatccgaggaggcggaacaagtccacggagtccctgcaggccaacgtgcagcggctgaaggagtaccgctccaaactcatcctcttccccaggaagccctcggcccccaagaagggagacagttctgtgagtacacggctctctggccgtcctggtgcgcggggacagtgaggcttggctcctttatcagtgacaccggtccctgggtcttgctggggtgagaagaaccaaaacattgtgggtgatgagctaagcgggactgctaaggttcacctgtgcgtttccgcagagataaccttaatggacatggcaaggctgtgtgacttggaggcagctttttccattgacgttgctctccctaaaatgcttcgtattccaaaatatttctagaaagaccttgtaggataaggttgataaagagtccattgtatacgtttccgggtagttaaattagggaacagttttctctgccccgcccgtggttcacaggtagataactgtctcgtgcgtgttgcgtcaactcagtaagatatagtcacctaactaataaggactgttcttaacattggggccacaaagtgtgttgtagaaaaggctcagacactggtcctgaacacggaatccccaggggaaagtttggggccaggtgagggtggagtccttgcagcagtgcggccaaccccacttaactcttctcattcaccaacaggctgaagaactgaaactggccacccagctgaccggaccggtcatgcccgtccggaacgtaagtgaacacttactcaaatccaggcttcagacgagatcagtgggtgaacacgtgggtatctgagatgcgggtgatgggggtcaggcttaagaacgttaatagtggcagttgtgggtgtggaggtttgcggaaaggaacatttcttcttagtttttacttcttgcaaccatgaagccatacattgggaagtatttttgtttgttttgtgtttttttgttgttgttggaaagagagtttctctatgctgcttacattggttttgaattgctgggtttacaggcttgagccgccatgtccagctcagggagggtttttctttttttttttaaatcccagggaaggtgattgactcagggttgcttttcagcagtacttatggcagcgaacctgacccccaatccccgggaggtcctccgggttctcctgacgcttggttgttcccttgccctttggtgcatgtgggtttaacaacctgtctttctcttctaggtctataagaaggagaaagctcgagtcatcactgaggaagagaagaatttcaaagccttcgctagtctccgtatggcccgtgccaacgcccggctcttcggcatacgggcaaaaagagccaaggaagccgcagaacaggatgttgaaaagaaaaaataaagccctcctggggacttggaatcagtcggcagtcatgctgggtctccacgtggtgtgtttcgtgggaacaactgggcctgggatggggcttcactgctgtgacttcctcctgccaggggatttggggctttcttgaaagacagtccaagccctggataatgctttactttctgtgttgaagcactgttggttgtttggttagtgactgatgtaaaacggttttcttgtggggaggttacagaggctgacttcagagtggacttgtgttttttctttttaaagaggcaaggttgggctggtgctcacagctgtaatcccagcactttgaggttggctgggagttcaagaccagcctggccaacatgtcagaactactaaaaataaagaaatcagccatgcttggtgctgcacacttgtagttgcagctcctgggaggcagaggtgagggatcacttaacccaggaggcagaggctgcactgagccaggatcacgccactgcactctagcctgggcaacagtgagactgtctcaaaaaaaaaaaaagagacagggtcttcggcacccaggctggagtacagtgccacaatcatggctcactgcagtcttgaactcatggcctcaagcagtcctccctcagcctcccaagtagaggggtttataggcacgagaccctgcacccaacctagagttgccttttttaagcaaagcagtttctagttaatgtagcatcttggactttggggcgtcattcttaagcttgttgtgcccggtaaccatggtcctcttgctctgattaacccttccttcaatgggcttcttcacccagacaccaaggtatgagatggccctgccaagtgtcggcctctcctgttaaacaaaaacattctaaagccnattggttttcccttttgggcgtttcccatggggacaaaggagcgcaagccaagagagagtgcaggtgccctggtctgagctggcatccccatgtcttctgtgtccgagggcagcatggtttctcgtgcagtgctcagacacagcctgccctagtcctaccagctcacagcagcacctgctctccttggcagctatggccatgacaaccccagagaagcagcttcagggaccgagtcagattctgttttgtctacatgcctctgccgggtgccggtattgaggcacccagggagctgttactggcgtggaaataggtgatgctgctacctctgctgctgcactcacagccacacttgatacacgatgacaccttgcttgtttggaaacatcttaacatcttgtagatgacttgcaggctgttggctaccagtttcctgtctgaggtgtatatgttaacttcgtgatcagtttgtatgtttgggactcttgtcctatgtaaagttaaggtgggccgggtgcagtggctcacgcctgtaatcctaacactgggaggccgaggcgggtggatcacctgatggtgaaacctcatctctactgaaaatacaaaaattagctgagtggtgacaca

SEQ ID NO: 6562 - DNA, 690 bp, Homo sapiens
ccccgctggtggggacaagtgcctgagtgtgggccgtgcccgagtgtggccatccctgagtggggccgtcctgactaggaagtggcttttcagttgtgatgtgtgggcctgacctagggggcgctgtggaacccgggctggaaccagccctctgtgccaggccgcagacaggttccgccggccctgaggggcagctgccatggcgtgggtcactgggagctgagaggaagggcccccaccgcacctcaggcaaagcggctctgggaacaccttgatttcgtccatgtgagccgtcccagggagggcagccaagctgtgaagcctgagaaactgacctgtgtgccacgagcttgtggtctgctgcccggtggaggaagtgcaggtgcgcccaggctcctcattccgttttgcaggattccttcggggtgtgagcatttcctattcagcctgtcgcccccggggagcacgggctggctctgtggtgcccgtggccttttgtagaagcgttggttttacggcaggttcatctctggggcagcctcccacagtgggtggggctttgccagcagtgcccacgggggtcatggggccaggcgcgctccggcgcctgcagaactgatcggggatagtctcaggaggcgctagtcacgtgccccggtgatcggggatagtctcagaaggcgctagtct

SEQ ID NO: 6563 - DNA, 690 bp, Homo sapiens; identical to SEQ ID NO: 6562

SEQ ID NO: 6564 - DNA, 292 bp, Homo sapiens
ggtggctcacgcctgtaatcccagcactttgggaggcccaggcgggcggatcgcgaggtcaggagatcgagaccatcctggctaacacagtgaaaccccgtctgtactaaaaatacaaaaaatcagctgggcgtgatggtgggcgcctgtagtcccagctacttgggaggcagaggcaggagaatggcgtgaacccgggaggcagaacttgcagtgaacagagatcgcaccactgaactccagcctgggcaacagagggagactccgtctcaaaaaaaaaaaataataataa

SEQ ID NO: 6565 - DNA, 690 bp, Homo sapiens; identical to SEQ ID NO: 6562

SEQ ID NO: 6566 - DNA, 1069 bp, Homo sapiens
tcagctttaaaacgcagggattccatgtgtcacctctcccaggaatatttgtatctgtggaatgaaagaccttttgctgctgtctcagagaagtatttatgcaggtcaggggtcctttcccaatgcgttggactcatccatctggaggagctcttctaccgaagggcactaccttctcaccaggctgtggcagcagaggggttaaacagcatgccctgccctgctccaggcagaagggttgtaggacttaatcacgtttcagcttggctgtcgggctgtgagtcacggttgcactgcgattatgtaagcacgcaggaataggtggcatgacatatatgctgccagcagccacgggcctcgcccttccgagtcaccactactttttaagcctttttttggatacaagtttctttgggttcatctttggaatggaaatggaagcatgattgcagaataggcagaacaggaattatccatcaatcagagagaacccagccctttaagagaagctggaattagaatatggaattcctgagccttgagctggcatagccgagccctggtttatgctcttcctgcctccctccttttttccctcctgcctgtgtgctccacttcctctcctgagactcccccaaggtagcatcactcccaccaggagcctcaggcaggaaaaataaggcccagagaagggactgtccctggggacgtgcactgagtgtgtgtgagggtgcggggcaggaataggagtgccaggagtctacctctggagcaatgcctcccacagtatttctgtaggggaaaggatagaaactcacttcttgggttcctccaatcaccatgcacatgtcagtccttcagctataaatgcaaaggaaagccagaactgagatttgagctttctcaccatctccatggtcagatatctccactgccaaagggttcattccgcctctgggtttatctctttcttcatgcttcttcctggcagtgtcctgttgaagcttaccttcccatctgtgtttgcatccactccctaaaaaccacaagacaaaacaagaaaataaaa

SEQ ID NO: 6567 - DNA, 837 bp, Homo sapiens
gaagggttgtaggacttaatcacgtttcagcttggctgtcgggctgtgagtcacggttgcactgcgattatgtaagcacgcaggaataggtggcatgacatatatgctgccagcagccacgggcctcgcccttccgagtcaccactactttttaagcctttttttggatacaagtttctttgggttcatctttggaatggaaatggaagcatgattgcagaataggcagaacaggaattatccatcaatcagagagaacccagacctttaagagaagctggaattagaatatggaattcctgagccttgagctggcatagccgagccctggtttatgctcttcctgcctccctccttttttccctcctgcctgtgtgctccacttcctctcctgagactcccccaaggtagcatcactcccaccaggagccttaggcaggaaaagtaaggcccagagaagggactgtccctggggacgtgcactgagtgtgtgtgagggtgcggggcaggaataggagtgccaggagtctacctctggagcaatgcctcccacagtatttctgtaggggaaaggatagaaactcacttcttgggttcctccaatcaccatgcacatgtcagtccttcagctatcaatgcaaaggaaacccagaactgagatttgagctttctcaccatctccatggtcagatatctccactgccaaagggttcattccgcctctgggtttatctctttcttcatgcttcttcctggcagtgtcctgttgaagcttaccttcccatctgtgtttgcatccactccctaaaaactacaagacaaaacaagaaaataaaa

SEQ ID NO: 6568 - DNA, 1067 bp, Homo sapiens
tcagctttaaaacgcagggattccatgtgtcacctctcccaggaatatttgtatctgtggaatgaaagaccttttgctgctgtctcagagaagtatttatgcaggtcaggggtcctttcccaatgcgttggactcatccatctggaggagctcttctaccgaagggcactaccttctcaccaggctgtggcagcagaggggttaaacagcatgccctgccctgctccaggcagaagggttgtaggacttaatcacgtttcagcttggctgtcgggctgtgagtcacggttgcactgcgattatgtaagcacgcaggaataggtggcatgacatatatgtgccagcagccgacgcctcgcccttccgagtcaccactactttttaagcctttttttggatacaagtttctttgggttcatctttggaatggaaatggaagcatgattgcagaataggcagaacaggaattatccatcaatcagagagaacccagccctttaagagaagctggaattagaatatggaattcctgagccttgagctggcatagccgagccctggtttatgctcttcctgcctccctccttttttccctcctgcctgtgtgctccacttcctctcctgagactcccccaaggtagcatcactcccaccaggagcctcaggcaggaaaaataaggcccagagaagggactgtccctggggacgtgcactgagtgtgtgtgagggtgcggggcaggaataggagtgccaggagtctacctctggagcaatgcctcccacagtatttctgtaggggaaaggatagaaactcacttcttgggttcctccaatcaccatgcacatgtcagtccttcagctataaatgcaaaggaaagccagaactgagatttgagctttctcaccatctccatggtcagatatctccactgccaaagggttcattccgcctctgggtttatctctttcttcatgcttcttcctggcagtgtcctgttgaagcttaccttcccatctgtgtttgcatccactccctaaaaaccacaagacaaaacaagaaaataaaa

SEQ ID NO: 6569 - DNA, 1747 bp, Homo sapiens
agccaccgcgcccggccttagttgtgtgtgatttctatgtgtgctctaggcacttgccctatagctgctcctaaatgtggggtcttagaaaacatcttgtcccttcgaagcatactctgctggttggctaaattgcactgggaaaaaatagcagcagccctattgctatgtcacttgcctgcagagcaaaagttgattcaggaacagtaatttgactttgtctatattaaaaatcataaatagtcaacaaatgcaaaaaatgcaaagaatttgtaggtatgattagtgcattataggtgttttcaaatttctcctatgataaattaaaaatgtaatgttgggcattaatttcctaaacccagtgctcagcaattttctcaaattgtttacagtttttccaagagacttcagaaccattccctggagtgaattatttccaatggtgaagagtaatggatggatggcatgagattctcaaaaaaatcttgctcctatttcagaagtgtcactccagccccttgaaggtccaggaaacctggctgagtagtgtggtctatggaggtgcatgggcttcagaatcaggccaacgttgatcctgagtcccagccagctgcttagtagctgtgggatagttacacaagacacatctacaagaaaagtcatgataaaattgattgcaaaaacagcaatttgaaaaatttcttattgtattcatgtccttggaaatggcttttatagtcgttcctatcaagagacagattctgtttcccaaaccttgaacttctcttgacttatctgcactggcacagggtgccagtttggggcccaggtttaaaggtcctaaatgcttctgttatctttttcagaattcttccatctctatgacaacaagcccattttagctttctggagaatagcatctgagaaaagccaaagtgcctcagtttacagacagctcactcacagaagcagagccacctaattcaccagcatctaaccactcacacctgaaggagccaaactgagcccagaagaatggcccggctgagcccagcctaaatttctaaccagctcaatcctgagctagtatgtttcgggattgttatgcagttataagttagtaatatatacacccattaaagacaggatctcaggacagattgatcacaaataacctgcaaatgcttgccaccctgtaagtattgattttcttttttcctttatttaaagttagatttgttgtaagatgatattgagttacacagaagttaggcaggagaatagggtttggaggcagggaacttaaggccaattcgtgctgacttcctacaagaaaaaacaccaaggtctgggagcagggaacctaaagccagttaacgtgaacttcctacatctaaaccaaaaggaaagacctcatctacacccgagtagcaaaggatcgaaggcgactgtcgctacaaccctcccccttgtaccagttctctgatagaaaaggacagtgccttggagtggccgtgggccaagcacaggccatgccttcatctgcatagggtaccaattcgcctcaacctttgattagccaaggaccaaatccttcattcagataaggggtagctgataggaacctcaaaaggagtacttaaaacccagaaaacattgtaaccgggtccttgggcggcttgctggggctcacacccaccctgtagagtgctttctcactttaataaaatcttgcttttgctattcc

SEQ ID NO: 6570 - DNA, 261 bp, Homo sapiens
tttttttttgagacggagtctcactctcgcccaggctggagtgcagtggctcgatctcggctcactgcaagctccacctcccaggttcacgccattctcctgcctcagcctcccaagtagctgggactacaggcacctgctaccatgcccggctaatttttttgtatttttagtagagacggggtttcaccatgttagccaacaaggtcttgatttcctgacctcgtgatccgcctgcctcagcctaccaaagtgctggga

SEQ ID NO: 6571 - DNA, 3583 bp, Homo sapiens
  SITE (3513): n equals a,t,g, or c
  SITE (3515): n equals a,t,g, or c
tccctcctgactttatttttgtctattgtggccttgactgccgggactaaaactttacagcacaacttggcaggacgtggatttcatcacgatgcctttttcagcccttccaattcctgccttcttttcagaagtgagtgtcccagaaaagacaattgtacagcaaaggaatggacttttcctgaagctaaatggaacaccacagccagagttttcagtcacatccgtcttggcatgggccatgttcttattatagtccagtgttttatttcttcaatggctaatatctataatgaaaagatactgaaggaagggaaccagctcactgaaagcatcttcatacagaacagcaaactctatttctttggcattctgtttaatgggctgactctgggccttcagaggagtaaccgtgatcagattaagaactgtggatttttttatggccacagtgcattttcagtagcccttatttttgtaactgcattccagggcctttcagtggctttcattctgaagttcctggataacatgttccatgtcttgatggcccaggttaccactgtcattatcacaacagtgtctgtcctggtctttgacttcaggccctccctggaatttttcttggaagccccatcagtccttctctctatatttatttataatgccagcaagcctcaagttccggaatacgcacctaggcaagaaaggatccgagatctaagtggcaatctttgggagcgttccagtggggtaagtttgtgagggtgttcctttttgcttgttcttcccaaatttaaagcatagttaattcaaggaaaaaaataaaatcagtactgatttgtcaaagaatgtattggatctctgacttttaaaaccgaatcaacaaacattccttttactcctgatgtttgcaagggctcataatcaatgctgtcaggtgtagagaaaaagtataagtcaatctcaaggaccttatgtgttacttcatagaatactatagaattatacacctggaagatacctcacaggttgtcttgtcctgtctgcatagttttacaagaaacaggcaaaatggtttacagataataaatgaaagaactggtacacctatgtctgactccaagtccctttctctttcttttccaccatagttagggaaaataagctcatttgtgagagaagttggcctttcgtattagtaagtcctgttgaatagaaagcctggctcctcagtcctccctgtggttattcataagccagtatgccagaagggcagggtttgtttatttcactagaaaggtagttttcaagaggatccttgcaaggcgagtaggaggaaaatattttctagaaaaatgcttatgcaattattccgaatatctcccagttgcttgcaattgttttggaaggctctgtcaatcattttattggcaagttaatgatctctttgaagattcaattaaggagttaaatatacgtttaaataagtgaaatagacatctagctttagatttacaattttcttgagcacacaaaatatgaaatattttatacagtgaacatttcactctttgggaaaaataatctattgcttaataacattcatagcagagcttccctgggtgtaatgcctctgtcatgattcaacagattctaaagatgaaaaaattaggatcttgagtttcggataccctgctcttagccagagtgtatatccagaagtcttgtattcttttccaacagccgataatgccatttgctctaatttttaagcaaaagaaaatctatataggtaacaaggcctatgaagacctatttctgtaacctttaatcatttttctgcaagaccagcaggtggtgctcctcactttgctcatgttagctttgaaattttgagtactgagtacacttcacttttttatcctctcatacttctatagttaactttccaagaacataagtatttatttaatttgaccagattatatctatagcttaatgaggtaagacagtgatttgttagtaaggttttccctttaaaaatgctacatttccagttttgttctaattactgctttcatgtttccttttaggatggagaagaactagaaagacttaccaaacccaagagtgatgagtcagatgaagatactttctaactggtacccacatagtttgcagctctcttgaaccttattttcacattttcagtgtttgtaatatttatcttttcactttgataaaccagaaatgtttctaaatcctaatattctttgcatatatctagctactccctaaatggttccatccaaggcttagagtacccaaaggctaagaaattctaaagaactgatacaggagtaacaatatgaagaattcattaatatctcagtacttgataaatcagaaagttatatgtgcagattattttccttggccttcaagcttccaaaaaacttgtaataatcatgttagctatagcttgtatatacacatagagatcaatttgccaaatattcacaatcatgtagttctagtttacatgccaaagtcttccctttttaacattataaaagctaggttgtctcttgaattttgaggccctagagatagtcattttgcaagtaaagagcaacgggaccctttctaaaaacgttggttgaaggacctaaatacctggccataccatagatttgggatgatgtagtctgtgctaaatattttgctgaagaagcagtttctcagacacaacatctcagaattttaatttttagaaattcatgggaaattggatttttgtaataatcttttgatgttttaaacattggttccctagtcaccatagttaccacttgtattttaagtcatttaaacaagccacggtggggcttttttctcctcagtttgaggagaaaaatcttgatgtcattactcctgaattattacattttggagaataagagggcattttattttattagttactaattcaagctgtgactattgtatatctttccaagagttgaaatgctggcttcagaatcataccagattgtcagtgaagctgatgcctaggaacttttaaagggatcctttcaaaaggatcacttagcaaacacatgttgacttttaactgatgtatgaatattaatactctaaaaatagaaagaccagtaatatataagtcactttacagtgctacttcacacttaaaagtgcatggtatttttcatggtattttgcatgcagccagttaactctcgtagatagagaagtcaggtgatagatgatattaaaaattagcaaacaaaagtgacttgctcagggtcatgcagctgggtgatgatagaagagtgggctttaactggcaggcctgtatgtttacagactaccatactgtaaatatgagctttatggtgtcattctcagaaacttacacatttctgctctcctttctcctaagtttcatgcagatgaatataagggaatatactattatataattcattngngatatccacaataatatgactggcaagaattggtggtaattttgtaattaaaataattattaaaccta

SEQ ID NO: 6572 - DNA, 3583 bp, Homo sapiens
tccctcctgactttatttttgtctattgtggccttgactgccgggactaaaactttacagcacaacttggcaggacgtggatttcatcacgatgcctttttcagcccttccaattcctgccttcttttcagaagtgagtgtcccagaaaagacaattgtacagcaaaggaatggacttttcctgaagctaaatggaacaccacagccagagttttcagtcacatccgtcttggcatgggccatgttcttattatagtccagtgttttatttcttcaatggctaatatctataatgaaaagatactgaaggaagggaaccagctcactgaaagcatcttcatacagaacagcaaactctatttctttggcattctgtttaatgggctgactctgggccttcagaggagtaaccgtgatcagattaagaactgtggatttttttatggccacagtgcattttcagtagcccttatttttgtaactgcattccagggcctttcagtggctttcattctgaagttcctggataacatgttccatgtcttgatggcccaggttaccactgtcattatcacaacagtgtctgtcctggtctttgacttcaggccctccctggaatttttcttggaagccccatcagtccttctctctatatttatttataatgccagcaagcctcaagttccggaatacgcacctaggcaagaaaggatccgagatctaagtggcaatctttgggagcgttccagtggggtaagtttgtgagggtgttcctttttgcttgttcttcccaaatttaaagcatagttaattcaaggaaaaaaataaaatcagtactgatttgtcaaagaatgtattggatctctgacttttaaaaccgaatcaacaaacattccttttactcctgatgtttgcaagggctcataatcaatgctgtcaggtgtagagaaaaagtataagtcaatctcaaggaccttatgtgttacttcatagaatactatagaattatacacctggaagatacctcacaggttgtcttgtcctgtctgcatagttttacaagaaacaggcaaaatggtttacagataataaatgaaagaactggtacacctatgtctgactccaagtccctttctctttcttttccaccatagttagggaaaataagctcatttgtgagagaagttggcctttcgtattagtaagtcctgttgaatagaaagcctggctcctcagtcctccctgtggttattcataagccagtatgccagaagggcagggtttgtttatttcactagaaaggtagttttcaagaggatccttgcaaggcgagtaggaggaaaatattttctagaaaaatgcttatgcaattattccgaatatctcccagttgcttgcaattgttttggaaggctctgtcaatcattttattggcaagttaatgatctctttgaagattcaattaaggagttaaatatacgtttaaataagtgaaatagacatctagctttagatttacaattttcttgagcacacaaaatatgaaatattttatacagtgaacatttcactctttgggaaaaataatctattgcttaataacattcatagcagagcttccctgggtgtaatgcctctgtcatgattcaacagattctaaagatgaaaaaattaggatcttgagtttcggataccctgctcttagccagagtgtatatccagaagtcttgtattcttttccaacagccgataatgccatttgctctaatttttaagcaaaagaaaatctatataggtaacaaggcctatgaagacctatttctgtaacctttaatcatttttctgcaagaccagcaggtggtgctcctcactttgctcatgttagctttgaaattttgagtactgagtacacttcacttttttatcctctcatacttctatagttaactttccaagaacataagtatttatttaatttgaccagattatatctatagcttaatgaggtaagaccagtgatttgttagtaaggttttccctttaaaaatgctacatttccagttttgttctaattactgctttcatgtttccttttaggatggagaagaactagaaagacttaccaaacccaagagtgatgagtcagatgaagatactttctaactggtacccacatagtttgcagctctcttgaaccttattttcacattttcagtgtttgtaatatttatcttttcactttgataaaccagaaatgtttctaaatcctaatattctttgcatatatctagctactccctaaatggttccatccaaggcttagagtacccaaaggctaagaaattctaaagaactgatacaggagtaacaatatgaagaattcattaatatctcagtacttgataaatcagaaagttatatgtgcagattattttccttggccttcaagcttccaaaaaacttgtaataatcatgttagctatagcttgtatatacacatagagatcaatttgccaaatattcacaatcatgtagttctagtttacatgccaaagtcttccctttttaacattataaaagctaggttgtctcttgaattttgaggccctagagatagtcattttgcaagtaaagagcaacgggaccctttctaaaaacgttggttgaaggacctaaatacctggccataccatagatttgggatgatgtagtctgtgctaaatattttgctgaagaagcagtttctcagacacaacatctcagaattttaatttttagaaattcatgggaaattggatttttgtaataatcttttgatgttttaaacattggttccctagtcaccatagttaccacttgtattttaagtcatttaaacaagccacggtggggcttttttctcctcagtttgaggagaaaaatcttgatgtcattactcctgaattattacattttggagaataagagggcattttattttattagttactaattcaagctgtgactattgtatatctttccaagagttgaaatgctggcttcagaatcataccagattgtcagtgaagctgatgcctaggaacttttaaagggatcctttcaaaaggatcacttagcaaacacatgttgacttttaactgatgtatgaatattaatactctaaaaatagaaagaccagtaatatataagtcactttacagtgctacttcacacttaaaagtgcatggtatttttcatggtattttgcatgcagccagttaactctcgtagatagagaagtcaggtgatagatgatattaaaaattagcaaacaaaagtgacttgctcagggtcatgcagctgggtgatgatagaagagtgggctttaactggcaggcctgtatgtttacagactaccatactgtaaatatgagctttatggtgtcattctcagaaacttacacatttctgctctcctttctcctaagtttcatgcagatgaatataaggtaatatactattatataattcatttgtgatatccacaataatatgactggcaagaattggtggaaatttgtaattaaaataattattaaaccta

SEQ ID NO: 6573 - DNA, 590 bp, Homo sapiens
gggtacatgtggacacaggattccaaagtgagaagggtggtgtattagtccattctcatgctgctacaaagaaatacccgagactgggtaatctataaagaaaaggggtttaaatgactcgcagttctgcatggctggggaggaggcctcaggaaactcacaagcatggctgaaggcgaaacagaagcaagcaccttcttcacaaggcagcaggagagagagtgccaacaggggaaatggcagatgcttataaaaccatcagatctcatgagaacttactatcatgagaacagcatgggggaaactgcccccatgattcaattacccccacctggttccttcctcaacacctggggattatggggattacaattcaagatgagatttgggcggggacagaaagcctaatcatatcagatgggaaggacatgagggttgacaaaatatgtattgggtacaatgttcactgtttgagtgatgggtccactagaagcccaaacttcaccattatgcaatgtaccatatatacgcaatgtaacaaacctgtacatgtaccccttcaatctgaaataaaagttgttttttttttt

SEQ ID NO: 6574 - DNA, 4574 bp, Homo sapiens
ccaggaatcaggggcagccgggcgagtcccagggcaggggtcctccgccgccttgcacctgccctgctgggcggcaccgggtcagtgccctgccccctcctgcgggtcccaactctctctttcccatcgtgcgtcctctggagaagtgcgcgcgtgtaagtgtggcgagtgtggccaagggtgccggaggcagggttcgggtgcgtagtcgttgcgtgggcgctgcccaaaaggcgcagagcatcaagtgtgcgtgggcagaaccggcgcgggcgcccgccgcgggtctgcgcggggcgggggcgcagcaagtgcatccgagcgagcggagactagcgcaccggcgtcggtggcgagggtggtgcagaggagtccggctgggcggagggaggaaggatgggtgcgggtaactttttgaccgccttggaagtaccagtagccgcgctcgcaggggctgcctccgaccgccgggcgagctgcgagcgagtgagcccgccaccgcccctcccccacttccgcctcccgcctcttcctcgttcccggctcccagggcccgtcggtcccccgggagccctggaggcgcagccccaccccggccggcgcggctcgctcccacgcccccgccgcggcctcgctggagcggacggactgagtcagagggggcgccagcgctgcaggtaggggctccggcggcggtgggcgcaggtgccgcggtggaccgcggaggggaccggagcacgaggggaacggccttgggggagcgccctccccccgtcctccgccgacgcctcgtgtccctttttagggaattttttccctcttgctggctccagtgcgggtggggctgagaccgagagggagttctccatttcgctggctcctgcccggcccctggcagcctcctgcccccaaatctcttcaccccctttccagtacctataggtcgcgtaaacaactccctttctccagctctgggctccgcggccccccgggggacagctccttcagtctcgtgagatcggtggggttagggggaggggaaaagagagggggtgtcccagagcccctggcccccgtcagctcccccaccttggcctctccctccccctcctcgctgctggagcacaggctccaggggccctgggtatttttagcgttgtgacctgggcggcagctctaagagcctttcccgggaatcggcgtcagcgcctcgctcctccgccgccagcccgcggccgcacggtctccccagacttccgtggccctgccttggccagtcggggttgggtccctctccacctctgtggcgcccgtggagctggccagggtctgggatacgctgggtgcagatgaggtggggaaggcagtctgcggaggatgacgtctgatcctcaagctagaaactcccttgcctctggtgatgggctcagagcagaacgccgggaaggagatgagcgaatgggaatgaatgcaccgacctgggctggcccatagcctcagtgctctggcagggtctcagcttctcagccctaggggtcaggaggcctgctctgaactggacccagaacccgcctttccaattgctcctcactgactaatggggagataagtcagtgagatgtgtcccaggagggggacgcataaagagctgttggagttcaaaggaaagatggtagtctcctaaatagctcaccttcacaagcagggtcttgtatttgaggcaggtaggttggttatgccattttcagatggggagactaagaccagaaaggtgatttccttaggggcagagcctagtctggaagtcaggcctgtgacttcagagcaagggtttggggtagatggcacatgcgtgtgtacgtgtttgtgtgggtggagagaaaaggaggggcgcgggaggagttgctttagcctttgtctgggttttgaaggatgggaaggggtgggctgcagcactggaggaagggaaccctccaccctgagatctctgtctctatcctatcctgtccctggccttctgaggcaagcggggccaattaaggggaaaacgtacctcctccatttgtgctgaaccaatccctccaacccctctcaggagggcatgatatggagagttgggcattggctgtgttccctgaatacagagtatctctcttgtggtgcctggaactggcatcccctttgtggagcttagggcaagccccgcctctgcatgagacttggtttgtgggacacacttggtttcagggaaggggaaagaggtcaccaagggcagaggtgtccaggccggagccaggggccccactgttgggatgctggctgcagtggggcgccccaagcccaggtcccctctgtcttctctttcgactttgcagctgtacttgttttgctcctctacccgcaggagctgacatggacccaaatcctcgggccgccctggagcgccagcagctccgccttcgggagcggcaaaaattcttcgaggacattttacagccagagacagagtttgtctttcctctgtcccatctgcatctcgagtcgcagagacgtaagtcccaagtcctgagaagagggactggggtagggtagggaggatgtcctgtgggtcctgaatcttgtggcactctctcccctctggttttcttggccctctatgcttctaacttgggacctgacatgtaactctcactgtcctggtgtgcagcttgggtcctcctgacttgcccacttcttgatccgcagcccccataggtagtatctcatccatggaagtgaatgtggacacactggagcaagtagaacttattgaccttggggacccggatgcagcagatgtgttcttgccttgcgaagatcctccaccaaccccccagtcgtctggtatgcccctctgctttggggacttcagtgccagtcagccagagccggatgtcaggctctgaaacgaggctacaaggctgggctggggaagtacacaagtaagggctggaagtgggtgtttctaccaatgaaacagctgcctgttctgattttagggaagttgaccctgagggagaactgggttacacatctctaatccaaaattctgggaacggtcaatctcttctttaattttacatttgttatattaatataattagtcactataattaaaataatgtaaaattgtaatttttatatttggcaacttaagtagttttagtcattataatgatattaatatgtattgagtactttagtaggttccaatactgtactaaagtactttacatatattatctcaatccttacaacgtcctgtcagggtaggtgatataatctctattttataagcaggaaattaggctcagagaagttaagtcacattgtagccagaaggtagataaactggaattcatgtctgtctgactccaaagcccatatgcttaacttgtaagatagatattcttttaattaaaactgctactatttattgatggcttactatgccagacattttataagcattcttaggttttattcccaaaaccctttggggatgtaggtatcccttttattttgcagaggaggaacagagtccttgaaagggaaagtgacttgctcaaagccactcagcagcaataagtgatgtaggtggaacttgaactcttgccattcattgacctgactgtagatcccagacatggtgtaatgacgtggaaggagctggcagtcaggagatggtgatcttaatcctggctctttgctggattggcaaagtcactttggacaagtctctgccccactgtggactttagttactcctggccagataatctttaagagttctctgaagccctgtttgtggcctgaccagcttttctctctgggcagggatggacaaccatttggaggagctgagcctgccggtgcctacatcagacaggaccacatctaggacctcctcctcctcctcctccgactcctccaccaacctgcatagcccaaatccaagtgatgatggagcagatacgcccttggcacagtcggatgaagaggaggaaaggggtgatggaggggcagagcctggagcctgcagctagcagtgggcccctgcctacagactgaccacgctggctattctccacatgagaccacaggcccagccagagcctgtcgggagaagaccagactctttacttgcagtaggcaccagaggtgggaaggatggtgggattgtgtacctttctaagaattaaccctctcctgctttactgctaattttttcctgctgcaaccctcccaccagtttttggcttactcctgagatatgatttgcaaatgaggagagagaagatgaggttggacaagatgccactgcttttcttagcactcttccctcccctaaaccatcccgtagtcttctaatacagtctctcagacaagtgtctctagatggatgtgaactccttaactcatcaagtaaggtggtactcaagccatgctgcctccttacatcctttttggaacagagcacggtataaataataaactaataataatatgccaaccattcgacttcatttttcata

SEQ ID NO: 6575 - DNA, 322 bp, Homo sapiens
gacaggaaatggaggtgtattttaatataggcagcgagggagagggaggtggcaaggatgactcctagttcctgacttgctcgcggatgtttgtcgaatgaatgatccagtgaccccaaggcagaagtatctcagagagatccccccactcccctccccgcacccgtcaccacgctgccttcggagctctgaccgtaagggggtggatggaaggcaggaggaagggaatggccacggagtcttggtccaggagctgctagactggacacttctagcactggtctgagccaggagacgctgcgaaaagagggcaaacgtttct

SEQ ID NO: 6576 - DNA, 4151 bp, Homo sapiens
gggcagtctggcatgatctttttggaggtaagttgtgcctcactgaaaactaatccccagcccatctttgcctgctttctagccctgtctatcctgaagcgagctcgccgggagcgcccaggccgtgtagcctttgatgggatcaccgtcttctacttcccccgctgccagggcttcaccagtgtgcccagccgtggtggctgtactctgggtatggcccttcgccacagtgcttgccgtcgcttctctttggctgagtttgcgcaggagcaagcccgtgcacggcacgagaagctccgccagcgcttgaaagaggagaagttggagatgctgcagtggaaggtagagagagtcctctccgtggcgcacctcctgaggcagctcctggagtcctaaccttgaggggtgggcgtaccaggggtgggtgctgacttgctcattatggttatggggaaacagcctgtgggcctggtgattggcttgattggagcctgttgcctgggttgtctgcaacaggaggcgcagaggagggctcgtgtctatttgctgcaggggctgggggcatgatacctgaatctgaactttttggagagggggatgtgaagttgatatgaactggagggggtgcgtatctgtctggttaggaaagggagtctgtccatgatctagggaatgccatgagtaggatatctctttttttttttttcaaatgccctgagggcagttttcttggctgtcctgttcactgtctgacacacagtgcccatcgcagattaagcacgagtagtggcggggtaagcacttggggagggtttgtctagtgacagtagggctaagcccatgtccatgtctgtgcttctcacatccctctttcctgtggatgcagctttcggcagctggggtaccccaggcagaggcagggctgccacctgtggtggatgccattgatgacgcctctgtggaggaggacttggcagtcgctgtggcaggtggccggttggaagaagtgagcttcctacagccctacccagcccggcgacgtcgagctctgctgagggcttcaggtgtgcgaaggatcgatcgggaggagaagcgggagctgcaggcactgcgccaatcccgggaggattgtggctgtcactgcgataggatctgcgaccctgagacctgcagctgcagcctggcaggcatcaagtgccaggtgtggtggctggactgggatggggatcctgagcgtggggacttctttgcactccacagaaccctcacttgtacctctacttttctctgcagatggaccacacagcattcccctgtggctgctgcagggagggctgtgagaaccccatgggccgtgtggaatttaatcaggcaagagttcagacccatttcatccacacactcacccgcctgcagttggaacaggaggctgagagctttagggagctggaggcccctgcccagggcagcccacccagccctggtgaggaggccctggtccctactttcccactggccaagccccccatgaacaatgagctgggagacaacagctgcagcagcgacatgactgattcttccacagcatcttcatcagcatcgggcactagtgaggctcctgactgccccacccacccaggcctgcctggccctggcttccagcctggcgttgatgatgacagcctggcacgcatcttgagtttcagtgactctgacttcggtggggaggaggaggaagaggaggaagggagtgtggggaacctggacaacctcagctgcttccatccagctgacatctttggtactagtgaccctggtggcctggccagctggacccacagctattctggctgtagcttcacatcaggcatcctggatgagaatgccaacctggatgccagctgcttcctaaatggtggccttgaagggtcaagggaaggcagccttcctggcacctcagtgccacccagcatggacgctggccggagtagctcagtggatctcagcttgtcttcttgtgactcctttgagttactccaggctctgccagattatagtctggggcctcactacacatcacagaaggtgtctgacagcctggacaacatcgaggcacctcacttccccctgcctggcctgtctccacctggggatgccagcagttgcttcctggagtccctcatgggcttctccgagccagccgccgaagccctagatccctttattgacagccagtttgaggacactgtcccagcatctctaatggagcctgtgccggtgtgaggaccaggatgtcttttcccagccccaagagacctgttgctgctttcttgtaattatggggctccccagagtctgcgtaacagtctcccactggctggctcacccacaggtgccatgtgcacactcctggttttcaaacaattctctggatttatttatttgttttaacttttctgtgctgaagagaggactagggggagggggcttcccctttcagctgcccggccccccacacccacagcttgctcttctatctccacaacgtgagcctggaagaggagaaaatgtggctcctctggagcttggcagaccacttttcggtctttgcgtgatgttccttagcccaaagacggtgagacagggctgaaatcaggtggcttctgccaccctgagccctagacccatgggtggctaaatccactggactgtgaagactataatttatttccataatttatttggagattgaggaggctttggttgcacttctttggctggtgggtaatgccaggggtggggtgggcacaggcctcaagagccccttttgccttgtagtcctacaccttgccctgcctgggctttggtgcagactaggtgtggatttgagctctgtgatctatgtctgctgcctggctcctagatggctctgcgggcaggtgctggccaaggacatcatctaggcagggggagagcctgggctgaacagctgtgaccaaaactcccttctgccccaccctgccccctccacttcctgccctctgttccatcttcccccttcccaaaggccacagcctttattccaggcccagggatgtaggagggggaaggaggaaacaggaagcccagagagggcaaagggcctacctcggggcgcgaaccatgccccagactattatctcagggctttctgggcactgcacttcagcgtggcccacctgcccatgccctgaggccagttggcgaggggtggctcctgagggtttttataccctttgtttgctaatgtttaattttgcatcataatttctacattgtccctgagtgtcagaactataatttattccatttctctctgtgtctgtgccaagaaacgcaggctctgggcctgccccttgcccaggaggccttgcagcctgtgtgcttgtgggaacaccttgtacctgagcttacaggtaccaataaagaggctttatttttagcaatgtggtatgtatttgtggggtgggaagcaggggcaaaggggatgggggacaagccctgcagaggggagtatggacacaggctgtgttgaggggtaggagtaggcacacccagcatattgggcctctttccaggcaagccagtcaagttggaggcaggaagccagctgagaggctggccaggcagatagagcagtttttcctttggagtaacctgttcctctacagtggtgacctggggtggtggggaggagcagcaccagggtcttctgacatggggctatctgctggggatgggtaagggcacccttcttcctacacacccacactgagctgaggccttgtcctgagggtgaattcaccaacctgggtggaggcagggtaagggcatgtgcctggtcaaggcctggtgatggccttacgtagcagctgtggtccctggggacttgagcaggggggcagcggaaagggcagggggaagctgcagaacctcatccctctgcaccagccagacctgtctgacctgtccctggcagctcagctgggcagcaggccagaggagtaggccacaccctgctctggggagccccagtctgggggcctgagaaaggttgacttcccccttaggaatgatagtgatttgtacaagagctggaaggaggaaccgcc

SEQ ID NO: 6577 - DNA, 691 bp, Homo sapiens
tactccctctgtgcctgggtgtcctcaatactacatgcaaacagtaacactactcacctcataaacttgtttatttcatatttacaaagcccttaaagagtgcctggaacatgcaagtcctgtgtatgtttgcaacttgcatcgattttcatgtttctgccattctttctctgaatgtttaatcctttttttgcctgtcctgtcacccttcaggtatctgtctcttgcctctggacatgcatggtcatgaccacatggccatatcagtgccattagaggactcatagtttggagtctggcctatggtgcggcagtatgtccctgtaaccagcttaactaggaataggcttctcaggttagagtaccctggtacattgagttgtcctgtctcttcttcactggtgcctagacacccttctgtagcgattacttcagcaagcacaatccaaaacctgggttcttcaagggttcccagggtcactctgattggcctggtggtctgggtggcagccctcagctccagtactctggcaggaagtcccaacaggcttccaccacatggactcagcccatggctggactgaggcctgcctactcccatctagggccacagggttcttagtttttgtttctctgtttttagataaatgaagacaatctaggttttacagcaaaaacatgattaatgtac

SEQ ID NO: 6578 - DNA, 4151 bp, Homo sapiens; identical to SEQ ID NO: 6576

SEQ ID NO: 6579 - DNA, 691 bp, Homo sapiens; identical to SEQ ID NO: 6577

SEQ ID NO: 6580 - DNA, 4151 bp, Homo sapiens; identical to SEQ ID NO: 6576

SEQ ID NO: 6581 - DNA, 691 bp, Homo sapiens; identical to SEQ ID NO: 6577

SEQ ID NO: 6582 - DNA, 4946 bp, Homo sapiens
ggggcggggcaggcggagccgtcctaccttcctacccccagactccaacccggaactaacctcggctcccttgggaaggccgcgttgcatggccaggagcagcagtctgggccgcgagtgcgggacaccgaggtcaggtctcggaaagggaggacctcctcgtccccaggggccccaggccaggtgcacccttggccgcaggtgcacggtctccggaaagtgcaggcgcccacgtcccagctggaccatggcgcctccgcggaacgtggtgaagattgccatcaagatgcgtgacgccatcccgcagctcatccagctggaccaggtcacccggctggtcccgcctccatctgccccactgccccacctcccggtagccccctggccctcggggcagcccgccccacccctccccccaggctcctccccatccctccctgcccaggccgcgagaatgaccactccacttgcaggcgaagcccctggccgctgtgctgaaggaggtgtgcgacgcgtgagtgctgccgggccagggcctgcggagggcgggagggcaggaggggcggcgccccctgccggcctcgctgagcctcgtgcccctcaggtggagcctgacgcactctgagcgttacgccctgcagtttgcggatgggcaccggagatacatcaccgagaatgtgagtcccctctccccagccccaagctcggccttccgacccctctaacccacctggccccgataactctggctcttcatcccactaccggagcgcgatctgttattcacccccagccgccctcaccgacaccccagttgatcagtcctcggagccctccctgacctcgctgccttttctgctgtcttctccagaaccgcgcggagatcaagaatggcagcatcctgtgcctcagcacggccccagtaatgcccctcccgtcccgccttccccatccctgcccctttgctccaggtccagaggccccccgccccggaggcccccgccccagccctgccttgcgccacctagttgacgcgccggggccgcacacttccaggtcccacccttaccatgcccagcctcttcacctctgctcctgctccgttcctgccaggaccttgaggctgagcagctcttgggtgggctgcagagtaacagtcctgaagggcgccgggaagccctgaggcgccttgttccgctggcctcggacatgatctttgccagggaggtcatcagccgtaatgggctccagatactaggcaccatcattgaagatggggacgagtgagcacagggatgtgtgggctgggggagatggtgggtctttctggtcctggggtggtcctgctcagccccagatgtcccccctccagcctaggagaggtgctggccctcagcctgagggccttctcagagctcatggagcacggcgtggtgtcctgggagactctgagcatcccctttgtgaggaaggtgggtgggctttcctagggcagcgggtgggggcagtggagcagtggggcagtggtagacccggtcttccatgggggtgaggtggtgacacccccgccccttacaggtggtgtgctacgtgaacatgaacctcatggatgcctccgtgcctcccctggcccttgggctgctggagagtgtgaccttgagcagcccagccctgggccagctggtcaagagcgaggtgcccctggataggctgctggtgcacctacaggtgtaagcctctggggctggggtccagatgcagggagcagggctggagcctgaatgttccactgagccctcttcttgccataggatgaaccagcagctgcaaaccaaggccatggccctgctgacagccttgctgcagggggccagccctgtggaacgcaaggtgagtgtcgatcggtggctagatgggggcagcacccggtgggcgctgccccaccctgaagcaaaatcctctaagccccccttttttttttttttgagatggagtcttgctctgtcgcccaggctggagtgcagtggtgcgatcttggctcactgcaagctctgcctcccgggttcacaccattctcctgcctcagcctcccgagtagctgggactacaggctcccgccaccacgcccagctgatttttttttttttttttttttttttaagtagagacggggtttcactgtgttagccaggttggcctccatctcctgacctcgtgatccgcccgccttggcctcccaaagtgctgggattacaggcgtgagccaccgcgcccagcctaagccccctttctttctaccccctcagcacatgcttgactatctttggcagaggaaccttcgccagttcatctataaggtaggaagtggtgggccagggggacctctctgcccctccctccccgtgagccctcgcttacaccagggactggctgtcctgcagaacatcatccacagtgcagcaccaatgggcgacgagatggctcatcacctgtacgtactgcaggctctcatgctggggctgctggagccgcgcatgcggacgcccctggacccctacagccaggtgtgtgtctttggtgaggacaaggcagggggtggcttagagcttggccttgaatctataatcttgatcccctcccccgccacccaacactgaccccaggagcagcgggagcagctgcaggtcctacgccaggctgccttcgaggtggagggggagtcctcgggtgccgggctaagtgctgaccgtcgccgttccctctgtgcccgagagttccgcaaactgggcttttctgtgagtatcacccctacccaactccccacccctgcctcagcccagggctgttgttccaggcggccgtggcccttcttgaactgcctgtgcccacttcccccagaacagcaacccagcacaggacctggagcgcgtgccccccggtctgctggccctggacaacatgttgtacttctccagaaacgcgcccagcgcgtacagccgggtcggtgacagggtagggtgggggggtggcagcatcccccaggcagggtccccatgggcttagctgtgactccttgccccattctctgcgcccccagtttgtgttggagaacagcagccgcgaggacaagcacgagtgcccctttgcccggggcagcatccagctgacggtgctgctgtgtgagctgctccgtgttggggagccctgtgagtggcctggactgggcacagcatggccaagagcaggggacggaagggcagagagggccaggggctgtatgcactttctccctgagcccctcctgcccccccactccaggctctgagacagcccaggacttctcacccatgttcttcggccaagaccagagcttccacgagctcttctgtgtgggcatccagctgttgaataagacctggaaggagatgcgggctacacaggaggacttcgacaaggtgggtggggtgggagctgggaggcctgggccagggcagggggctgatctgggtacagagcttaggccctgagctgagcttgggcggccccaggtcatgcaggtggtgcgggagcagctggcccgcactctggccctgaagcccacttccctggagctcttccgaaccaaggtgaatgcgctcacttatggggaggtgctgcggctgcggcagactgaacggctgcaccaggagggcacactggctccccctatactgtgagtctggggggatggatcctcagtcctagccctaccttccttggtgccccctgggctactccccaggtcagatgtgctcagtgacacccctctatcagggagctgcgggagaagctgaagccagagctcatgggcctgatccgccagcagcgcttgctccgcctctgtgaggggacgctcttccgcaagatcagcagccggcggcgccagggtctctgaatgggcatgggcagggggcagagggcaggcagagggcaggcagagggcggctggcttggtgtcaggacctctcagcactctggccctcttccctttctccacgcagataagctgtggttctgctgcctgtcccccaaccacaagctgctgcagtacggagacatggaggagggcgccagcccgcctaccctggagagtctgcccgagcaacgtaaggcgggcaggggcgggggccagatacctgctctccccagaccgccctgggccccggggctgccagggctgcagtgctcagcccagccttcttcctgcagtccctgtggccgacatgagggcactcctgacaggcaaggactgcccccatgtccgggagaagggctccgggaagcagaacaaggtgagtacagcgggccaggggctccttcccacccgcccccgcctaccctgtcccctgctcagtgtccccgctcccttgcttccccaggacctctatgagttggccttctcaatcagctatgaccgtggggaggaggaagcgtacctcaacttcattgccccctccaagcgggaggtgagtgtccgccaggctgaggtcggcaggtgggcaggggaggcagatgggcagaccctcacggctctgtgccacccccagttctacctgtggacagatgggctcagtgccttgctgggcagtcccatgggcagcgagcagacacggctggacctggagcagctgctgaccatggagaccaagctgcgtctgctggagctggagaacgtgcccatccccgagcggccaccccctgtgcccccaccccccaccaacttcaacttctgctatgactgcagcatcgctgaaccttgacagtgtggctggccatgggccacagctgcggccactgcagcagccatgaagggcagtgggtagaggagtgcaggcaccctgaccagcagagattgctgcagaaataaagtctgcttggctcttgggatatgttgagccagctctgta

SEQ ID NO: 6583 - DNA, 6795 bp, Homo sapiens
gcagtaacgctgctccggctgcccggcggccaggaacggaagcggaagtggcggcggcgccggcctggcctggcctggctgaggggaggcggcgggcgggcgcgatggcggaggccgggccacaggcgccgccgcccccgggcactccaagccggcacgaaaagagcctgggactgctcaccaccaagttcgtgtcccttctgcaggaggccaaggacggcgtgcttgacctcaagctggtgcggcctgggctaaggggagacaagggaggctggtggaccaggcctgggccggtagcgggaaccccgggggcggcccagctgggtcctccgagagccggccgccatcgtgtgctttctcacaggagagaagccgggggatgtttcattcattcggccgaggccatcgagctacagctatgggccaggctcgggctgcaggtgttcgtcctcgtggcccttcctggctggcgaggagaagagctgcctatgggacagagctgcggtcctgagctgcagtagcgcctgggaggcactacagggttggaatccagattactcccttcccagaccacgtctcagggtggctgggggtacaccccagagtggggctgagcattctccattctctctgccaggcagctgacaccctagctgtacgccagaagcggcggatttacgacattaccaatgttttggaaggtatcgggctaatcgagaaaaagtccaagaacagcatccagtggaagtgagtgggcatagtgggagggtagtagagtctcccacccagaagtgtcgggcgtggggtggagggtgccgaagaaggcaggggccatgggacccagagttctcagcagtccctctcagccccactccctgggctcaggggtgtggggcctggctgcaatacccgggagattgctgacaaactgattgagctcaaggcagagatcgaggagctgcagcagcgggagcaagaactagaccagcacaaggtgtgggtgcagcagagcatccggaacgtcacagaggacgtgcagaacagctgatatcctcctggcggtccctgctggggggagtgggcaaggggccctctggttcaacttgccctgagtcctgttcctcttgggagtttgtcttatagccactggccatggcccagcctcaggctccctcctcagagcccctccccttccactcttagcctgtgatccctcccccggtggacctgagtccccagaacggtctctgagggcctgtgtgtcagaccttagctaaagaattgggtcttttctgtagtctgccatctgtcaccatagggcatcagccattctccttaaccctcacactttggcctacgtcactcatgaggacatctgcagatgctttgctggtgagcagagcctgggtaggggtaagggggtgggctgggctcagccaaagtcctgagcactgggctcagtgtcttaggagagttctgtctcttaagagggtttctggggcctgctcagagaggaaccaggcagggtaagtcttctgtctgagtgtcactgggaccctgtggaggtcagctataccaaaagggtacagaaattctggagtgggtccctgggtctgttcccatctctactgtttcctggatttggcttcttgggtatgatagaggcacaagggggagagagggagagaggatatgtgtgtatttgcttgtgtgcaggctcttacatgcagggcatgggggtgcccacttccaacttgttagtttagttgcattgtgaatacaggatctgttcctttttttttctttttaagagatgggctcttgctgtgttgcccaggctggtcttgaactcctgagctcaagctgtcttccctcctcaaccccctaaagtgctgggattatgggtgtgagccactgtgccccgctgatgtgtttcttctccatcttgtatgctcctgactggtcatgggaaagggatgttggccttggctagaacaccctcacctagggatcagccatcggtagaggaatgaggtgcctgtggccagtgatctttcactccacataattgaacccagatttcctggttactgaccctgggctctcaggaagagaagagctttagctctgcctggccactatgggggatgggtgaggcccactgtctagttcctcagggaccgtgatctcctgccttgctccaaaaggcaggcacctctgttcccagctcagattgagcccatgggctctgacccattctccatgtcattctaggagataccctcttggccatccgggccccatcaggcaccagcctggaggtgcccatcccagaggtgggtgcttagcccaggcaggcggggtcagctgagggcgggtgctggctgtggagcctgataagtcctgggtggggcaagtagggggaggcctggagtttggggttatctaggaggatgggcatcctgggtgggagaggacactgtggtcctgacccggagtcgggcaggagccaagcctgcttacaattctacccatctcccatcccttaccacccatctctagggtctcaatgggcagaagaagtaccagattcacctgaagagtgtgagtggtcccattgaggttctgctggtgaacaaggaggcatggagctcaccccctgtggctgtgcctgtgccaccacctgaagatttgctccagagcccatctgctgtttctacacctccacctctgcccaagcctgccctagcccagtcccaggaagcctcacgtccaaatagtcctcagctcactcccactgctgtccctggcagtgcagaagtccagggaatggctggcccagcagctgagatcacaggtgaggcaccatgggagcttgtgacagaggcccaagaggtagtatctctgtgttgtggaacaccatgctcagagttggaagagactcttcaggttggggattgtccttttcctgaccacctagccttcccttgctatggtaatgaatgagccttttttgtttttgtttttgagacggagtctcactgtgtcccccaggctggagtgtgcaatggcgcgatcttggctcactgcaacctctgcctcccaagctcaagaaattttcctgccttagcctcctgagtagctgggattacaggcgcccaccatgcgcagctaattctcgtacttctaatagagatggggtttcaccatgttggccaggctggtttcgaactcctgacctcaaatgatctgcctgcctcggcctcctgtagtgctgggattacaggcttgaaccaccatgcctgcctgaatgggccctttttaacagggaacctctgactgtgggaagagccattgctggtggcagttttctcccccagatccacatccactggtgtctcaattgccctggtagcccgtcttgaagtatggccacagcagacatgttgaccacgagtcttcttctgtaggtcttgtgtccctgtctcctgtggtgactaatttcaggttacttcctctgggggtgactggcaatgcctaattctccttgggtctgggaaccaggcttgtggtcctcctgtgtctgggttccagcacagccagtttcaacgacctcttcctgaccttgtatgactgggtttgggggctatcattgtagtgagtggcggccctgggactgatagcaaggacagtggtgagctcagttcactcccactgggcccaacaacactggacacccggccactgcagtcttctgccctgctggacagcagcagcagcagcagcagcagcagcagcagcagcagcaacagtaacagcagcagttcgtccggacccaacccttctacctcctttgagcccatcaaggcagaccccacaggtggtgagtacctgccccctgggggcagagagagagagtctagcctcagtccagtcctaggtcagaaaacagaattggggatggaacccagatctcctgtcaaccctgctggacacgagagctctctgccagcacctctgggtcagtgctggtgccccctctagcaccccatcctaggctaacacagaactccctgccgtctctcaagccctttcctgccaccccttggagcaccgcctcactaattgacacttctctgtatcactctctctcatcttctctgtctcctttctgtctggactccttgaaaaagtaatctccattcattagtctcctagtcacctttcaggttgcagcagtcacccccccagccccagtgttacagcggtgttactcttgagaagctgccgaaggcctgccgagcccagcagcctccagcgtgttttgctggtgctctcttggtctgtgtcaatattctttcctcctttggcatcatgatgccagcttttggctctcctatctcactggcttcttgaactcttccctggcgtgtccttaaacattgctgtttttgagggctctgtcccattccactcctggagagggctgcagctctgggtgaacgaatccccagcctccgcctggcctagatcttttcccaatctgcacacttcggtgtccacctgccgtcctgtgtacatccaatggacactttattcctgcatgtcctcaactgaacttagtttcctcccgaagcttgctttccacctctgcgcacccagccgtcagccctagttatccaggcctgacccttggctctcactctagttctagttccttatccctcctccttctgctgcccaccccatgccagctaactgaggtctgtcccagatgtcccctcctatcctctggtatcctcagcactcaggatgacccctggccacctctgtcctggattcttcagcatctttctctttaccctgactgacagactaatctttctgaaatgcaggcctgacagaaaaatgtggcatttctctgtttgcaaaagtacctttaatggctccttgagggccaccagataagatctgaactcctgagcctggcatgtgaaatccctcatagtcctctctggttgcattttcttctgcttcccctgtgtcctcctggccagaggtttgtagtggagtcatcaccctgtagcgccaccacctctgcctggtgacctgacccagggtctggtctcagtcttgcacagagcaggtgctcagcaagggtgggacagatggggtaccttctgtcagacagggggtgcatgctgagcccagaaagaggcttctgtggcctttccgagttagaaaagctgtaccaatcgcttgcagggggcctttggtaccctgggctcagcactgaggaattcaggtttagcaagtgaggccaacagacagtgccagcttggcctaggcaggacctacatctccttagctgtgtggagcctcagggtgggtggtataggatccgaggaagccagggggctgtagtggggccaggctggacctctgtgccctgagcatggctttcttgtttttcagttttggaactccccaaagagctgtcagaaatctttgatcccacacgaggtaggctgctgcattcctccctgaggctaggggtaagggacacagctcattgggtcctatggctgttttcttgcccttttgaggaccttgttgtggcgcttatggtaactggggcaaagggtgaagttcctgatgggcaggtggggttccctttcctgggctttggtgggtggagaggtgggagctggaatgttagtaactgagctccctccattcccagagtgcatgagctcggagctgctggaggagttgatgtcctcagaaggtgggtggccctggaaggtgggagtgggtgtgggcaggggttgggctgctgctaggggagccctggcccagggcctgagactagtgctctctgcagtgtttgcccctctgcttcgtctttctccacccccgggagaccacgattatatctacaacctggacgagagtgaaggtgtctgtgacctctttgatgtgcctgttctcaacctctgactgacagggacatgccctgtgtggctgggacccagactgtctgacctgggggttgcctggggacctctcccacccgacccctacagagcttgagagccacagacgcctggcttctccggcctcccctcaccgcacagttctggccacagctcccgctcctgtgctggcacttctgtgctcgcagagcaggggaacaggactcagcccccatcaccgtggagccaaagtgtttgcttctccctttctgcggccttcgccagcccaggctcggctgccacccagtggcacagaaccgaggagctgccattaccccccatagggggcagtgtcttgttcctgccagcctcagtgtcttgcttctgccagctccttcccctaggagggaagggtggggtggaactgggcacatgccagcaccacttctagcttccttcgctatcccccaccccctgaccctccagctcctcctggccctctcacgtgcccacttctgctgggcctttagccctagaacctgcaggtggtgggggcggctaccaagaaggaacagaggtctctggggaggagtctgggtggtccagccctgatgattggccccacctcctgctgccccataaccctctcttcatttcggctttttcatttaccctcatttagagccatttgcagagatttagaaagatttacagtaacgaatggattcctatataaagattatttttatactttttgcagcaaaaggaaattgtaatatttgtacagtgttcaagtgaataaaaaccatgcctaaggcta

SEQ ID NO: 6584 - DNA, 9507 bp, Homo sapiens; identical to SEQ ID NO: 6198

SEQ ID NO: 6585 - DNA, 434 bp, Homo sapiens; identical to SEQ ID NO: 6199

SEQ ID NO: 6586 - DNA, 464 bp, Homo sapiens
gcaggtttaatcatgcctctccctgcctaaaaccttcccctggctcctattctggaagagtgtcgtagggcagcatgtaaaacgccacgcatgccccgcccagcctgccttttaatcttcatctctggccacactcttctagcactgcctgtctgcccagctcccgcccatgcccccccgccccgcgcagccttctgtcctgtaaccaccttccccacaatatgccatcattccccctgttaatggctctgcccttgcccactgtcctatcctggaatgactttccctcatccttctttcttctaatgacctcctattcatccctcaaaacccagtgcaaaggatcccatgatctcctgccttcaggcaaaatgactcaccttcctcctcaggccaccccagctcccactattggcgatcccatcatcctttgctaacacaccacctcctggatcacctgggct

SEQ ID NO: 6587 - DNA, 460 bp, Homo sapiens
ggttgggtgtgagggagctaacagttggccccttgctctgttctcagattcttgaggtttatttcccccttgaattgtcccaacagtcctgtgaggtggatgtcatttattacttctgcacagatgactaaacaatctcaggggagcctggtcattaattggccatgatcaaaaaggtagtgaaagcacatggcagcactttgggaggccgaggcgagcggatcacttgaggccaggagtttgagaccagcctggccaacatagtgaaaatccttctctactacaagtagaaaaaattagccgggcgtggtaatgcatggccgtaatcccagctactcgggaggctgaggcacgagaatcacttgaaccaacccaggaggcagaggttgcaatgagccgagatcgcgccactgcactctagcctgggtgacagggcgagagactctatctcaaaaaaaaa

SEQ ID NO: 6588 - DNA, 1266 bp, Homo sapiens
gattctttaacaaaatagggacaatgacaaggttactggtagcccttttattctcctcatttttaaagctgagagaggtggaatccattagtaagataaaaaacaaaatgtcaaaaagacaagacttaagaacaggttgggcatgctccaacatgacagcatgcacactttggggaaaaatttattggtctagccaggtgtgagcctccattccttaatgtgccagctggactccccttaccaaatcttggccccaagagtttgtttccagtcagtgggctttgctatactgacagacatgttccatacaggagcttctgatgggcaaacagtgggtgatacagtcacactcactaccttctacctcctgtcttctctcaatgccagtgacctaccaccatgctgcccagaaccttcccatcaggcaaataaaaacctgcatatttgtcacacactttgggtctatatagaccattaacaaagtgatgaaaacatctggtgctaaatgacagcatgatgtggcatctcttgcctggcccagccaaggatcagagagttaacaggacttggtaaatagcttctctcatctttctctctctgccctaagcaagtaaaactaaaaaccacaacaataaataaactcataacaccctcagtttcttcctcttttttttttttaccatctgatagatgtcaggacagatgttgtccacaacacacttgccaacaaccatttcagtgcttcctgacatatgtttaagaaagatggctgctgtataacggattttacttaaatgccgataagcaaccttccataacattgttcagcgaagataaaagataatgccacttctgtccattctggtgcccatgtcaacatgatcactaattcaaatttttagggatcaaaaaagtcaacaccaagcttatataaatagcttttaccatctggttgctcaccttgactgtaggaagcagagtcctatcaattcttttctactaggaaaaaggtgtctcatcatagagaggaaggggaggaataataaaagaaaaacaatttgtaatagcatgctatcccttttttcctgttgacaggaaatcaagttctcagcttgttaattaagttaaaaatacagaagtttcctggttattctctcatcagtttcagagtgttcatgactttgaagtaggtctcaccggtgagtgcttaaacattgaactaatgagattttactgttttgaacagctggtcaagtttggaggccc

SEQ ID NO: 6589 - DNA, 853 bp, Homo sapiens
ggacaatttactttgttttgctaagtttacatgtccaatcggtgacagggccagaaagagaatctaggcctgcttcccagcaacagtgtagatgtgaaggtaaggtgaaccacctgtgtcccttgaattgcatgcttatccattgtctataaggcagctttatctggcagtgaaattatgtgtcatttctggtgggtggctgggcctgccatagcaaattaccacaaacagaaatgtattctcttatataattctggaggcaaagtctgaaatcaaagcatcagcagggccatgctctctctgaaggctttagagaagtatccttccttgctgcttcctagtttctggtggttgccagcaatccttggcattcctggacttgcagatgcatcactgcaatctctgccttagtatccacatgaaatttttcctgtgtgtctgtctgtgtccagattgtcttctttttatgggggccattcattggattagggtcttccctaatgcaatatggcctcatcttaatgtgattacatctacaaaaatactgtttcaggccgggcctggtggctgaagcctgtaatcccagcgctttgggaggctgagacgggcggatcacgagatcaagagatcgagaccatcctggtcaacatggtgaaaccccgtctctagtaaacatacaaaaatcagctgggcgtggtggcacatgcctgtagtctcagctacttgggaggctgaggcatgagaatcgcttgaacccgggggcagaggttgcagtgagccgagatcgcaccattgctctctagcctggcgacagagcaagactgcgtctcaaaaaaaaaaaaaaaaaaaaaaa

SEQ ID NO: 6590 - DNA, 216 bp, Homo sapiens
ttttcttcactggtgaaaactattcacgtacctcaaagccttttaatacaatgtagcctgatttcagagtcattatgtggtcatttcaacatatgacggacatgagttaatctagcactaattaaaattaatatgtagttattccaattcaaggtttatggtttatgcgttgctatatataatcctgtgtaattaatgtgtgtgtttcctctatcc

SEQ ID NO: 6591 - DNA, 48037 bp, Homo sapiens
gaggagatccgctcacacacacgaggaggagggttgagctgccgccgccgccgcctctgtcgtcgtcgcgagtgtggagtcgggactggagctgctgccgcggcgacgccggggatctttgtcgctagctcccggcccttctgccccgccgccttccctcagtcagcgttgcccactcctctccggccgggcgcccctgcctccatttcccgctctctgtccaccacacacacggcccccccgatcatggatccgggcagtggcggcggcggcggcggcggcggcggcggcgggagcagcagcggcagcagcagcagcgactcggcgcctgactgctgggaccaggcggacatggaagcccccgggccgggcccttgcggcggcggcggctccctggcggcggcggccgaggcccagcgggagaacctcagcgcggccttcagccggcaactcaacgtcaacgccaagcccttcgtgcccaacgtccacgccgccgagttcgtgccgtccttcctgcggggcccggcagcgccgccacccccagctggcggcgcccccaataaccacggagccggcagcggcgcgggaggccgtgcgggtaaaggcccgggacgcgggaggaagtccggccgggcgccggagcccacatggcgtaggggtgcggtccgggggcgcgcggccctggggcccggtcggcacgtggggcgctgacagtggcgccgtctgcctgggtggggcgccccgagcccgggagccggccttcgcggggcggcccgcggcggtggccgggcggggagcggacagcgggcagcgcgcccaaagacccggacccgagtgccgcccctccgcgcccctgccctgctctggagtccgcagttacccacttgagatgggaaccgtatggaacggagtgggggccgcggcggatccctgccacgaggcgcagaatgaggacagatggagccaggagtcatttgggtgggcgtttagagatcccaggagttggggaggacgaatggccgagttttcctttcaccttaggcccagccgagagagcgtcttctgctgcgttttctactattgaaactgtaattacggtttaaactgtccgtggcccccaaccgtcctgaaggaatcccaagatgcattgcagccttgtgatcgggcagaaacttggctatcaataccaagatctgttttacccttagcattgtgtacgcttctaaagtttacaaagtgccacaaagttaggattcctcacttaatgtgtgataggagactatattgatttgtgtctttttaaagtgaagcttacacttttatcctttgtcagcgacacgtttagagaattttcattgctgtaaaatcgttgaccttattcagattgcttggaataactcactgtgttcgtgcatcagtagttcagtctatttcttcagacacttgagcatttgttataatttaatagttctcacgtgtctttctgaccgtagctagtagacatacattttctaatccataaaatttcgagttaactttggtttttaaacatcttcccgtacttaggggttgcttaagtcgtaggtagcatgcttgcaggtgctgacgttgtaggaatatccggtgagtgaacttatgtattctcataatggtgcttattttgtggtaggtagcttgctttcaggtactgattttgtgggaatgtcaaatgagtgaacttaagtattctcttcctaatggtgcttattttaggaactatcagtgtttccttaaagagaaaatgaaaaaggaaggaaaaggctgaacgtcctttcatcatttagccaggacgttagtggggtgggtcatgacatccagcgcattttaagtgagaacatattgttgatttctctctttaaagttctgtattgtggtggttcttagataagtggacattataaaagtgctccaggagtttggtttctacagaaacttttgtcaccgtttgctctttcgtggtaaagggatagtgtctggagaaacactctgatgacgtatgtacgtcagcacggttgatttggtggttttgttgacagtggcatttatttgtgtgggtggttgatgttttcttttgaggagatcgagcactttcagggtggtacggctctagacaatgttttcctcttgaataaggaagcttagcttgtaattcttgacttacatcaagccattttgactgcctaacctagttcacttctcagctcctaaaagtgcccattccctaccttactttgcagattccgtttatccagccattttctttcttggctcttcctcctttctgtggagccaccagcaccactctgactagactcaggactccatttacagcctgtccagcgagtcatccggggataaccaaccttggtctagaatggtcactgttggtgactaggtattacctcttatgcgggctttctctcttcctgatagttgctaatttgtagttacacctaatctttttctctttgacagtgctagaaattggagatgcgaaaacctgtagggaagtagctgtcagtaagagaatccgtacagcatggtcaactttcttgtttttaatcaaaaaactattttggtgttaccgactttaccaattgcttgtaccaaaatgccagttcatgtttttaaaaaattatcctatgtaggatgtctatttggaaaagaactgattttctaagttgaggtccagggttatattgagactgttggattgcatgttccagactattaagtccataaaaagccagcatcggagaacaatcagtgcttataaaaagcagggggataaataggaaataacacctggattggaacttacaaagggggaaccaaaaagtttgcaaggtttttttgatagcgaggaagtggacaatagggctagcatgttctgttctttagttaagccatagccgaaatttgtgctgggtgtgtttttaaactgcatgccgggaaagctgttgaaggagcctggagagtcagaccttgggattcagtattgaccttggatctctttgaaaactaaagaatataggttccttaagaaataattaagtggaacccatttaagtgtaattaagtgtaattcatttaagcacagttctctagagccaagtaaattggccaagagattctccttaaaaagtgaggtccccaagtgaataaaaatatagaagacaaggcttaatgtatattagaacaagcattttatctgataggatgtatttaagttgcaatttgcacctagttttttttattgttagataagaaactggtttagtaattttagggttacttgaactttttagaacagccagagcttctaaagtaatgatgtggtgttctttgcatcatcccacctttaatgcttctcagaactcactgccattaagaaacaagcatggaataaaaccagcagccctcagtacttacttggaggaggcactgtctccaaaacttagcagattgtattgtggaacttgaattttaaagagaaacattctgttttgtagtgttccgtatttgctgaatgccttatttattggaagaggagggtttttttttgttttttttttttttttgagacggagtcttgctctgttgcccaggctggagtgcaatggcacgatctcggctgactacaacctcctcctcccaggttcaagcaattctcctgcctcagcctcccgagtagctgggattacaggcacctgccatcatgcccagctattttgtgtgtgtgtgtttttgcagggatggggtttcaccatgttggctaggctggtcttgaactcttgacctcaggtgatctgcccgccttggcctcccaaagtgccgggattacaggtgtgagccaccgcgcctggccttttttttttttttttttaaatgattgacatttaacttacacactgtaaaattcacccttttcaactgtacaagctgggcgcattggctcacacttataaacccaacactctgggaggctgaggtgagaggattgcctgaggcctccataaaacatagtgagactgagaccctgtctccacaaaaaaaaaaaaaaaaaaaaatacagctgggtgcagtggctcatgcctgtaatcccagcactttgggaggccgaggtggacggatcacctgaggtcaggagttcgagaccagcctggccaacgtggcgaaacctgtctctattaaaaatataaaaattagccaggcatggtggtgcgcgcccgtagtcccagctactggggaggctgaggcaggagaatcacttgaatctgggaggcggaggttgcagtgagccgagatcacaccactgcactctagcctgggcgacattgacactctgtctcaaaaaaaaaaaaaaaaaaaatagctgggtgtggtggcacaaacctgtagtcccagctacttgggaggttgaggtgggaggatctcttgagcccaggagctggaggctgcagtgagctatgatggcaccattgcactcagcctgggtgaccaaatgagacactgtccaaaaagaaaagtaaagtgtacatacagttcagtggcttttaatatatttgtaaggttatgcaaccatcaccacttggcagatgctttttagaatattctcagttttaagctggaacatctcagaagtgacctcttcagggccaccagagtagagaggattccaaatcaaagtaatggttgtttaatccagaaaggcccttacactttattaatatgttaaattctatctgttgaggtagataataggtaagattctgtatttgagaatgtgtttttgagactgaagtgcctgcaagaacagtgctcatataaaggtgtttttaggcttcagtgggacagcagatggggtagaggagaggccccacagtatccctggagtatcacagtagtaaacactgcctttcgttacttctcctgccatggctgacctttttgtctcttgtttcatggttttacacgtatgaatggcttgagactgaggatttagggaagaagcgaaggcatcatctagggctgtgctgtgccaagttgagcagttgtttaaactgttagaatttttgactggtgtaaaaaccctctttggagcaggtattacgtagtgctgtcagtacatatcttattgcattcttctgttctttattttttaccttttctgaagttgcacagcgtgaaaagacagcaatttcagtttgaacaagttaaggaagtaatgtagacgacaaagtttaagccttgatttgcttgctttggtttgctggggaagaaatgtctgaaagtgttcagatagtattttctttctggttgaagagaaaggaatgaaaaagagatttgataaccttctgggttgagttagcagtattggaatggaatttttttccagaaatgcgaatttctggttttgctcagatatatgtactagcgactcattaacaaacatttactagtccactgaatgaaagatgctatgctaggcacttgaaataacaccaagatgaataaattgtggtcctgaaggaatctagaaagggatcagatgcccagtgtactctagtggaagtcacagtgtggtaagtgagccctgcagagagtgtagagaaggctttcaaagccgagaacagcaatcccttacgtaaaacctctcagtcttgtcactctcataaaactaaagatttatctattatctgctcactgttctttgcgaatgccttgtgtgtatttttttttctggcctcctgggccagagttgcagccaaagcctgatcaccaaggttgtgtgtattttaaaaaactttttacttattattttttagagacgggatcttactttgtcacccaagctggagtataattgtgtgattatagctcatcgtaacttcaaatccctgggctcaagtgatctttcacctcagcttcctgagtagctaggactataggcacccaccacgacgcctggctaagtttttttgtttgtttttgttttttgagatggagtttcgctctgtcacaggctggagtgcagtggccctaactcggctcaccgtaacctctgcctccccaggttcaagcgattgttctgcctcagcttcccaagtagctgagattacaggtgcccgccaccacgcccagctaatttttgtatttttagtagagatgaggtttcaccatgttgcccaggctggtctcgaactcttgacctcaagtgatccacccgtctcggcctcccaaaatgctgggattacaggcgagagccactgtgcctggccaagttttgtatttttaagtttgtcgagagtgctgaaggtagagcactggttatctttttacagtacttgtctatttcgtattaaacagcagtgagttcagttactatgagtctggctagtgtgtctattggggcatgtttagaatttcatcattctacccttggttttaaaatatcttcgggagacaagaatttggctactagttgaaggatctgaggtcctcagaacaatcaagaaaactgacagtttttagctgttgattgttgattcatttcaaggcttagaagtttctgccttgttttcagtagagtttaacaaagtgagccgagactgtagatttatatggctccttcgtaaatggctttgttctaaggaaacctagttgttacagtactctaagttgaaccagtttcccatcataattctactttcaaagagagaagaacacttaataaggctttcccgagcacctgacctaacagtggtgacactcacttccaaaccacattcccactaggtaattgtatgtcgcttcacttgaaaaaaaaaaagcgcattctgcagaatgtcactgggtaatttcctggttgaatatttctgtagaactccagtatgttaccatactacttgtccattgcctttaggtggttaattttggtagcagaaaaatgtttcggttatttttttatttttgacatggagtctccctttgttgccccggctgcagtgcaatggcgtgatctcggctcactgcaacctccacctcccgggttcaagcgattctcctgcctcagtctcctgagtagctgggatgacaggtgcgcaccgccatgcctggctaatttttgtatttttttttttttttttttttttttttttttttttgagacggagtctcgctctgtcgcccaggctggagtgcagtggcgggatctcggctcactgcaagctccgcctcccgggttcacgccattctcccgcctcagtctcccaagtagctgggactacaggcgcccgccactacgcccggctaattttttgtatttttagtagagacggggtttcaccgttttagccgggatggtctcgatctcctgacctcgtgatccgcccgcctcggcctcccaaagtgctgggattacaggcgtgagccaccgcgcccggcctaatttttgtatttttagtagagacagggtttcaccatgttggccaggatggtcttggtggctactgacctcaagtgagccacccacctcggcctcccaaagtgctgggattacaggtgtgagccaccgcacccggctgtttctgttatttttgtacttttttgagggtatctgaaatggttttggtttgtgtattttaaatgttatttaaatggttttttgtttcttttttgtttttgagatgaatctctctatgtcgcccaggctggagtgcactggcacgatcttggctcactgcaacctctgccttcctggttcaagcgattctcctgcctcagcctcccaggtagctgggattacacgtgtgcaccaccatccccagctaatttttgtatttttagtagagacggggctttgccatgctggccaggctggtctcgcactcctgacctcaagtgatctgcccacttcagcctcccaaagtgctgggattacatgtgtgagccaccgcgcctggcctcaaattgtttttgaagtagttaggttgtagctcataagactgtctttcagggttgtttgaaaaacataatggaattttagttactctatgcaaagtctgatcaggttgataatgtggcattgcttttgtgtccgaataaagaggttcttagaatgttagcgctggatacgaccctagcagttgtacagcctcttcattttcagataaaggaactggagccttagaaatgctaagtaaatgcctaaggtcactcacagagttaatgacaccattgagtctagaatgcagatttgctacctgctagtttagtgcttgatctgccacatcatgctgtttaataacagggggcgggaagggcatgcctggagctaattactacaactagcgtgtagttttctgagagtggccctggcatttgcctaatgtttcattcttaaaggtttttgaaattattttggggctttgaagtgcttgctgtaataaatttattgagcatttaccaccccttatcagttatttagtcttcacaacattctcttgaggttaggtactgttgacccattttacagatgagaaaataaaggctcagtaaagctaaataacttaggtcagtcatatccatgagaggagtgaggcttggaatcgaggtcatttcaaagtttattctagtagtgactgctagtgctttccttgtgattttgtattaaagtagactgagactctccagaaactggacctgtgagcttggaccatggcatttctctgtgttctgtctcagtagtagcagaatgacatttgtcataagtaggcagtgctctgatttaaagcaatattttgaaattacttctttttacattttagcaagtgttgatgtaaaatactttaaaacagctctgttcaccactgtctgtaccgagcctttttatttttagagtgttaggtaattaaggcaaaaccatccacattgttttatgtgttctgtagacttctttctggtgtttgcttttactgtttttcagtattgtctacgggagaaaaaaagaaaaacctcagcttgcaaatttttgttcagagatgggatcgttctttgttgttggagggatttacattaaaaaaattcaagaaatattgtctcatgtgatcttaccagataagtgcctattattaagacttgttggctgctggatttattatcttagcctaattttctttctgagttaaatgaatcttgcttttttatcgttaccaccctggcataatccaatgggaatatagtatgaaccacatagttaatttaaaattttctttctttaattttgttttttgagacagggtctcacattgttgcccaggctggagttcattggcacaatcatagctcactgtggcctcaacctcctgggcttaagtgattcttctgcctcagcctcctaaatagctgggactacagttgtatgcctccacgcctggctcatttttacatttttttttgtagagacagagcatcactgtgttgccctggctggtcttgaactcttggcctcaagcaaccctcttagcttggcctcccaaagtgctgggtttataggcgggaaccaccacagctggcccaacatctcctgagtgtagtgtttccctaaccccttcttagaaagttggcacatttaaaattgttttcactctcttgagccctaatggaaatgcaatgaatgtacagatggaggctaggggtcctggtcagaaaagggaagtgaggccagttgtggtggctcatgcctgaacccaggaggtggaggttgcagtgagcccagattgtgccactgcactccagcctgggcgacagagtgagactccatttcaaaaagaaaaaagaaaagtgaaaaaatgaagtgatgtgactggaaggaaccagtgtgaaaatcaaaggaaaacacagtaattcagtaaaaattgattgtgtatttattctatacaatacatcatgccaacttgttgagactactgaagtagagaaaaaagtcatccacccacagttcattctggaagtctacaatctagggaacaagaactaagatacatgtgtacctataatttatttatttatttacttacttatttttgagacagagtctcgctcttgtcgcccaggctggagtgcagtgactcagtgatctcagctcactgcaacctccacctccccggttcaagccattctcccgccacagcctcctgagtagctgggattacaggtgtgtgccagcagacccagctaatttttaattttttagtagagacggggtttcaccacgttggccaggctggtctcaaattcctgacctcaagttatctgcccgccttggcctcccaaagtgctgggattacaggtacaggtgtgagccactgcacctggtccccatgtgtgcctctaatttaaagaggtgtcatgtcctaggggagtgatcattagcccttcagggtaggggatggacagggaatgggatagaaatgggggattaggtaggcaagtgtgtactacaattaaggagaatccttgagctagaactgttatccaaagtgtaatcgagaaccacatgtggctatttaaatttattaaaattaaatttaaaattcaattcctcagtcataatagccatgtttccagcgcttaataaccacatgtggctggtgactatcatgtcacagcacagatataaaacatttccatcactacagaaacttggacagaattttgtcacacatatttcttactttcatgcaatgtgagacacttctgtgacagatccgaagttgtatttttctttaatgaacacccatttggctaacaaaactacagtttcactcaggatgcctgtgttttgttgttattgtttgatacagggtcttactctgtcacccaggctggagtgcagtggtgtgatcaccgctcactgcagcctccacctcccaggttccagtgattctcctgcgtgggactacaggcctgtgccactatacccggctgatttttaaattttttgtaaggacgaagtctccttgtgtttcccaagctggtctcaaactcctggcctcaagtgatcctcctgccttgcttcccagagtgttggttttacaggcatgagccactacacccggcttgaagattagttttgtatctaaagcagtatgaatttaaattgctgatttatgaaatacatgcatcaagcactttttaagacttagccaaacatttgtgtttaaaacatgtaacttgaatcaaaacgtagctttttttttttacctgccatgatgtctgtggccttgactgacgtatgctgtgaggatatgctggccaagtaggattctccatattcaagtcctttgacccatgatcatagctttaaaaaaaaattgtacactcttttaaaaaattgaagcaaaatccacataacataaaactggccgggcgcagtggctcacgcttgtaatcccagcactttaggaggccaaggcgggcggatcacaaggtcaggagatcgagaccatcctggccaacatggtgaaaccccatctctactaaaaatacaaaaaattacccaggcgtggtggcgcgcgcctgtagtcccagctactcgggaggctgaggcaggggaatcgcttgaacccaggagtcggaggttgcagtgagccgagattgcaccactgcactccagcctggcaacagagcaagactcaaaataaataaataaaataaaataaaataaaatgagtcaggaatgatgttggtgttgaggttggcatacgtatcaaggacagtaactaccatggctcccgaagtgttgccaaaacctcagatgtgtggccttctggccaagcgtctgcgatttcaatgtttggagcattcatggtgtccctgggggttgcagctttgtatgagtttggtgtgggtgaaccaagaaagaaggcatatgcagatttctgcagaaattatgagattttgagcagatgaggaaggctggtatctttcagtttaaagtaatcttggaatataaagaatttcttcaggttgaattacctagaagtttgtcactgactcgtgttcctgaactacgacacatgaatatgtgggctaatagttcgtcttgataaacaattaacaaacaaataaataaagccattttaaagtgaacaattcagtggcatttagtacattcacactgtgttgtacaaccagcaattctatgtagttctaaaacatttccttttttttggagacagggtctcacaccgtggtccaggttggagtgcagtggtgcgatcttggttcactgcagcctccctccacctcccgggttcaagtgatcctcccacctcagcctcccaagtagctggcactacagacatgtgctaccacacccagctaatttttattttatttaatttttttgagacagagtctcactgttatgcccaggctggagtgcagtggtgcaatctcggctcactgcaacctccgcctcgcaggttcaagattgccagattctcctggctcagcctcctgagtatctgggattataggcacctgtcatcaccctggctaattcttgtattttagtagagacggggtttcaccatgttggccaggctggtctcaaactcctgacctcatgtggtccgtctgcctcagcctcccaaagtgctgggattatagtcatgagccaccgtgcctggcttgaaactggattgatagttaaaatttgattatggtgaagcaacacaaacaccacatattctatgattccattgacatgaagtattcagaagaggtaaatccacagagacagaaaacagacatactgttggctgccagaagctaggagagagtatgggcagtaactgctaaatgaatacgggtttccttttggggtgattaaaatgtcttggaagccgggcgcggtggctcacacgtgtaatcccagcactttgggaggctgaggtgggtggattgcttgagctcaggagttggagaccagtctggggaacctattgaaacaccatctctataaaaaatttaaggccaggtgtggtggctcatgactgtaatcccgggactttgggaggctgaggcaggcagatcacatgaggtcaggagtttgagaccagcctggcaacatcgtgaaacccccgtctctactaaaactacaaaaattagctgggtgtggtggcacacgcctatagtcccagctactcgggacttaaagcaggagaatcgcttgaacccaggaggtggaggttgcagtgagccgagactgcgatagtgcactccaacctgggcgacagagcgagactccatctcttaaaaaaaaaaaaaagatccagttccagtttatcatgtgtatcacaggcagtactggtgttctgctgttctctggtaaagtcttcacttcatgttttaaaatttgtggtaatgtaccaagtaccacagtcaagtcattaatcttcctttattataaattatactattagttttgcctctttttttttttttttttttttgagacagagtcctgctctgtctgtttttgagacagagtcgtgtcacccaggctggagtgcagtggtgcgatctcggctcactgccagctccacctcccgggttcatgccattctcctgccttggcctcccgagtagctgggattacaggtgcccgccaccaagcccggctaattttttgtatttttagtagagacagggtttcaccatgttagccaggatggtctcgatctcctgaccttgtgatccacccgcctcggcctcccaaagtgctgggattataggcatgagccaccgtgcctggcttttttttttttaagatggagtttcgctcttgttgcccaggctggagtgcgatggtgcaatctcagctcactgcaacctctgcctcccgggtagcttcctgcctcagcctcccaagtagctgggattacaggcacaagacaccgtgcccggcaaatttttgtgtttttagtagagttggggtttcctcatattagtcagactggtctcaaactcctgacctcaggtgatccgcccgcctccacctccagaagtgctgggattacagatgtgagccaccatgcccagcctagtttttcctcttttttttttgagacagggtctcactctttcacccaggctagagtgcggtggtgcaatcttggctcactgcgacctctgctacctgggctcaagcgattctcctgcctcagtttcctgagtagctgggactacaagcatgagccaccatgtctagcctaattcatatatatatatatatatttttgtgtgtggagatggggtttcaccatgttgcccaggctggtctcaaacttagtttttccttgtaatttggggcatggcagttgcactcagtggtaaaccctgaaagctttcccacttagaaaaaattgttccatttttaaatagttaataaaggtgtgtttctaaacatagagataacactggaaaatttgaaactgtaatttcattccttgagagggttctaacttcctttactagcagctgtgaaccatgtaggatgtgagaaattacaccctaatcatctatttcctagccatgaacagttcaacctcggaaaattctaagcccaggctcattagtagccagtaaaatctggatgttatgtgagtcatgaataagaccagagtagaatgaacaagtaaaggtttactgtgtatgtatgaagatagggtagaaatatatcggttttatttttattttttgagacagggtgtcactctctcgcccaggctggagtgcagtggtgtagtcaggactcattgcaaccttgaccctcccaggctcagcccccggagcagctgggactgcaggcgcatgccgccattcccgacagttttttgttttttgttttttgtttttctttttttggtacaggtggggttttgccatgttgcccaggctggtctcaaactcttgccatcctcccaccttggactcccagaggtttaggactacaggtgtgagccaccatgcccaacccatttgcaacttacaatccattgtaagttgaggagccatctgtattgtaaatctaatagttggtgccaggaactaagtggtcaggtgtaagtactgttttgttttgaaaagctgttacagttagtgatacacttgagagtggtgaggaagcccaccacacccgtcattttcctgccttaagatacgcagtacatcataactgtgtgtccgtcagagcttagtttacttgtacactgattttcagcagggactatctgaggaaggggaagatggcacttgcataacttggaaatgcctgcagttgattctgatgtgcctgtatgttagatggtagtgattacaggatctgtttcctaaggcttttggtgggaatgagctagcagtcggcacttagggctcaataaaaattagttaaagcaaattgctaccccctccatcccccactccctacacaatatggatttgtgagtacttttatccttgtctggcccataatagatactcaatacatatatatatgtattcatttttattaatttttttttttttgagacggagtttcattcttgtccaagctggagtgcagtgacgtgatcttggctcactgcaacctccacctcccgggttcaagcgattctcctgccttggcctcccgagtagctgggattacaggtgtatgccacacccagctaattgttttgtattttcagtagagacagggttttgccatgttggccgggttggtcttgaactcccgaactcaaatgatccccccgcttccgcctcccaaagtgttgggattacaggtgtgagccaccgtgcctggctgatactcaatacatattgataggattgagttggagtagttacatagcagatggagacacatttgttgaatacgccaggagttctttaactgacactaaacaaattattctcccatttcctcccataaactcctcaacaatcctctcaggtagatggtatatcatttccacaatttcagtggaataagtgcatgcacagcttgtaataagccaggagttaaacctaggagtcagctcagttccaggctctgagaagtaccccatgcagtcacctccttcttagggtggcctgtgaacttgatactctcagtactacctggcttcctctgaaaactgagtaatttttccttaccttatccttaaacttttcttgaaaatggaaaagcaaaaaaaagttaatctgtattgtgttgaagtacagtttctgcctccttccaaaccaggttcaaatgcgtttcccccctgtttgttaatgtcctgctcatcccacagcttggggtcatcttagaccttttactctccctttctcccaactcctgtcaggtgtagcccccatcccctcctagttgtattgcttggttgtctccatggcatgctttcttgcagtggtgatgtgggtcttcctgcctgtggggtcttgcccactctagttcatgtagtttaagctgcaagaaaaagatcttcctaagtgacagtctgagcctgtcacttaaaaaaaaaaaagaaaacaatttggttgtcctttacctatcagggacaggaaattactttactcaacatttgatgctattgaaggttgggcccaaaacactttctcttgactcttacaggtattgatccttttcgggcaatgattttacaggttacaaattcattattttttcatacttgctgtgcatgattcatatgatttaattctttagtatcgttttctgtcgtggagattctttaaagcaggggcacgttcatattggagtataatttaggtttgtctgtatctgacaaactaaaatccaaaaagcagacttagatatttggttattagtatgtatttctcctacatctcttccagtaatgtcataagtaaatttgcagtgtggcaactggaaactggattgttgcttggttttagagttctagtataggaaaaaactggcatcattggaatcaccttttctgcagatatttttaatggcttatatatgtttcaggactttatacacatgtcatttatcttataggtatctaatttattcagggattttgataacatgagtatggaatattaaaaagggctaatcacaggctggatgcggtggctcaagcctgtaatcccagcactttgggaggccgaggtgggcagaacacctgaggtcgtagttcaaaaccagcctgaccaacgtggcgaaaccccatctctactaaaaatacaaaattagccgggcatggtggcatgcacctgtgatcccaggtactcaggaggctgaggcaggagaatcgcttgaaccggggagatggaggttgcggtaagccaagatcgtgccattgcactccaactccagcctgggcaacaagagtgaaactcagtctcaaaaaaaaaaaaaaaaaaaaagggctaatcacagctttcttgggctgggttacctagagagaatcacgggaagtagatgtgtatttgttgagcacatctctaatttgatctgtgctgagctgcaaattactttgacagtatctgtgaagaaaaggtttataaagcaaatcaaaagaataagcatgtttttatgaatacattgaaactactgaaaatgtttcaaaattggctgtaattagtagaattttgaaaagtaggttaagcagagacttctaacttgaaggcctgagttagctgccattgatctggggttattgattgaggcttgtgtcgtgttattgaacttctgtttttactgcatattaaaagataagtgaaatggatggataagtatcaatttttaatagaacttctttctgttaaacagcacctgtggaatcctctcaagaggaacagtcattgtgtgaaggtaatgatgtactctttgaaagtctacttgagaaaacattaggttgtctatatggtgtgtaaagctagatactgtttggtaaatatatattatatttcaatctcttgtctaggttcaaattcagctgttagcatggaactttcagaacctattggtaagaaaatttctgaccatattaatacagtaatatgaaactctttcactctcaagatttaaggtgcattatgtaagttacgattattgtaatgcctacatttaagacacattgagtctttgctattagtatttagaaagtagaacaaactaggcactaacactgccttgataaacttaatgattgcaaataaaattgagtggaggaatggtcaagtcaatttaaatacctgtacctgttctgttttctttttttgagacggagtcttgctctgtcgcccaggctggagtgtagtggtgcaatcttgggtcactgcaacctccgcctcccaggttcaagcgcttctcctgcctcagcttcttgagtagctgggattacaggcgcacaccaccacaactggcaaatttttgtatttttagtagaggcggggtttcaccatgttgatcaggatggtctcgaactcctgacctcgtgatccacccacctcggcctccgaaagtgctgggattacaggtgtgagccaccatgctcggccacacgttctgttttcttggtgaaaaatgttcttcctttttataactttattcttaagggtttcacgttctcagcgtgattaaagttgatgccaaagttttattagtttaagaggaaaaagaaaatatttcctaaatcctttcatatttctcgtgtgtcacgattttaaactttcctttttttcttactatcagggtgtctcaacactggaataactaggctgttgggaatgttagaactcttgtttgcattttgtttgccattatgaaaatgaagctttgctaaaatagcaatctcagcctgtgagtcagtgccctctgatgtgataccagcagtgagtctgccttgaaagctgtcacccatttctgctatgaaagaggttttcctgcttatgtgtcactaggcattaggaaatggaactacatatgcaaacttccatttgttgttttaaagctagtgtattttaaagtatagattgtaagtctttttcagaatactaagttaaaatgtctttcttcagtagaaaatggagagacagaaatgtctccagaagaatcatgggagcacaaagaagaaataagtgaagcagagccagggggtggttccttgggagatggaaggccgccagaggaaagtgcccatgaaatgatggaggaggaagaggaaatcccaaaacctaagtctgtggttgcaccgccaggtgctcctaagaaagagcatgtaaatgtagtattcattgggcacgtaggtaagctgctctcatagcaattaaagttactggatacataaaacatagaacatcctttttagctacctggagatgtttagtgaaactgaagcaaattaattgaaaatgtcttgatttttaacttgctgattttttttagctggcaaaaaattgcaagtacttttttcctgaagtttaggcaaatgaataattctgtaacggcatagatgctggaagaaaaacttcagtatattgtacgtaacatataattagtctattgaccattgatggtagttcagcatagtattatatatcagtatcttagaaaatgtgcccttttttatgtgaacctcagttaacttgttaattttaatgggattgaccttaccagataattttgtgtgaagcaggaaatcaataatttggagtaacttctggatgcttgccaggttgctggtttagcaaaaaacaaaagaacaaatttatttaatttactcagatattctctaattatctggcctatccccagaattgtgagaaaaaaaatacagaattatgtgtctttcatttcagctatctctgccttccccccagatatgaaacactgtaccccttcttttagtagcaagaactcttttgaaagtgtaaaggagcggctgggcactgtggctggcgcctgtaatcccagcactttgggaggccaaggcgggcacatcacgaggtcaggagttcaagaccagcctggccaacatggtgaaaccccgtctctactaaaaatacaaaaattagccaggtgtggtggcatgagcctgtaatcccagctactccggaggctgaggcaggagaattgcttgaacccagaaggtggaggttgcagtgaggtgagatcgcaccactgcactccagctctgggcaacggagcaagattccgtctcggggggaaaaaaaggtgtaaaggagcacatacctcatttgctgtaagtgaaaggaaaagcacctgaatctagttcacagttcttcagctgcttttgctcttggaaacttctcttggggaatttacagtctgttgccgctgtgctttcggagtaatctgttaaaaaattctttatcagtaaagtgtttttaagtggttttttttttttttttgagatggagtttcactcttgtcgcccaggctggagtgcaatggcgtgatttcagcttagtgcaacctctgcttcccgagttcacgcgattctcctgcctcagcttcccaagtagctgggattacaggcggccgccaccacgcctagctaatttttgtatttttagtagaaacggggtttcaccatgttggccaggctggtctcgaactcctgacctgaggtcatccgccctcgctggcctcccaaagtgctggaattacaggcgtgagcaccgagcccagccttgaggctcattttcaaaaggagaagggtaatgaactaggatttatgccccaaattcatatggaagatttaattatgtatgttaaagggtgctgttgtttgcatatttagccattggtttttggttttaacctatggtttgcatgttgatgttacttttagatgctggcaagtcaaccattggaggacaaataatgtaagtctgtatcttttgttaaataacagagttaaattgatgtaatgaattttaggcattgtaaaccttcatacagtcacacaaaggagataaaacaggtcccccaaagaaaaattaaaaataaaattactgggacacaatactgatgttaagaagtgatttttggcctggtgtggtggaacacacctataatcccagcattttgagaggctaaggtgggaggatcactggacttgaggtctggagtttgaaaccagcctgggcaagacaatgagactctgtctctactttaatttttttaaaagtagtagtttttgtaatgtgattattactagtgttaaatgtgtttctgaaagctttttacattttttaaaaataaaaaatgaacacagaactctagattatgggaaacttggtctcctttgcatataacatacatgggaataatgacaaccagctcttgaatctggtgaatgggggaactgttttttcctcattcatcagctccttaaatgtatatggatttaataaaagacaggtagactagctaaaatgctaagataattttttgatcgtattatagaaatttcctaggtatgaaatgaccgtggctggcctttagtaatgcattttagtattgacaaatcttgataactaaaaagtcctaaatttttaattgcttctctaaattagacccatttctttgaactgtgtcatcagaggacctagagggcttgccatcatcttgcctagttaaattttttttttttttttttttttgagatagggtctcattctgtcaccaaggctggagtgcagtggcatgattttggctcactgcagcctcgacctcctggactcaagcaatccttccacctcagcctcccaagcaggtgggatcacaggtgcatgcaaccaagcctggctaatttttgtgtttttttgtagaggtggtgtttcatcatattgcccaggctggtcttgacctcttggggtcaagtggtctgcccacctctactgcctcccaaagtgctggcatacaggtgtgattaaccacacctggctaatcatcattggtaatcttgccagttacttttgaacatttccacaacagagactctaagacaggctgttaaacaggggtccttccccaggtctctgtggttgaagtgtcacagccatatgatgttatgtttcaggacagtgtatattttttgctgatgggctgtaagttttggtggcgtcacactgggtttctacatgcaaatgcttaggtgcactgcactatagatgtctacgtggagaacacagatgaaagctatagggaaaggagagctttgaattggattgagtcaaggaagtatgcattactaacgaactattttgaaattattatctcattttgacaagtaataagacttacttgcctagacaacattgttgcaatttttttttcttttctatagtacctacatttacatttacttgttattttatttttaaatttacttggctgggcatggtggctcatatctgtaatcctagcattttgggaggccaaggcggaaggatcatttgagcccaggcttcaagaagagccaggacaatatagtgagaccctcatttctataaaaaataaaaataaaactatatttattttaagagacagggtctcgctgtgttgcccaggccggagggtagtggctatttataggggggaggatgatagcgcactatagcttcaaattcctgtgctcaactgatcctcctacctcagcctcccaagtagctgggactacacgcttgcaccaccatgcccaccttatatttacttaaaaaaaacaaacaaaaacaaaaaacaaaacctactatattctgaaataattttagatttacggaatggttgcaaaaacagtacgggaagttcccttcattcatcctgccctgatgttgacatcttataaccatagtcattcatcaaaacttccttattactggtgaaattagtcatgattacttggttaaggtgtcatctgtcaagattgtccactataaggttattgttttcccttttcttttctttttttttttttttttttttgagacagaatctctatcgcccaggctggagtgcagtgcagtggtgtgatcttggctcactgcaacctccgcctcctgggttcaaatgattctcctgcctcagcctcccaagtagctgggattacaggcatgcaccaccacgtctggctaatttttttgtatttttagtagagatgaggtttcaccatgttggtcaggctggtcttgaactcctgaccttgtgatccgcctgctttggcctcgcaaagtgctgggattataggcctgagccaccgtgcccggccattttttattttttgttttttttgttttttttttttttttgagaaagggtctccctgttgtttaggctggagggcagttgtgtaatcatggctcactgcagcctcaacctcatggactcaggcagtcctcccaactcagcttcccaaagtgctgagattacaggcatgagccatcacacctggcctgattttttgttttttttagagacagggtcttgctcttaaacacaggctagagtgcagtggtggaatcatagcttactgtaacctcacactcctgggctcaggtgatcctctcacttcagcctcccaagtagctaggaatacaggcatgcatcaccacaccaggccaattttttaatatttatgtggagatggtctcactgtgttgcactggctggtctcaaactcctggcctcaagggatcctcccacctcagcctcccaaagtgctgggattacgggcatgagccatcacaccaggccactttgtctgttaattcgagactgtaaatatcctttttccacttacactttccataattttagcatccaccagtggttcctttactttaactattttctggccaggcgtggtggttctcatgccagtattcccagcactttgggaggctgaggctggcagatcacttgaggtcaggagttcgagaccagcctgaccatggtgaaacccagtctctactaaaaatacaaaaacttagccaggcatggtggcacacgcctgtaatcccagctacttgagaggctgagacaggagaatcgcttgaacccaggaggaggaagttgcagtgagctgagatcacgccactgcactccaccctaggcgacagagcgagaccctgtctcaaaaaaaaaaaaaaaatatggccaggcgtggtgctcacgcctgtaatcccagcactttgggaggctgcggcaggtggatcacccaaggtcaggagttcgagaccagcctggccaacgtaatgaaaccccatctttactacaagtacaaaaattagccgggtttggtggtgggtgcctgtaatcccagctactcaggaggctgaggcaggagaatcacttgaacccaggaggcagaggttgcagtgagccgagattgtgccattgcactccaggtggatgacaagagcgaaactctgtctcaaaaaaaaaaatatatatatatatgtaatatatatattttatataaaaatgtgtaatatattttatataaaaatatgttatatatgttatatatatattttatatttttttagacagacacacacatataaaataactattttctgacgttgaaattttcgacaattttcacgttttcctaattccactgagtaatttgtgagtaattgtttacttttttttttctttaaatgttttcaggtatttgactggaatggttgacaaaaggacgcttgaaaagtatgaaagagaagctaaagagaaaaacagagaaacttggtatagtaaacttttatgacacttataaattacttttaaggagacgatgcccacttagtgcttttggagcctgttaaaatataaattgttgaagtctaaaatcgtatcacaacaaaggaaatttcccctctcctcataatacacagtagatgagttcctaatgctttaataacttacacagagaaatttggaaacaatccatatatctggtgatagacttgttgaaaatactataaaccatccatttaattgggtgattttgcaaccactgaaaacttacatttacataatttatagtaaccatgaatagaacttgcgttgtggtggcagttggggggaagcaggaaacatccctgtacttaagatatgaccattatataaataaatgctggaaataaaatggaatggaattattgacagtggttgcctttgaatggtgagacagtcaacttttttgttttctaaccttgttacttttatttttaaaaagttagcaagccttacctcaatgggatattgacagtcatttttttaaaataaaattatattcctctaaaataagtgggagaaatgctagtcagtgttgttataaaaaattgaggacatgctgtgaagatgatgaggtaagctaaattaatgcccactattacggatggtttgaatttatatgaatttttgcctggcagtgtgatattgaagcaatttttagcaagtaaccattgctcccacatggtgcgttagtggctttcagttttcaaaaatatctgaggacagttattttttattttattaaaaagttttagtcctggcacagtggcttaagcctgtaatctcagcactttgggaggccgagacgggcggatcacgaggtcaggagatcgagaccatcctggctaacatggtgaaaccccgtctctactaaaaatacaaaaaattagctgggcaaggtggcaggcacctgtagtcccagctacttgggaggctgaggcaggagaatggcgtgaacccgggaggcggaggttgcagtgagccgagattgcaccactgcactccagcctgggcaacagagtgagacaccatgtcaaaaaaaaaaaaagaaaaaaggaaaacaacttttattgggccaggcgcggtgactcaagcctataatctcagcactttgggaggcaaggcaggcagatcacacctgaggtcaggagttcgagaccaccctggccaatatggtgaaaccctgtctctactaaaactacaaaaatggccgggcacagtgtctcacgcctgtaatcccagcgctttgggaggccgaggcaggcggatcacctgaggtcaggagttcgagaccagcctgaccaacatggagaaaccctgtctctactaaaaatacaaaattagctgggcatggtggcgcatgctctaatcccagctactcggggggctgaggcaggagaatcacttgaacctgggaggcggaggttgcggtgagccgagatggtgctgctgcactccagcctgggcaacaagagctaaactccatctcaaaaaatatatatacaaaaagtagccgggcgtggtggtgggcacctgtaatcccagctacttgggaggctgaggcaggagaatagctggaacctgggaagcagaggttgcagtgagccgagatggtgccactgcactccaacctggccagagcaagactcccatctccaaaaaaaaaaaaaaaaaaaaaaaaaaaaagaagaagaggggtgggggtgccgggcacgacctaggctctgttgcccaggctggagtgtagtggctccatctccactcactgcaagctccacctcctgggttcacaccattctcctgcttcagcctcccaagtagctgggactacaggcacccgccaccacgcctggctaattttttgtatttttagtagagacagggtttcaccgtgttagctacgatggtctcaatctcctgaccttgtgatctgcctgcctcagcctcctagaatgctgaaattacaggcgtgagccacagcatccatccaaaaaagttttattattaccctttaactctcaagacagccattatttgtgttgtattttgtgccatgtgagtataaaaatgaagtaataagggagctcattatcacttaacacacagtgatattggcatttgtagttagtctttctgtgtagtcaacttgccataaagttctagatggtataattgactgcgtttatataaaagctctaagggtttgaatcaaaataatacattctttcagttttattttatttatttatttttttgagacggagtctcactgtgtcaccaggctggagtgcagtggcgcgatctcagctcactgcaacctccgcctcctgggttcaagcgattctcctgcctcagcctcccgagtagctgggactacaggcgcccgccaccatgcccagctaatttttgtatttttagtagagatggggtctcaccatgttggccaggatggtctcaatctcttgacctcaggtgatccgcctgccttggcctcccaaagtgcttggattacaagcatgagccactgcacctagccctttttttttttttttgagagacagagtctccctctgttgcccagcctggagtgcgatggcacgatcttggctcactgcaacctctacctcccagcttcaagcgattgtcctgcctcagctttcgaaatagctgtgactacaggtgtgcaccactatgcccaacttttgtatttttagtagagatgaggtttcatcatattagccaggctagtctcgaactcctgacctcaggtgatctgccagcctcggcctcccaaagtgctgggattacaggcgtgagccactgcgcccagccctattctttcaatttctttgttttcttttgagacggagccttgctctgtcgcccaggctggagtgcaatggcacggtcttggctcgctgcaacctcctcctcccaggttcaagcgattctcctgcctcagtctcctaagtactacaggtgggctcctccacacccagctaatttttgtattttcggtagagacagggcttcaccatgttggtcaggctggtgtcgaacccctgaccttgtgatccgccgccttggcctcccaaagtgctcagattacagatgtgagccaccgcacccggctcaattttcatttcaccaatcttgttcgtgatttaggtgttgtgtgtcatccattatatctttaatggtgaagaatatcctaaaaactctgatgttcttaggaatattgttctttttttaaaaattatttcaggtacttgtcttgggccttagacacaaatcaggaagaacgagacaagggtaaaacagtagaagtgggtcgtgcctattttgaaaccgaaaagaagcatttcacaattctagatgcccctggccacaagagttttgtcccaaatatgattggtggtgcctctcaagctgatttggctgtgctggtaagaaagacatttccagtccatctgtatatttgttagtagccccgcttatatctttaaatttgaatttatcttctaaaagctcaaattcaggttgcagtgaaatataatgatgtacacggtcacagttttcatcatactaatctctcttcaagaaatcttcaaaatttgatttacttctgaaaatacgtttcaccttttctctcctgttgctattatctattaccatgtcagaacttagtctccattaaatgccaagcccaccgttaggcaccatgggtaaaaaatgaataggaaaccatctgtttcatacggtcttcagtcattttgcgcttttcacaatgtactggtagtagatcacaattttttttcctttgtagttacaatagctagaaagtaaatgttggaattttaaaatatgcaggtatactagattttgggaatgtgggggattggaagcatctagacattgtttgatttgtgacattcaaaagcaggtacgtcataactcgtttgcttctattttcttgcaaaaaaaaaaaaaaaaaactcgtgatataactgaaaggaaagatgttttactgccataagggtatgcctgaaggcgaaggagtaaactgtttcctttcttggaattaggtaatctcagccaggaaaggagagtttgaaactggatttgaaaaaggaggacagacaagagaacatgcaatgttggcaaagacagcaggtgtaaaacacctaattgtgctaattaataagatggatgatccaacagtaaattggagcaatgagaggtgagcgtagatgtctggtattttatgttagtgggattaaggatggttttgttattgtacgactttttctctagggtttttctaaaccttaatctgtttacttaggaaactagagttcttggtttacattataattgagttattttggttacattataattgcagatatgaagaatgtaaggagaaactagtgccatttttgaaaaaagttggcttcaatcccaaaaaggacattcactttatgccctgctcaggacttactggagcaaatctcaaagagcagtcggatttctgtccttggtacatgtaagtaactgttttttcctttttttaaaaaggaaaaggatgttattacttaaattacttataaagacatatgctgagtaacatgttaacatatgcttttgagcatatatctttataagtaatttaagaaaatattaaatgtaaccttggctttaaaaatactaagatctttgcccatttttaaactgggttgtcattttgttactgagtcctaagagttctttttaatactggctaccagtcccttatcagctacaatatgattatagcaagtattttctcccactttatggattgccttttttcacttctcgatggtgtcctttgaagcacaaaaggttttatttttgaagttttttacatttagatatgtatttgattttgagttaacttttgtgtaagatgtaaggtctatgtgtaggtttgttttgtttttgtatattaattgtttacacacaatttgttgaaaagactattcttttttcattgaattgatttggctccctctttgaaaatcaaatgaccataaatacgagtttattcttgaactccgtgtttcttttttttggtttgtttttttgaaacaggttttcactctgttaaccaggctggagtgcagtggcatgatctcggctcactgcaacctctgcctcccagctcaagagatcctcccacctcagcctcccaagtcgtagggactgtaggcacatgccaccgcacccggctgatttttgtatttttagtagagacagattcaccatgttgcccaggctggtgtcgaactcctgggctcaagagatgcacctgcctttcggcctcccaaagtgctgggattataggcatgagccactgcacgcagccaatactgtatgtttaaaggggaaattattttatagaatcttggtttcatagctggaaaagtccataaaaagtaatatagtcaatttattacatgtaggctatttgctataaaatatttctctaaattttaataagtttatgaggaagccttatactgagcagttttataatagttttctgtggaataagtgagatgaaatggataataaagtggttgaatgggaagaatacatgagtagaatgaaaatattattagaagctgtttatagtcatgtaacttaacattttgatatttatgttgacttcctttaatggctttgttgttatgttctcagtggattaccgtttattccatatctggataatttgccgaacttcaatagatcagttgatggaccaatcaggctgccaattgtggataagtacaaggtacccaaaatgttaaagaaattgggtttcctgggaggggaaatcattgttgtgcattttgtttctagttttgaaaactttttttcttttcttttctttcttgttttttttttgacagaatcttgcactctgtcccccaggctggagcgcagtggcgcgatctcagctcactgcaagctctgcctccttggttcaagtgattctcctgcctcagcctcctgagtagctaggactacaggctcccgccaccacgcccagctaattttttgtatttttagtagagacggggtttcactgtgtcagccaggatggtctcgatctcctgaccttgtgatccacctgcctcggcctcccccaaggtgctgggattacaggcgtgagccaccgtacctggccttctttttttttttttttttgagacggagtctcactctgtcacccaggctagagtgcagtggtgtgatgtcagctcactgcaacctctgcctcccaggttcaagagattctccagcctcagcctcctgagtagctgggactacaggcgtgtgccaccgcatccagctaattgttttttgtatttttagtagagaccggttttcaccatgttggccaggctggtctcgaactcctaacctcaggtgatccgcccgccttggcttcccaaagtgctgggcttacaggcatgagccaccatgcccggtccaaaaactttattaacaacataacattgatgtctttttcttaatggctttatattagtggtatagatagaccataatttattcaacaagtttagtttattttagctgtttcccgatgagccagggatcatatcttagtgataaactcatagatgtaactgctgggctcaaaggattttcttattaaagttgatgcatattggtaaatagcatcgcaaaaatactgtgctaacttctgtcaccactagcagcatgagtgttagttttaccacagcctcaccagcactggatgttcgtcttaaaaaaaataaacttccttgtttttaactggatttccaacttgaatttttaagttttgcggtatcaatgtatgtaatgttttcccctcctcaaatacattattctttaattagctccgttctaaatttctttaacaagtattgctttttccaattttatatatgaggaaacaggcctagagatcaggagaacctgaatttgtacaaacagttcagatcttccaacataaacttctgtgttgttttctgcacctttttttttttttttgagatggagtctcgctgtttcaccaggctggagtgcagtggcatgatctcggctcactgcaacctccgcctcctgggttcaagcgattctcatgcctcagccttccgagtagctgggattataggcaggtaccaccacacccagctaatttttgtatttttagtagagacggggtttcaccatgttggccaggatgggctcgatttcctgatcttgtgatccacccgcttcggcctcccaaagtgctgggattacaggcgtgagccactgagcccagcctttttttttttttgagacagagtcttgctcttttacccaagctggagtcgagtggttcagtctcggctcactgtaacctctgcctcctgagttcaagcgattcttctgcttcagcctctggagtagctgggattacaggcattccaccgtgcctggcaatttttttttttttttttttttttttttgtatttttagtagagatggggtttcgccatattggccaggctggtctccaactcctgacctcaggtggtccacccacctccacctcccaaagtgttgggattataggcttgagccaccacatccagcttgtgccattttctttttaaattataggcatactgaattattaatatgatcatacatatgcttatgacacaaattattatagagtatttgttactgagtttaagatgaacctaagccttctacttaagcaaatgattttcctttatgaataagcagtgtagaatttcactttgggctattgagctgttatacagcaccaagaagtctgaaactggattttattttacatttgatcaggatatgggcactgtggtcctgggaaagctggaatcaggatctatttgtaaaggccagcagcttgtgatgatgccaaacaaggtaagaatcggttatgctgtttcctatctatttattgattttttttctttttctttaagagatagggtcttcttctgtcaccgaggcaggagtacagtggcgcattcatagcttattgcagcctcaaactttcaagcaatcctgccacctgagcctcccaagtagctgggactataggcttgtgccactctgcctggctaattttttttttttttaaataaaaattgagatggggtctcactatgttgaccagactagtctctaactcctggcctcaaacaatcctcccatcttggcctcccaaagtgctaggattacgggcgtgagccatcatgcctggcctcctttgtgtcatttttgactgttcagttgctgagatttgcagataacctgaggcagggcttctctaacagctccaaagatgttgcttatgcaggaccacagacttgagtcatcagtaccttcagatggagattttgctagatttcagtgagaatttatttaccatgctaactccaggcagagtaaattagaaaaagaatccattatcaaatgtaatatttagacataattggcaccttacaaattgtattatctggtttcttgatgccttgtgcattggagatgagaatatatagtatcttctaaaatgtttacattttaaagcctactttttcctattatctttgcaacttggaggctaacatatgagtgaaaataattctcaggttgagttcttagttagttgttgctgctgttgttgttttgagatggagtctcaccctgtcgccaggctggagtgcagtggcacattcttggctcactgcaacctccgcctcccgggtagctgggattacaggcatgcatcaccatatctggctaatttttgtggttttagtagagacagggtttcaccttgttggccaggctggtctcgaactcctaacctcgtgatttgcccgcctgggcctcccaaagtgctgggattacaggcttgagccaccacacccagcccttacttactcagttttgtctgtagagttgtcccaaaaattatggagatgagccaggcatggtggctaacacctagcactttcgaagtttgaggtggaccgattgcttgagcccaggagttggagaccacactgggcaacatagggagaccctgtctctgtgaaaaataaaattagccacttgtggtgatacgtgcctgtggtcgtagctatttgggaggttgaggcaggaggattgcttgagcccaggaagtcaaggttgctatgatttatgagctctgatcacaccactgcactccaggctgggcaacagaacgagacctttacaaaaaaaaaaaaaaaaaaaaaaaaaaagctatggaagtgtaaggcagcttggtggttgcaaggggctgaaggagggaaagtaaggagtgactgcttaacgggtgtaggatttcctttttgggacaatgaagttttagaattagatagtggtattgattgtacaacatggtgaatacactagatggcactgaattgcaaactaaaatggtttaaaagttgaatgttattacttatattttaccagaatagaaaaaagtatgattctctaaacataagtgaagttagtgcccagacatatttgcaagtgaggggccttagtaactagtatagagaaagtagctgttctctgtggaagctatcacttgatactaatcactaggcaggtatagaatgtcctagagttgagcaagcctcaaaaactcacttcagtttagtcctcctgaatctcagtggaacagagctagaatagtttaaaagacatagaggcagctggtgggtgggccatgcctgtaatcccagcactttgggaggccaaggtgggtggatcacgaggtcaggagttcgagaccagcttggccaacatagtgaaaccccgtctctactaaaaatacaaaaaattagccaagtgtgtcagcgggtgcctgtaatcctagctacccaggaggctgagacaggagaatcgcttgaacccgggaggcggaggttgcagtgagctgagatcacgccactgcacaccagcacaggcgacagtgcgagactccgtctcaaatatcaaataaaaaagaggccagacttttacaataaaaaattcatggggttggcaacctacggaatgagagaaaacatttgccaatcatgtatctaaatatggggttaatatctagaatatatgaagaactcctacaagtcaacagaaaacctgaacaacccaattcaaaaatgggcaaaggactgcaatagacatttttccagagaagatgtacaaacagccaaaaagtacatgaagaaatgcctagcactgctaactattagggaaataaaaatcaaatccacagggctggacatggtggcttatgcctataatccctgcactttcggaaaagctgaggcaggaggatcacttgagttttgagaccaggctgggtctctcactatgtgtgagatcccatctcaattaaaaacttttttttggaaagcagagtaacacgtgttggcaaggatgtggagaatttggaacccttgtgcactgttggtcatgtaaaattgtgccaagtgccgtgaaaaaatatagcagttcctcaaaaaattaaacatagatttcccacataatccagcaatactctttctgagtatatacccaaaagagtctcagatatctgtataaacatgttcatacatgtattattcacagtagccagaaggtggaagcaaccctggtgtccataaaggatgatggataaagaaagcgtgttacatacacgtaatagaatattgcacagccttaaaaaggaagttctgacacaggccacaacatgaatgaaccttgaggacattatgctatgtgaaataaaacagtcacaaaaagacaaataccgtatgattctacttaaatgaggtacctggaatagtcacatttgtcacctgaaagtaggatggtggttgccagggttcgggtgaacggggagtttcagttttgcaagataacaagatttcagagttctgaatattggttgtacaatatttaaatgtattaatttaggtgtactattgaaatgtacacctaaatggttatgatggtaaattttgttacatgtattttatcacagtaagtaattaagggttaaattaaaaatggttattttttactttgatattttatgaaactgttctgagatacagattgttttttgttttttgttttgtttttttttttttttttgagacggagtctcgctctgtagcccaggctggagtgcagtggtgtgatctcggctcactgcgacctccacctcccaggtcccggttcaagcaatgctcctgcctcagcctcccaagtagctgggattacaggaacgtgccaccatgcccagctcatttttgtatttttaatggagacaggatttcaccgtgttggccaggctggtcttgaacttctgaccttatgatccacctgccttggcctcccaaagtgctggggttacaggcgtgagccactggcgcccagccgatacagattgttttttaggtgagtgacttctaaactcttgtttctttcttttttttttgagacggagtctccttctgtggcccaggctggagtacagtggcgccatctcagctcactgcaacctccacctccagggttcaagcagttctctgcctcagcctcccgagtagctgggattacaggtgcctgccaccacgcctggctaatttttgtatttttagtcgagacagggtttcaccatcttggctaggctggccttgaactcctgaccttgtgatccacccaccttggcctcccaaagtgctgggattacaggtgtgagccactgtgcccggcctttttttttattattattattattattttttattttttggagatggagtttcgctcttattgcccaggctggagtatagtggcacgatctcggctcactgcatcctctgcctcctgggttcaagcgattctcctgcccaagcctcctgagtagctgggattacaggtgcctgccaccacgccaagctaattgttttttttcttttgtatttttagtagagacagggtttcaccatgttggccaggctggtctcaaactcctgatctcaggtgatcacccgcctcggcctcccaaaatgctgaggcgtgagccactgcacctggcctgcatagcattattgatgtagtaaatgtcactgatggtaaatttcccgtgtatctcctctcaggtcacttgttcttttgcttcaccttgctgccacagccagcactggcagtactgaggagcaatactggcatcagaactggaggctccataactattttatttttacattaaaaactttttttttttttttttttaaagacagggtctcgctgtgtcactcaggctacagtgcggtagtgtgatcatagctcactgcagccttaaaacacctgggctcaagcagtcctcatgcctcagccttccaagtagcggggctaaaggcatgtggactacccagctccgtggactattttgttagaaacaaagagtttaggccgggcacagtggctcacgcctgtaatctgagcactttgggaggccaaggtgggtggatcacctgaggtcaggagtttgagaccagcctggccaacatggtgaaacctcgtctctactaaaaatacaaaaaattagccaggcatggtggtgggtgcctgtaatcccagctacttgggaggctgaggcaggagaatggcttgaacccaggaggcagaggttgcagtgagccaagatcgcaccactgcactccagcctgggcaacaagagcaaaactctgtctcaaaataaaaaaataacaatgctatgcagccatcatcactatctaattccagaccatttcattacaccaaaaggaaatgatgtattcattaaatagttgatagacttttaaagcttagttcaataatttttaagtagtgcataattccgatatttggagattgataggtaatagaagacaggtttattaaatccttcatagaattccataataataaaaattatatccataaaactgaaatccaaatattaaattgtgttttcgattttgaaaaggtaaaaaaaggcaaatgctagtgtatacagtgttctagttggaaatgattagaatgtgatatttaaaaggtgacacgttaatactttaattggcagttatacttctaggatatgatttttgctgatcatatctaggctaagattttatgtcatacaaacataagtgtttacagtcaaatcttgcaactcttattgagcagacagacattcagatcattttatgttgcgtaatgcagtgaatgtgtcagaaaacctccagtcttgttttcttttaaagcacaacgtggaagttcttggaatactttccgatgatgtagagactgataccgtagccccaggtgaaaacctcaaaatcagactgaaaggaattgaagaagaggagattcttccagggtttatactttgtgatcctaataatctttgtcattctggacgcacatttgatgcccaggtaaacaaattattgttgttgtcatagtgggttttaatgtctaaatgaaattagaatatcagtgccttttgtcctgattatttgtgacatgccagttaacccatcttagtgtagagaaggggaatggaaatattataagccacttatatatcataaccacaataggcacctcatacaaggtcttcaagctggtacaagtgcttactggataaggagtattctttgtaagttcctttttatgtttgatctcctgatgatacattctacagtatctaatattcactttgaccagagcacagttactgtggaagtcatggtttatgtgctcattgacagcacatagctttccagacaagaaatcacacaggtttccctgttattaacaatctaacctccctgggagaatgacagagtaagtgactggtgtgaataacagaattttttaaagttcttttctaaggtatgacaactaatcaagttagattttgatgccagatgtaaggttgtttactttactggaccttggatattgagaaatggataaagctggataagtttacatctaggtagcttctgagcggtaaaaattagcttagttccttggggaatataaggaaagtcttcccagataagaaagttggcctgctgtcttttgttttgtttggagatggggtcttgctctgtcacccaggctggagtgcagtggcgcgatcttggctcactgcaacctccacctccgggattcaagcgattgtcctgcctcagcctcctgagtagctgggatttaggcgcccaccaccacgcctggctgattgttttgtatttttagtagagacagggtttcaccatgttgtccaggctggtcctgaactcctggcctcaggtgatccccccggcccccctgccgcctcggcctcccaaagtgctgagattacaggcgtgaaccactgcgcccagccagcctgccgtattttgaaagttgaccagggacttgccaagaagataaatacaggataagatactgaaattcatgctttgaggtcaagcagcctgacccatcctgtgaacaaaattagtaagacaaacctatcacctctaacacaaaaatcacttaagttgatgtcctagtgagatggtaacactaattcttgggatttatatggcgcttgagaacattgaattcttatttaccctaaggctaaagataagaatgtgtgtgtttgtttgacagatagtgattatagagcacaaatccatcatctgcccaggctataatgcggtgctgcatattcatacctgtattgaggaggtggaaataacagtgagtttaagataattggtttatttctgttttaatactgttttatcttcataatttctaatcagcaacagtgatgcacttttatttctacacctgttcttaaagattattttatttggcattattctgattttctcatactcttttcttggttaggccttaatctgcttggtagacaaaaaatcaggagaaaaaagtaagacccgaccccgttttgtgaaacaagatcaagtatgcattgctcgcttaaggacagcaggaaccatctgccttgagacctttaaagacttccctcagatgggtcgtttcaccttaagagatgagggtaagagcttttaaactgacgtctagtagtatatccaggatacctagctttggtcatcttcatcatctcagtacagtacacattgcaacaggttcacagaaaacttcgattcacattcttattcgtatgagtgttttatgagttgaatgtattgaacagaattgaccacgtgctttagtagtaatgccaaatctagtaatgctctacgtgaagaatcttaattttgatgttttgtgagtagtggatttggagggctattttgtttactaagatatttctatgatgtaatcctttgtaatatgtctagcgattaaaaggaacatagagattgatttttttttttacacctaatttttcagaggtctaatctttgtgaccttttgtgtgcatccatttctgcctacctctgggtgacgcagaacaactaacattcccatcttggggtcatgaagttctttggcataaaaacaaaatgattgttatgaaacgtttccttatgagcttttaatattcctgtccttttcctttccctttccctttccctttcctcttccctttcctttcctttttttgagatggagtctcgatctgtcacccaggctggagtgcagtggcaccatcttggctcactgcaagctccacctcccaggttcacgccattctcctgcctcagcctcccgagtagctgggactataggtgctgccaccatgcccggctaattttttgtatttttgtagagacggggtttcaccacgttagccaggatggtcttgatctcctgacctcgtgatccgcccgccttggcctcccaaagtgctgggattacaggcgtgagccaccgtgcccggcccagctgttaatatttctaacttagataaccattttaagactatagaagactttacataaaactttatagttccattgaaatacagaatagtcatttcacatgttcattccaattccatttagcaaaaactactttgtatctacaaagtgtcaggaactgtgctaagccctggtgatgaatacagttcctgaactttacattggatgaaattgtataaagacagtgtttattttactttaaaggcccagaactcttctggttgatagtaaaactggttattgggtttatcttattaatataacaaaatgatagttttagtttaccactcagaacctgataaaatcaggaagacagaagaaaagcaattaatgtagcaggaattcttaaccctagaattattttttcctaaaagctaacttggctttaaaaaaaaaaaaaaaaaaaaaaaaaaaaaaagctaacttggcttttaggttttccacaagacccaatgggttttgtatcctttcagtccacaggattactaccagaaggacgtgttcactgcactgtagtcagtggtgattgctgtgccttttcacagttacttaaggataggttttgggatttttttttttagcagctttattgagatacaatttccataatatgaaattgacctgttttaagtatgtaattcaatgaattttagtatgtttacagaattgtacaaccatcaccatatactaatattagaacatttagaacacctaaaaagaaaccttacacctgttcataatcaccccttattcccacctccaccccaggcaaccatttttcaatttgtcttttatagacactccataaatagaattataaattatgtggtcctttgtctagtttattttacttagtgtgattttgaggttcaaccatgtaacatgttatttattcctttgtatcactgaatagtactccactgggtggatattccacaaatacggatattccctttttttatttttaatccaaagaggttttttggcccagtgtggtggctcacccctgtaatcccagcactttgggaggccgaggcaggcggatcacctgaggccaagagttcaagaccagcctggccgacatggtgaaacctgctctctactaaaaatataaaaattagaatgggcatggtggcaagcacctatactcccagctactcaggaggctgaggcaggagaatcacttgaacccagaaggaggaggttgcagtcagctgaagtcgcaccactgcactccagcctgggtgacagagtaagactctgtctttatgcagtggctcatgcctgtaatcccagcactttgggaggctgaggcgggtggatcacctgaggtcaggagttcgagaccagcctggccaacatggtgaaatcccgtctcaactaaaaatacaaaaattagctgggcgtggtggcaggcatctgtatctcagctactggggaggatgaggcaggagaattgtttggggggtacggggggagataggtttttgatacagggaaccatctctttaccagcccccccaaataagaccctcttattaagactacctaaatagaagtatcatgggtttggcagtaaagctagttaattagtaacttacattgtaaaaaatatttttgtgatttaaaataataagttttaatatcttatatagacttgctgttaactactgaaagatttttttaaaatttcatttctaggtaagaccattgcaattggaaaagttctgaaactggttccagagaaagactaagcattttcttgatgaccctgcacaatactgtgaggaaaattgactgcagaagcctacttcacaccgccttctcttattttctgcccattgataaacctctccccatattttgcaaagaggaaattcacagcaaaagtccacattatgtcagctttctcatattgagagctctgctatgccactgttgaatttttcccaagattcctgtccctagccctcacttcaaactctgcttccttggacagatttggcaatagctttgtaagtgatgtggacataattgcctacaataatgaaaacctacaggaatttttttatttttcattttccccttaggcatatttagtatttttcccccaggcagatcattctgagtgtgcgagtgtgtgtgcacatgttacaaaggcaactaccatgttaataaaatattcaatttgaaatccttttcggtatttgaattgcttttgaataatgttttttatctggatgtaacattgttgcattagctttttaactttcccaagtaattgaatacattttattacttggacttttataaactctttccctacccactataaatgagacattcacagcgttcaagtttgtattaaaggaaaggattagtttgaccccttcttttgatggttaatgcatacatgcagttaaatccctttatgcaaatgtgacactgctttactaggtcttttagttatttatttattttttttttttttgccaatttatattgtaacatgatttcttgaacacagtaagttgttttaaaataaaagaacagcatactgtagtttttataagtaaagcgtaatgaaattgtacccctagagaaaattccattaacttgttaaattagtggaattaacaacaaataaagcatgtttgagacctggcaaaaattcctctggtagtatttataaatagagctgcatgcctctagtatgaaaaccgtatcagttgcaagtgccacttctacaagttactcagtttactctttgtatcagtaactttaaaggttggatgatccttgctggttaaagctaaatctcaacctagcaactaaatgaaaatatttagaatcatcagaatctgaacagactaaaattatcagcgataagcagaatcaagcagggtataagttttatctcaattatttgaaattgactgagttttcttaagtgtaaagctgaaatttgctaaccatgtttttgatgaaccacagtgcagcattgtgtgggttttagattgaatgactctctgctataattatcatgactttgaaatttttcatgagaataaatgaggaatggaggcaatttgtgggtttatccaaagcccccttgatgttgagtgttgccattgatcaaagatagcctcttttagattgtgatttctctctaaataagatactttgtatatttaatgacaagtctcttccctataattttgctcctcagaaaagaaaagcctagacagactgtatttccagtcacagaacataaaacttaatctaatgggtgttttgttttgttttgagacagaggctcactctgtcacctaggctggagtgcagtggctcgatctcagctcactgcagcctccacctcccggattcaagcaatttcctgcctcagcctcttgagtagctgggattacaggagccctccacgaggcccagttaatttttgtatctttagtggagacgaggtttccccctattggtcaggctggtctcaaacttctgacctcaagtgatccactcgcctcagcctctcaaaagtgctgggattacaggcatgaggcgccgcacttggcctagtgttttcttaactgtgaaattcccattcatttcttgaatgaggctacatcttatggacagagcaaagttattgtcctacagattcttaaaactataattatggctatgcatgaaatttaaatagattttattatgtctgcaaatctctgggcttttatttttctggaaaatataggagctttaatcaaaacataatagttctttttgtaattccatgttaataaaaacaaatactagcaattgcttgaattttaatgaatatttaaaagttcaagagccacggaaatcacttccagagataagagttccctttctaaatagaacacatttttaaaaaataagttatgtttgctactaaaacatttacactgttagactattatgtgcatgttgccaagactcttaagtaacttggatatcaactgtgaagggcctacctctaaaaagtaacaggtcatacaaatacaaatgtaactgtaaaaattccactggattcttgcatatttgcaagattagattattcaaaagaaatttcagtgctaaaattaaccagcaacataagttctatgggctttgaaaattgttctcatctttttaaagttgatgcattttcaatcctgcttacacaggctgttcatttggataagtaaataaaatgtctaaggtgaacttggcattatgtggagatgttggaccgttatagagcaatacaaattcctatgctgtcattctgttttctgcaaatgcaaacgtgcttatatggtcaacagtgcaaaaatagggtagttggctgcatatttagggtattacctaagcatttgttctctaacgttgctctactagaatgatttttttcttgcatcttttcacattaatgatgttctttatataactttcatgcgattatttagttttttaaattaataaagtgaatttaagaaatattgaaataaacatctaagtaattgccattttaaacccttgtttcttactgtgggagagggggaaatacagcactcatttcttgtttttaatttgcagaagtaagtgaaaatctatgtaaaatcaaaccaaaagagttggactgagtgtgtattgtcttgagattaagtgacaaatagtaaagtgttactgagtaattaagcccatgtattttttttttgtgagttgaaaatctttgaaatatgtgataaccgaatgtcaaaagttcctaaactctaacagtgcaggttgttcactgtaacgaggtaactcatatttgctggttacataaactacaagtactgctctcacaatatgggactttgaactgtgatgtagttcaacagttgccggcatcctctcagctgatacgctgcgaatattttgggttagacttgcagccagatgcagttttgcaacccaagaaaaaagttgaacctatgatcaaaaactgctcccaagatgaacctggaaaaaaatcagctaagctcccttggcgatctgcaggaacactagtaatgactggaattactccgtgatctttgatgactattacacataacagcactctagcaccttttcttactggcatggacttcctcatggactgctacttcatggatgatagcttcattgctttgggtagggatttaaggtagtcaaggggaaaatacgcagttttattacaggtcttaacatcagcaactttcaactttaaaaccctttgtgaaaaatgtggttatagcactatagctctgattttaggatggttaaatgttatattcattgttggcctaccttatcaaactgtgccattaatcctttcacagacataggtaaggaagagaacaaccagtggattcaggggacaattatctatctccaaataataggcttttatttcttgcagctaactttttcagtgattctagcagatgccatctagtacatccttgatcttgtttctttcgtgagagatctcgccatggcagcatcttgttaagtaagtgtaattgcacatgcacaaaagacttaactagctttacatttagcagtcagttggttagattaggtttcatagtaaatgaataggaatagaaagaataggaagtgtttttattttccagtagtaattccgtggattccatttgacccagtttactatcagttcagttcaggtagatttggttcaacttttggtggtttttggctctaggatattcttgactttaatatcctagaacttactgagtcttcccttcaataaatacacttctcacatacctctaatcctatgcttccttgaaacaataatgctagctgagttgtttactaaggattattataagggcctgaaggtgtgggagtggagattaattaaaacctttatgttctccaatataagggaaaagcaggttggtactacttctgattaggcagaaaacaccaggattccttaagtgatccttgaaatggttattgttttctgccttgtcacatttgccactgtgccctttaaaacgatgtggaaacctcaggtttgtggacagcacaggtggaatgacatcttgtgcttcctgaggctcccctctaccaggcacattagcttagtgcttcagatgtcagcccaagtccttgttacctccttttcctgctgcccagggaagagtgtgtgtgctggagctggagcgcttgcactcttcaggtgactattctcacctccatttcctccacatgcattaggtgaaactgaggtctaagcctcctgcaaggtctacattttaaggactcacacatcaggctctcagaaatgtacacaggtattagttctgtttgttctaaaggaaatgtgggtatctctcaggccaggacttagtgactagttttcgctagacagcaggttaatacctagatctcatttaaaaaaaaaaaaaaaaaaaacaggattaaagggaactgatcaggtttgttgagttttttagcctaattccaaagcatggaagagtgctctaggtaggaaagaaagctttttcttacgatttgtagctacctactgtgcctgacttggtgcctgtgtgaggattaagcccttagtctgctcttgcaattattcaaatgacaaattaaatttgcttttgtaataacaataaaagttgtcatcttcccttttgaaggatttgtcgtttgtaattacctgtgttgtaacaagcaaaaaccatgcccttttttgtacaatccttttatttttgtatcaggtactggaaccatctaccaaaaggtttgttggatggatctaataagctctgtcacataagggattcacaaacgtcatctgcttgcatatggcatgcaagtcttttgtataatgtatacgacaac

SEQ ID NO: 6592 - DNA, 48045 bp, Homo sapiens
gaggagatccgctcacacacacgaggaggagggttgagctgccgccgccgccgcctctgtcgtcgtcgcgagtgtggagtcgggactggagctgctgccgcggcgacgccggggatctttgtcgctagctcccggcccttctgccccgccgccttccctcagtcagcgttgcccactcctctccggccgggcgcccctgcctccatttcccgctctctgtccaccacacacacggcccccccgatcatggatccgggcagtggcggcggcggcggcggcggcggcggcggcgggagcagcagcggcagcagcagcagcgactcggcgcctgactgctgggaccaggcggacatggaagcccccgggccgggcccttgcggcggcggcggctccctggcggcggcggccgaggcccagcgggagaacctcagcgcggccttcagccggcaactcaacgtcaacgccaagcccttcgtgcccaacgtccacgccgccgagttcgtgccgtccttcctgcggggcccggcagcgccgccacccccagttggcggcgccgccaataaccacggagccggcagcggcgcgggaggccgtgcgggtaaaggcccgggacgcgggaggaagtccggccgggcgccggagcccacatggcgtaggggtgcggtccgggggcgcgcggccctggggcccggtcggcacgtggggcgctgacagtggcgccgtctgcctgggtggggcgccccgagcccgggagccggccttcgcggggcggcccgcggcggtggccgggcggggagcggacagcgggcagcgcgcccaaagacccggacccgagtgccgcccctccgcgcccctgccctgctctggagtccgcagttacccacttgagatgggaaccgtatggaacggagtgggggccgcggcggatccctgccacgaggcgcagaatgaggacagatggagccaggagtcatttgggtgggcgtttagagatcccaggagttggggaggacgaatggccgagttttcctttcaccttaggcccagccgagagagcgtcttctgctgcgttttctactattgaaactgtaattacggtttaaactgtccgtggcccccaaccgtcctgaaggaatcccaagatgcattgcagccttgtgatcgggcagaaacttggctatcaataccaagatctgttttacccttagcattgtgtacgcttctaaagtttacaaagtgccacaaagttaggattcctcacttaatgtgtgataggagactatattgatttgtgtctttttaaagtgaagcttacacttttatcctttgtcagcgacacgtttagagaattttcattgctgtaaaatcgttgaccttattcagattgcttggaataactcactgtgttcgtgcatcagtagttcagtctatttcttcagacacttgagcatttgttataatttaatagttctcacgtgtctttctgaccgtagctagtagacatacattttctaatccataaaatttcgagttaactttggtttttaaacatcttcccgtacttaggggttgcttaagtcgtaggtagcatgcttgcaggtgctgacgttgtaggaatatccggtgagtgaacttatgtattctcataatggtgcttattttgtggtaggtagcttgctttcaggtactgattttgtgggaatgtcaaatgagtgaacttaagtattctcttcctaatggtgcttattttaggaactatcagtgtttccttaaagagaaaatgaaaaaggaaggaaaaggctgaacgtcctttcatcatttagccaggacgttagtggggtgggtcatgacatccagcgcattttaagtgagaacatattgttgatttctctctttaaagttctgtattgtggtggttcttagataagtggacattataaaagtgctccaggagtttggtttctacagaaacttttgtcaccgtttgctctttcgtggtaaagggatagtgtctggagaaacactctgatgacgtatgtacgtcagcacggttgatttggtggttttgttgacagtggcatttatttgtgtgggtggttgatgttttcttttgaggagatcgagcactttcagggtggtacggctctagacaatgttttcctcttgaataaggaagcttagcttgtaattcttgacttacatcaagccattttgactgcctaacctagttcacttctcagctcctaaaagtgcccattccctaccttactttgcagattccgtttatccagccattttctttcttggctcttcctcctttctgtggagccaccagcaccactctgactagactcaggactccatttacagcctgtccagcgagtcatccggggataaccaaccttggtctagaatggtcactgttggtgactaggtattacctcttatgcgggctttctctcttcctgatagttgctaatttgtagttacacctaatctttttctctttgacagtgctagaaattggagatgcgaaaacctgtagggaagtagctgtcagtaagagaatccgtacagcatggtcaactttcttgtttttaatcaaaaaactattttggtgttaccgactttaccaattgcttgtaccaaaatgccagttcatgtttttaaaaaattatcctatgtaggatgtctatttggaaaagaactgattttctaagttgaggtccagggttatattgagactgttggattgcatgttccagactattaagtccataaaaagccagcatcggagaacaatcagtgcttataaaaagcagggggataaataggaaataacacctggattggaacttacaaagggggaaccaaaaagtttgcaaggtttttttgatagcgaggaagtggacaatagggctagcatgttctgttctttagttaagccatagccgaaatttgtgctgggtgtgtttttaaactgcatgccgggaaagctgttgaaggagcctggagagtcagaccttgggattcagtattgaccttggatctctttgaaaactaaagaatataggttccttaagaaataattaagtggaacccatttaagtgtaattaagtgtaattcatttaagcacagttctctagagccaagtaaattggccaagagattctccttaaaaagtgaggtccccaagtgaataaaaatatagaagacaaggcttaatgtatattagaacaagcattttatctgataggatgtatttaagttgcaatttgcacctagttttttttattgttagataagaaactggtttagtaattttagggttacttgaactttttagaacagccagagcttctaaagtaatgatgtggtgttctttgcatcatcccacctttaatgcttctcagaactcactgccattaagaaacaagcatggaataaaaccagcagccctcagtacttacttggaggaggcactgtctccaaaacttagcagattgtattgtggaacttgaattttaaagagaaacattctgttttgtagtgttccgtatttgctgaatgccttatttattggaagaggaggttttttttttgtttttttttttttttgagacggagtcttgctctgttgcccaggctggagtgcaatggcacgatctcggctgactacaacctcctcctcccaggttcaagcaattctcctgcctcagcctcccgagtagctgggattacaggcacctgccatcatgcccagctattttgtgtgtgtgtgtttttgcagggatggggtttcaccatgttggctaggctggtcttgaactcttgacctcaggtgatctgcccgccttggcctcccaaagtgccgggattacaggtgtgaccgcgcctggccttttttttttttttttttaaatgattgacatttaacttacacactgtaaaattcacccttttcaactgtacaagctgggcgcattggctcacacttataaacccaacactctgggaggctgaggtgagaggattgcctgaggcctccataaaacatagtgagactgagaccctgtctccacaaaaaaaaaaaaaaaaaaaaaaaaaaaaatacagctgggtgcagtggctcatgcctgtaatcccagcactttgggaggccgaggtggacggatcacctgaggtcaggagttcgagaccagcctggccaacgtggcgaaacctgtctctattaaaaatataaaaattagccaggcatggtggtgcgcgcccgtagtcccagctactggggaggctgaggcaggagaatcacttgaatctgggaggcggaggttgcagtgagccgagatcacaccactgcactctagcctgggcgacattgacactctgtctcaaaaaaaaaaaaaaaaaaaaatagctgggtgtggtggcacaaacctgtagtcccagctacttgggaggttgaggtgggaggatctcttgagcccaggagctggaggctgcagtgagctatgatggcaccattgcactcagcctgggtgaccaaatgagacactgtccaaaaagaaaagtaaagtgtacatacagttcagtggcttttaatatatttgtaaggttatgcaaccatcaccacttggcagatgctttttagaatattctcagttttaagctggaacatctcagaagtgacctcttcagggccaccagagtagagaggattccaaatcaaagtaatggttgtttaatccagaaaggcccttacactttattaatatgttaaattctatctgttgaggtagataataggtaagattctgtatttgagaatgtgtttttgagactgaagtgcctgcaagaacagtgctcatataaaggtgtttttaggcttcagtgggacagcagatggggtagaggagaggccccacagtatccctggagtatcacagtagtaaacactgcctttcgttacttctcctgccatggctgacctttttgtctcttgtttcatggttttacacgtatgaatggcttgagactgaggatttagggaagaagcgaaggcatcatctagggctgtgctgtgccaagttgagcagttgtttaaactgttagaatttttgactggtgtaaaaaccctctttggagcaggtattacgtagtgctgtcagtacatatcttattgcattcttctgttctttattttttaccttttctgaagttgcacagcgtgaaaagacagcaatttcagtttgaacaagttaaggaagtaatgtagacgacaaagtttaagccttgatttgcttgctttggtttgctggggaagaaatgtctgaaagtgttcagatagtattttctttctggttgaagagaaaggaatgaaaaagagatttgataaccttctgggttgagttagcagtattggaatggaatttttttccagaaatgcgaatttctggttttgctcagatatatgtactagcgactcattaacaaacatttaccagtccactgaatgaaagatgctatgctaggcacttgaaataacaccaagatgaataaattgtggtcctgaaggaatctagaaagggatcagatgcccagtgtactctagtggaagtcacagtgtggtaagtgagccctgcagagagtgtagagaaggctttcaaagccgagaacagcaatcccttacgtaaaacctctcagtcttgtcactctcataaaactaaagatttatctattatctgctcactgttctttgcgaatgccttgtgtgtatttttttttctggcctcctgggccagagttgcagccaaagcctgatcaccaaggttgtgtgtattttaaaaaactttttacttattattttttagagacgggatcttactttgtcacccaagctggagtataattgtgtgattatagctcatcgtaacttcaaatccctgggctcaagtgatctttcacctcagcttcctgagtagctaggactataggcacccaccatgacgcctggctaagtttttttgtttgtttttgttttttgagatggagtttcgctctgtcacaggctggagtgcagtggccctaactcggctcaccgtaacctctgcctccccaggttcaagcgattgttctgcctcagcttcccaagtagctgagattacaggtgcccgccaccacgcccagctaatttttgtatttttagtagagatgaggtttcaccatgttgcccaggctggtctcgaactcttgacctcaagtgatccacccgtctcggcctcccaaaatgctgggattacaggcgagagccactgtgcctggccaagttttgtatttttaagtttgtcgagagtgctgaaggtagagcactggttatctttttacagtacttgtctatttcgtattaaacagcagtgagttcagttactatgagtctggctagtgtgtctattggggcatgtttagaatttcatcattctacccttggttttaaaatatcttcgggagacaagaatttggctactagttgaaggatctgaggtcctcagaacaatcaagaaaactgacagtttttagctgttgattgttgattcatttcaaggcttagaagtttctgccttgttttcagtagagtttaacaaagtgagccgagactgtagatttatatggctccttcgtaaatggctttgttctaaggaaacctagttgttacagtactctaagttgaaccagtttcccatcataattctactttcaaagagagaagaacacttaataaggctttcccgagcacctgacctaacagtggtgacactcacttccaaaccacattcccactaggtaattgtatgtcgcttcacttgaaaaaaaaaaagcgcattctgcagaatgtcactgggtaatttcctggttgaatatttctgtagaactccagtatgttaccatactacttgtccattgcctttaggtggttaattttggtagcagaaaaatgtttcggttatttttttatttttgacatggagtctccctttgttgccccggctgcagtgcaatggcgtgatctcggctcactgcaacctccacctcccgggttcaagcgattctcctgcctcagtctcctgagtagctgggatgacaggtgcgcaccgccatgcctggctaatttttgtatttttttttttttttttttttttttttttttttgagacggagtctcgctctgtcgcccaggctggagtgcagtggcgggatctcggctcactgcaagctccgcctcccgggttcacgccattctcccgcctcagtctcccaagtagctgggactacaggcgcccgccactacgcccggctaattttttgtatttttagtagagacggggtttcaccgttttagccgggatggtctcgatctcctgacctcgtgatccgcccgcctcggcctcccaaagtgctgggattacaggcgtgagccaccgcgcccggcctaatttttgtatttttagtagagacagggtttcaccatgttggccaggatggtcttggtggctactgacctcaagtgagccacccacctcggcctcccaaagtgctgggattacaggtgtgagccaccgcacccggctgtttctgttatttttgtacttttttgagggtatctgaaatggttttggtttgtgtattttaaatgttatttaaatggttttttgtttcttttttgtttttgagatgaatctctctatgtcgcccaggctggagtgcactggcacgatcttggctcactgcaacctctgccttcctggttcaagcgattctcctgcctcagcctcccaggtagctgggattacacgtgtgcaccaccatccccagctaatttttgtatttttagtagagacggggctttgccatgctggccaggctggtctcgcactcctgacctcaagtgatctgcccacttcagcctcccaaagtgctgggattacatgtgtgagccaccgcgcctggcctcaaattgtttttgaagtagttaggttgtagctcataagactgtctttcagggttgtttgaaaaacataatggaattttagttactctatgcaaagtctgatcaggttgataatgtggcattgcttttgtgtccgaataaagaggttcttagaatgttagcgctggatacgaccctagcagttgtacagcctcttcattttcagataaaggaactggagccttagaaatgctaagtaaatgcctaaggtcactcacagagttaatgacaccattgagtctagaatgcagatttgctacctgctagtttagtgcttgatctgccacatcatgctgtttaataacagggggcgggaagggcatgcctggagctaattactacaactagcgtgtagttttctgagagtggccctggcatttgcctaatgtttcattcttaaaggtttttgaaattattttggggctttgaagtgcttgctgtaataaatttattgagcatttaccaccccttatcagttatttagtcttcacaacattctcttgaggttaggtactgttgacccattttacagatgagaaaataaaggctcagtaaagctaaataacttaggtcagtcatatccatgagaggagtgaggcttggaatcgaggtcatttcaaagtttattctagtagtgactgctagtgctttccttgtgattttgtattaaagtagactgagactctccagaaactggacctgtgagcttggaccatggcatttctctgtgttctgtctcagtagtagcagaatgacatttgtcataagtaggcagtgctctgatttaaagcaatattttgaaattacttctttttacattttagcaagtgttgatgtaaaatactttaaaacagctctgttcaccactgtctgtaccgagcctttttatttttagagtgttaggtaattaaggcaaaaccatccacattgttttatgtgttctgtagacttctttctggtgtttgcttttactgtttttcagtattgtctacaggagaaaaaaagaaaaacctcagcttgcaaatttttgttcagagatgggatcgttctttgttgttggagggatttacattaaaaaaattcaagaaatattgtctcatgtgatcttaccagataagtgcctattattaagacttgttggctgctggatttattatcttagcctaattttctttctgagttaaatgaatcttgcttttttatcgttaccaccctggcataatccaatgggaatatagtatgaaccacatagttaatttaaaattttctttctttaattttgttttttgagacagggtctcacattgttgcccaggctggagttcattggcacaatcatagctcactgtggcctcaacctcctgggcttaagtgattcttctgcctcagcctcctaaatagctgggactacagttgtatgcctccacgcctggctcatttttacatttttttttgtagagacagagcatcactgtgttgccctggctggtcttgaactcttggcctcaagcaaccctcttagcttggcctcccaaagtgctgggtttataggcgggaaccaccacagctggcccaacatctcctgagtgtagtgtttccctaaccccttcttagaaagttggcacatttaaaattgttttcactctcttgagccctaatggaaatgcaatgaatgtacagatggaggctaggggtcctggtcagaaaagggaagtgaggccagttgtggtggctcatgcctgaacccaggaggtggaggttgcagtgagcccagattgtgccactgcactccagcctgggcgacagagtgagactccatttcaaaaagaaaaaagaaaagtgaaaaaatgaagtgatgtgactggaaggaaccagtgtgaaaatcaaaggaaaacacagtaattcagtaaaaattgattgtgtatttattctatacaatacatcatgccaacttgttgagactactgaagtagagaaaaaagtcatccacccacagttcattctggaagtctacaatctagggaacaagaactaagatacatgtgtacctataatttatttatttatttacttacttatttttgagacagagtctcgctcttgtcgcccaggctggagtgcagtgactcagtgatctcagctcactgcaacctccacctccccggttcaagccattctcccgccacagcctcctgagtagctgggattacaggtgtgtgccagcagacccagctaatttttaattttttagtagagacggggtttcaccacgttggccaggctggtctcaaattcctgacctcaagttatctgcccgccttggcctcccaaagtgctgggattacaggtacaggtgtgagccactgcacctggtccccatgtgtgcctctaatttaaagaggtgtcatgtcctaggggagtgatcattagcccttcagggtaggggatggacagggaatgggatagaaatgggggattaggtaggcaagtgtgtactacaattaaggagaatccttgagctagaactgttatccaaagtgtaatcgagaaccacatgtggctatttaaatttattaaaattaaatttaaaattcaattcctcagtcataatagccatgtttccagcgcttaataaccacatgtggctggtgactatcatgtcacagcacagatataaaacatttccatcactacagaaacttggacagaattttgtcacacatatttcttactttcatgcaatgtgagacacttctgtgacagatccgaagttgtatttttctttaatgaacacccatttggctaacaaaactacagtttcactcaggatgcctgtgttttgttgttattgtttgatacagggtcttactctgtcacccaggctggagtgcagtggtgtgatcaccgctcactgcagcctccacctcccaggttccagtgattctcctgcgtgggactacaggcctgtgccactatacccggctgatttttaaattttttgtaaggacgaagtctccttgtgtttcccaggctggtctcaaactcctggcctcaagtgatcctcctgccttgcttcccagagtgttggttttacaggcatgagccactacacccggcttgaagattagttttgtatctaaagcagtatgaatttaaattgctgatttatgaaatacatgcatcaagcactttttaagacttagccaaacatttgtgtttaaaacatgtaacttgaatcaaaacgtagctttttttttttacctgccatgatgtctgtggccttgactgacgtatgctgtgaggatatgctggccaagtaggattctccatattcaagtcctttgacccatgatcatagctttaaaaaaaaattgtacactcttttaaaaaattgaagcaaaatccacataacataaaactggctgggcgcagtggctcacgcttgtaatcccagcactttaggaggccaaggcgggcggatcacaaggtcaggagatcgagaccatcctggccaacatggtgaaaccccatctctactaaaaatacaaaaaattacccaggcgtggtggcgcgcgcctgtagtcccagctactcgggaggctgaggcaggggaatcgcttgaacccaggagtcggaggttgcagtaagccgagattgcaccactgcactccagcctggcaacagagcaagactcaaaataaataaataaaataaaataaaataaaatgagtcaggaatgatgttggtgttgaggttggcatacgtatcaaggacagtaactaccatggctcccgaagtgttgccaaaacctcagatgtgtggccttctggccaagcgtctgcgatttcaatgtttggagcattcatggtgtccctgggggttgcagctttgtatgagtttggtgtgggtgaaccaagaaagaaggcatatgcagatttctgcagaaattatgagattttgagcagatgaggaaggctggtatctttcagtttaaagtaatcttggaatataaagaatttcttcaggttgaattacctagaagtttgtcactgactcgtgttcctgaactacgacacatgaatatgtgggctaatagttcgtcttgataaacaattaacaaacaaataaataaagccattttaaagtgaacaattcagtggcatttagtacattcacactgtgttgtacaaccagcaattctatgtagttctaaaacatttccttttttttggagacagggtctcacaccgtggtccaggttggagtgcagtggtgcgatcttggttcactgcagcctccctccacctcccgggttcaagtgatcctcccacctcagcctcccaagtagctggcactacagacatgtgctaccacacccagctaatttttattttatttaatttttttgagacagagtctcactgttatgcccaggctggagtgcagtggtgcaatctcggctcactgcaacctccgcctcgcaggttcaagattgccagattctcctggctcagcctcctgagtatctgggattataggcacctgtcatcaccctggctaattcttgtattttagtagagacggggtttcaccatgttggccaggctggtctcaaactcctgacctcatgtggtccgtctgcctcagcctcccaaagtgctgggattatagtcatgagccaccgtgcctggcttgaaactggattgatagttaaaatttgattatggtgaagcaacacaaacaccacatattctatgattccattgacatgaagtattcagaagaggtaaatccacagagacagaaaacagacatactgttggctgccagaagctaggagagagtatgggcagtaactgctaaatgaatacgggtttccttttggggtgattaaaatgtcttggaagccgggcgcggtggctcacacgtgtaatcccagcactttgggaggctgaggtgggtggattgcttgagctcaggagttggagaccagtctggggaacctattgaaacaccatctctataaaaaatttaaggccaggtgtggtggctcatgactgtaatcccgggactttgggaggctgaggcaggcagatcacatgaggtcaggagtttgagaccagcctggcaacatcgtgaaacccccgtctctactaaaactacaaaaattagctgggtgtggtggcacacgcctatagtcccagctactcgggacttaaagcaggagaatcgcttgaacccaggaggtggaggttgcagtgagccgagactgcgatagtgcactccaacctgggcgacagagcgagactccatctcttaaaaaaaaaaaaaagatccagttccagtttatcatgtgtatcacaggcagtactggtgttctgctgttctctggtaaagtcttcacttcatgttttaaaatttgtggtaatgtaccaagtaccacagtcaagtcattaatcttcctttattataaattatactattagttttgcctcttttttttttttttttttttttgagacagagtcctgctctgtctgtttttgagacagagtcgtgtcacccaggctggagtgcagtggtgcgatctcggctcactgccagctccacctcccgggttcatgccattctcctgccttggcctcccgagtagctgggattacaggtgcccgccaccaagcccggctaattttttgtatttttagtagagacagggtttcaccatgttagccaggatggtctcgatctcctgaccttgtgatccacccgcctcggcctcccaaagtgctgggattataggcatgagccaccgtgcctggcttttttttttttaagatggagtttcgctcttgttgcccaggctggagtgcgatggtgcaatctcagctcactgcaacctctgcctcccgggtagcttcctgcctcagcctcccaagtagctgggattacaggcacaagacaccgtgcccggcaaatttttgtgtttttagtagagttggggtttcctcatattagtcagactggtctcaaactcctgacctcaggtgatccgcccgcctccacctccagaagtgctgggattacagatgtgagccaccatgcccagcctagtttttcctcttttttttttgagacagggtctcactctttcacccaggctagagtgcggtggtgcaatcttggctcactgcgacctctgctacctgggctcaagcgattctcctgcctcagtttcctgagtagctgggactacaagcatgagccaccatgtctagcctaattcatatatatatatatatatttttgtgtgtggagatggggtttcaccatgttgcccaggctggtctcaaacttagtttttccttgtaatttggggcatggcagttgcactcagtggtaaaccctgaaagctttcccacttagaaaaaattgttccatttttaaatagttaataaaggtgtgtttctaaacatagagataacactggaaaatttgaaactgtaatttcattccttgagagggttctaacttcctttactagcagctgtgaaccatgtaggatgtgagaaattacaccctaatcatctatttcctagccatgaacagttcaacctcggaaaattctaagcccaggctcattagtagccagtaaaatctggatgttatgtgagtcatgaataagaccagagtagaatgaacaagtaaaggtttactgtgtatgtatgaagatagggtagaaatatatcggttttatttttattttttgagacagggtgtcactctctcgcccaggctggagtgcagtggtgtagtcaggtctcattgcaaccttgaccctcccaggctcagcccccggagcagctgggactgcaggcgcatgccgccattcccgacagttttttgttttttgttttttgtttttctttttttggtacaggtggggttttgccatgttgcccaggctggtctcaaactcttgccatcctcccaccttggactcccagaggtttaggactacaggtgtgagccaccatgcccaacccatttgcaacttacaatccattgtaagttgaggagccatctgtattgtaaatctaatagttggtgccaggaactaagtggtcaggtgtaagtactgttttgttttgaaaagctgttacagttagtgatacacttgagagtggtgaggaagcccaccacacccgtcattttcctgccttaagatacgcagtacatcataactgtgtgtccgtcagagcttagtttacttgtacactgattttcagcagggactatctgaggaaggggaagatggcacttgcataacttggaaatgcctgcagttgattctgatgtgcctgtatgttagatggtagtgattacaggatctgtttcctaaggcttttggtgggaatgagctagcagtcggcacttagggctcaataaaaattagttaaagcaaattgctaccccctccatcccccactccctacacaatatggatttgtgagtacttttatccttgtctggcccataatagatactcaatacatatatatatgtattcatttttattaatttttttttttttgagacggagtttcattcttgtccaagctggagtgcagtgacgtgatcttggctcactgcaacctccacctcccgggttcaagcgattctcctgccttggcctcccgagtagctgggattacaggtgtatgccacacccagctaattgttttgtattttcagtagagacagggttttgccatgttggccgggttggtcttgaactcccgaactcaaatgatccccccgcttccgcctcccaaagtgttgggattacaggtgtgagccaccgtgcctggctgatactcaatacatattgataggattgagttggagtagttacatagcagatggagacacatttgttgaatacgccaggagttctttaactgacactaaacaaattattctcccatttcctcccataaactcctcaacaatcctctcaggtagatggtatatcatttccacaatttcagtggaataagtgcaggcacagcttgtaataagccaggagttaaacctaggagtcagctcagttccaggctctgagaagtaccccatgcagtcacctccttcttagggtggcctgtgaacttgatactctcagtactacctggcttcctctgaaaactgagtaatttttccttaccttatccttaaacttttcttgaaaatggaaaagcaaaaaaaagttaatctgtattgtgttgaagtacagtttctgcctccttccaaaccaggttcaaatgcgtttcccccctgtttgttaatgtcctgctcatcccacagcttggggtcatcttagaccttttactctccctttctcccaactcctgtcaggtgtagcccccatcccctcctagttgtattgcttggttgtctccatggcatgctttcttgcagtggtgatgtgggtcttcctgcctgtggggtcttgcccactctagttcatgtagtttaagctgcaagaaaaagatcttcctaagtgacagtctgagcctgtcacttaaaaaaaaaaagaaaacaatttggttgtcctttacctatcagggacaggaaattactttactcaacatttgatgctattgaaggttgggcccaaaacactttctcttgactcttacaggtattgatcctttccgggcaatgattttacaggttacaaattcattattttttcatacttgctgtgcatgattcatatgatttaattctttagtatcgttttctgtcgtggagattctttaaagcaggggcacgttcatattggagtataatttaggtttgtctgtatctgacaaactaaaatccaaaaagcagacttagatatttggttattagtatgtatttctcctacatctcttccagtaatgtcataagtaaatttgcagtgtggcaactggaaactggattgttgcttggttttagagttctagtataggaaaaaactggcatcattggaatcaccttttctgcagatatttttaatggcttatatatgtttcaggactttatacacatgtcatttatcttataggtatctaatttattcagggattttgataacatgagtatggaatattaaaaagggctaatcacaggctggatgcggtggctcaagcctgtaatcccagcactttgggaggccgaggtgggcagaacacctgaggtcgtagttcaaaaccagcctgaccaacgtggcgaaaccccatctctactaaaaatacaaaattagccgggcatggtggcatgcacctgtgatcccaggtactcaggaggctgaggcaggagaatcgcttgaaccggggagatggaggttgcggtaagccaagatcgtgccattgcactccaactccagcctgggcaacaagagtgaaactcagtctcaaaaaaaaaaaaaaaaaaaaagggctaatcacagctttcttgggctgggttacctagagagaatcacgggaagtagatgtgtatttgttgagcacatctctaatttgatctgtgctgagctgcaaattactttgacagtatctgtgaagaaaaggtttataaagcaaatcaaaagaataagcatgtttttatgaatacattgaaactactgaaaatgtttcaaaattggctgtaattagtagaattttgaaaagtaggttaagcagagacttctaacttgaaggcctgagttagctgccattgatctggggttattgattgaggcttgtgtcgtgttattgaacttctgtttttactgcatattaaaagataagtgaaatggatggataagtatcaatttttaatagaacttctttctgttaaacagcacctgtggaatcctctcaagaggaacagtcattgtgtgaaggtaatgatgtactctttgaaagtctacttgagaaaacattaggttgtctatatggtgtgtaaagctagatactgtttggtaaatatatattatatttcaatctcttgtctaggttcaaattcagctgttagcatggaactttcagaacctattggtaagaaaatttctgaccatattaatacagtaatatgaaactctttcactctcaagatttaaggtgcattatgtaagttacgattattgtaatgcctacatttaagacacattgagtctttgctattagtatttagaaagtagaacaaactaggcactaacactgccttgataaacttaatgattgcaaataaaattgagtggaggaatggtcaagtcaatttaaatacctgtacctgttctgttttctttttttgagacggagtcttgctctgtcgcccaggctggagtgtagtggtgcaatcttgggtcactgcaacctccgcctcccaggttcaagcgcttctcctgcctcagcttcttgagtagctgggattacaggcgcacaccaccacaactggcaaatttttgtatttttagtagaggcggggtttcaccatgttgatcaggatggtctcgaactcctgacctcgtgatccacccacctcggcctccgaaagtgctgggattacaggtgtgagccaccatgctcggccacacgttctgttttcttggtgaaaaatgttcttcctttttataactttattcttaagggtttcacgttctcagcgtgattaaagttgatgccaaagttttattagtttaagaggaaaaagaaaatatttcctaaatcctttcatatttctcgtgtgtcacgattttaaactttcctttttttcttactatcagggtgtctcaacactggaataactaggctgttgggaatgttagaactcttgtttgcattttgtttgccattatgaaaatgaagctttgctaaaatagcaatctcagcctgtgagtcagtgccctctgatgtgataccagcagtgagtctgccttgaaagctgtcacccatttctgctatgaaagaggttttcctgcttatgtgtcactaggcattaggaaatggaactacatatgcaaacttccatttgttgttttaaagctagtgtattttaaagtatagattgtaagtctttttcagaatactaagttaaaatgtctttcttcagtagaaaatggagagacagaaatgtctccagaagaatcatgggagcacaaagaagaaataagtgaagcagagccagggggtggttccttgggagatggaaggccgccagaggaaagtgcccatgaaatgatggaggaggaagaggaaatcccaaaacctaagtctgtggttgcaccgccaggtgctcctaagaaagagcatgtaaatgtagtattcattgggcacgtaggtaagctgctctcatagcaattaaagttactggatacataaaacatagaacatcctttttagctacctggagatgtttagtgaaactgaaggaaattaattgaaaatgtcttgatttttaacttgctgattttttttagctggcaaaaaattgcaagtacttttttcctgaagtttaggcaaatgaataattctgtaacggcatagatgctggaagaaaaacttcagtatattgtacgtaacatataattagtctattgaccattgatggtagttcagcatagtattatatatcagtatcttagaaaatgtgcccttttttatgtgaacctcagttaacttgttaattttaatgggattgaccttaccagataattttgtgtgaagcaggaaatcaataatttggagtaacttctggatgcttgccaggttgctggtttagcaaaaaacaaaagaacaaatttatttaatttactcagatattctctaattatctggcctatccccagaattgtgagaaaaaaaatacagaattatgtgtctttcatttcagctatctctgccttccccccagatatgaaacactgtaccccttcttttagtagcaagaactcttttgaaagtgtaaaggagcggctgggcactgtggctggcgcctgtaatcccagcactttgggaggccaaggcgggcacatcacgaggtcaggagttcaagaccagcctggccaacatggtgaaaccccgtctctactaaaaatacaaaaattagccaggtgtggtggcatgagcctgtaatcccagctactccggaggctgaggcaggagaattgcttgaacccagaaggtggaggttgcagtgaggtgagatcgcaccactgcactccagctctgggcaacggagcaagattccgtctcgtggggaaaaaaaggtgtaaaggagcacatacctcatttgctgtaagtgaaaggaaaagcacctgaatctagttcacagttcttcagctgcttttgctcttggaaacttctcttggggaatttatagtctgttgccgctgtgctttcggagtaatctgttaaaaaattctttatcagtaaagtgtttttaagtggtttttttttttttttttgagatggagtttcactcttgtcgcccaggctggagtgcaatggcgtgatttcagcttagtgcaacctctgcttcccgagttcacgcgattctcctgcctcagcttcccaagtagctgggattacaggcggccgccaccacgcctagctaatttttgtatttttagtagaaacggggtttcaccatgttggccaggctggtctcgaactcctgacctgaggtcatccgccctcgctggcctcccaaagtgctggaattacaggcgtgagccaccgagcccagccttgaggctcattttcaaaaggagaagggtaatgaactaggatttatgccccaaattcatatggaagatttaattatgtatgttaaagggtgctgttgtttgcatatttagccattggtttttggttttaacctatggtttgcatgttgatgttacttttagatgctggcaagtcaaccattggaggacaaataatgtaagtctgtatcttttgttaaataacagagttaaattgatgtaatgaattttaggcattgtaaaccttcatacagtcacacaaaggagataaaacaggtcccccaaagaaaaattaaaaataaaattactgggacacaatactgatgttaagaagtgatttttggcctggtgtggtggaacacacctataatcccagcattttgagaggctaaggtgggaggatcactggacttgaggtctggagtttgaaaccagcctgggcaagacaatgagactctgtctctactttaatttttttaaaagtagtagtttttgtaatgtgattattactagtgttaaatgtgtttctgaaagctttttacattttttaaaaataaaaaatgaacacagaactctagattatgggaaacttggtctcctttgcatataacatacatgggaataatgacaaccagctcttgaatctggtgaatgggggaactgttttttcctcattcatcagctccttaaatgtatatggatttaataaaagacaggtagactagctaaaatgctaagataattttttgatcgtattatagaaatttcctaggtatgaaatgaccgtggctggcctttagtaatgcattttagtattgacaaatcttgataactaaaaagtcctaaatttttaattgcttctctaaattagacccatttctttgaactgtgtcatcagaggacctagagggcttgccatcatcttgcctagttaaattttttttttttttttttttttttttttttttttttttttgagatagggtctcattctgtcaccaaggctggagtgcagtggcatgattttggctcactgcagcctcgacctcctggactcaagcaatccttccacctcagcctcccaagcaggtgggatcacaggtgcatgcaaccaagcctggctaatttttgtgtttttttgtagaggtggtgtttcatcatattgcccaggctggtcttgacctcttggggtcaagtggtctgcccacctctactgcctcccaaagtgctggcatacaggtgtgattaaccacacctggctaatcatcattggtaatcttgccagttacttttgaacatttccacaacagagactctaagacaggctgttaaacaggggtccttccccaggtctctgtggttgaagtgtcacagccatatgatgttatgtttcaggacagtgtatattttttgctgatgggctgtaagttttggtggcgtcacactgggtttctacatgcaaatgcttaggtgcactgcactatagatgtctacgtggagaacacagatgaaagctatagggaaaggagagctttgaattggattgagtcaaggaagtatgcattactaacgaactattttgaaattattatctcattttgacaagtaataagacttacttgcctagacaacattgttgcaatttttttttcttttctatagtacctacatttacatttacttgttattttatttttaaatttacttggctgggcatggtggctcatatctgtaatcctagcattttgggaggccaaggcggaaggatcatttgagcccaggcttcaagaagagccaggacaatatagtgagaccctcatttctataaaaaataaaaataaaactatatttattttaagagacagggtctcgctgtgttgcccaggccggagggtagtggctatttataggggggaggatgatagcgcactatagcttcaaattcctgtgctcaactgatcctcctacctcagcctcccaagtagctgggactacacgcttgcaccaccatgcccaccttatatttacttaaaaaaaacaaacaaaaacaaaaaacaaaacctactatattctgaaataattttagatttacggaatggttgcaaaaacagtacgggaagttcccttcattcatcctgccctgatgttgacatcttataaccatagtcattcatcaaaacttccttattactggtgaaattagtcatgattacttggttaaggtgtcatctgtcaagattgtccactataaggttattgttttcccttttcttttcttttttttttttttttttttttttttgagacagaatctctatcgcccaggctggagtgcagtgcagtggtgtgatcttggctcactgcaacctccgcctcctgggttcaaatgattctcctgcctcagcctcccaagtagctgggattacaggcatgcaccaccacgtctggctaatttttttgtatttttagtagagatgaggtttcaccatgttggtcaggctggtcttgaactcctgaccttgtgatccgcctgctttggcctcgcaaagtgctgggattataggcctgagccaccgtgcccggccattttttattttttgttttttttgttttttttgtttttttgagaaagggtctccctgttgtttaggctggagggcagttgtgtaatcatggctcactgcagcctcaacctcatggactcaggcagtcctcccaactcagcttcccaaagtgctgagattacaggcatgagccatcacacctggcctgattttttgttttttttagagacagggtcttgctcttaaacacaggctagagtgcagtggtggaatcatagcttactgtaacctcacactcctgggctcaggtgatcctctcacttcagcctcccaagtagctaggaatacaggcatgcatcaccacaccaggccaattttttaatatttatgtggagatggtctcactgtgttgcactggctggtctcaaactcctggcctcaagggatcctcccacctcagcctcccaaagtgctgggattacgggcatgagccatcacaccaggccactttgtctgttaattcgagactgtaaatatcctttttccacttacactttccataattttagcatccaccagtggttcctttactttaactattttctggccaggcgtggtggttctcatgccagtattcccagcactttgggaggctgaggctggcagatcacttgaggtcaggagttcgagaccagcctgaccatggtgaaacccagtctctactaaaaatacaaaaacttagccaggcatggtggcacacgcctgtaatcccagctacttgagaggctgagacaggagaatcgcttgaacccaggaggaggaagttgcagtgagctgagatcacgccactgcactccaccctaggcgacagagcgagaccctgtctcaaaaaaaaaaaaaaaatatggccaggcgtggtggctcacgcctgtaatcccagcactttgggaggctgcggcaggtggatcacccaaggtcaggagttcgagaccagcctggccaacgtaatgaaaccccatctttactacaagtacaaaaattagccgggtttggtggtgggtgcctgtaatcccagctactcaggaggctgaggcaggagaatcacttgaacccaggaggcagaggttgcagtgagccgagattgtgccattgcactccaggtggatgacaagagcgaaactctgtctcaaaaaaaaaaatatatatatatatgtaatatatatattttatataaaaatgtgtaatatattttatataaaaatatgttatatatgttatatatatattttatatttttttagacagacacacacatataaaataactattttctgacgttgaaattttcgacaattttcacgttttcctaattccactgagtaatttgtgagtaattgtttacttttttttttctttaaatgttttcaggtatttgactggaatggttgacaaaaggacgcttgaaaagtatgaaagagaagctaaagagaaaaacagagaaacttggtatagtaaacttttatgacacttataaattacttttaaggagacgatgcccacttagtgcttttggagcctgttaaaatataaattgttgaagtctaaaatcgtatcacaacaaaggaaatttcccctctcctcataatacacagtagatgagttcctaatgctttaataacttacacagagaaatttggaaacaatccatatatctggtgatagacttgttgaaaatactataaaccatccatttaattgggtgattttgcaaccactgaaaacttacatttacataatttatagtaaccatgaatagaacttgcgttgtggtggcagttggggggaagcaggaaacatccctgtacttaagatatgaccattatataaataaatgctggaaataaaatggaatggaattattgacagtggttgcctttgaatggtgagacagtcaacttttttgttttctaaccttgttacttttatttttaaaaagttagcaagccttacctcaatgggatattgacagtcatttttttaaaataaaattatattcctctaaaataagcgggagaaatgctagtcagtgttgttataaaaaattgaggacatgctgtgaagatgatgaggtaagctaaattaatgcccactattacggatggtttgaatttatatgaatttttgcctggcagtgtgatattgaagcaatttttagcaagtaaccattgctcccacatggtgcgttagtggctttcagttttcaaaaatatctgaggacagttattttttattttattaaaaagttttagtcctggcacagtggcttaagcctgtaatctcagcactttgggaggccaagacgggcggatcacgaggtcaggagatcgagaccatcctggctaacatggtgaaaccccgtctctactaaaaatacaaaaaattagctgggcaaggtggcaggcacctgtagtcccagctacttggaaggctgaggcaggagaatggcgtgaacccgggaggcggaggttgcagtgagccgagattgcaccactgcactccagcctgggcaacagagtgagacaccatgtcaaaaaaaaaaaaagaaaaaaggaaaacaacttttattgggccaggcgcggtgactcaagcctgtaatctcagcactttgggaggcaaggcaggcagatcacacctgaggtcaggagttcgagaccaccctggccaatatggtgaaaccctgtctctactaaaactacaaaaatggccgggcacagtgtctcacgcctgtaatcccagcgctttgggaggccgaggcaggcggatcacctgaggtcaggagttcgagaccagcctgaccaacatggagaaaccctgtctctactaaaaatacaaaattagctgggcatggtggcgcatgctctaatcccagctactcggggggctgaggcaggagaatcacttgaacctgggaggcggaggttgcggtgagccgagatggtgctgctgcactccagcctgggcaacaagagctaaactccatctcaaaaaatatatatacaaaaagtagccgggcgtggtggtgggcacctgtaatcccagctacttgggaggctgaggcaggagaatagctggaacctgggaagcagaggttgcagtgagccgagatggtgccactgcactccaacctggccagagcaagactcccatctccaaaaaaaaaaaaaaaaaaaaaaaaaaagaagaagaggggtgggggtgccgggcacgacctaggctctgttgcccaggctggagtgtagtggctccatctccactcactgcaagctccacctcctgggttcacaccattctcctgcttcagcctcccaagtagctgggactacaggcacccgccaccacgcctggctaattttttgtatttttagtagagacagggtttcaccgtgttagctacgatggtctcaatctcctgaccttgtgatctgcctgcctcagcctcctagaatgctgaaattacaggcgtgagccacagcatccatccaaaaaagttttattattaccctttaactctcaagacagccattatttgtgttgtattttgtgccatgtgagtataaaaatgaagtaataagggagctcattatcacttaacacacagtgatattggcatttgtagttagtctttctgtgtagtcaacttgccataaagttctagatggtataattgactgcgtttatataaaagctctaagggtttgaatcaaaataatacattctttcagttttattttatttatttatttttttgagacggagtctcactgtgtcaccaggctggagtgcagtggcgcgatctcagctcactgcaacctccgcctcctgggttcaagcgattctcctgcctcagcctcccgagtagctgggactacaggcgcccgccaccatgcccagctaatttttgtatttttagtagagatggggtctcaccatgttggccaggatggtctcaatctcttgacctcaggtgatccgcctgccttggcctcccaaagtgcttggattacaagcatgagccactgcacctagccctttttttttttttttgagagacagagtctccctctgttgcccagcctggagtgcgatggcacgatcttggctcactgcaacctctacctcccagcttcaagcgattgtcctgcctcagctttcgaaatagctgtgactacaggtgtgcaccactatgcccaacttttgtatttttagtagagatgaggtttcatcatattagccaggctagtctcgaactcctgacctcaggtgatctgccagcctcggcctcccaaagtgctgggattacaggcgtgagccactgcgcccagccctattctttcaatttctttgttttcttttgagacggagccttgctctgtcgcccaggctggagtgcaatggcacggtcttggctcgctgcaacctcctcctcccaggttcaagcgattctcctgcctcagtctcctaagtactacaggtgggctcctccacacccagctaatttttgtattttcggtagagacagggcttcaccatgttggtcaggctggtgtcgaacccctgaccttgtgatccgccgccttggcctcccaaagtgctcagattacagatgtgagccaccgcacccggctcaattttcatttcaccaatcttgttcgtgatttaggtgttgtgtgtcatccattatatctttaatggtgaagaatatcctaaaaactctgatgttcttaggaatattgttctttttttaaaaattatttcaggtacttgtcttgggccttagacacaaatcaggaagaacgagacaagggtaaaacagtagaagtgggtcgtgcctattttgaaaccgaaaagaagcatttcacaattctagatgcccctggccacaagagttttgtcccaaatatgattggtggtgcctctcaagctgatttggctgtgctggtaagaaagacatttccagtccatctgtatatttgttagtagccccgcttatatctttaaatttgaatttatcttctaaaagctcaaattcaggttgcagtgaaatataatgatgtacacggtcacagttttcatcatactaatctctcttcaagaaatcttcaaaatttgatttacttctgaaaatacgtttcaccttttctctcctgttgctattatctattaccatgtcagaacttagtctccattaaatgccaagcccaccgttaggcaccatgggtaaaaaatgaataggaaaccatctgtttcatacggtcttcagtcattttgcgcttttcacaatgtactggtagtagatcacaattttttttcctttgtagttacaatagctagaaagtaaatgttggaattttaaaatatgcaggtatactagattttgggaatgtgggggattggaagcatctagacattgtttgatttgtgacattcaaaagcaggtacgtcataactcgtttgcttctattttcttgcaaaaaaaaaaaaaaaaactcgtgatataactgaaaggaaagatgttttactgccataagggtatgcctgaaggcgaaggagtaaactgtttcctttcttggaattaggtaatctcagccaggaaaggagagtttgaaactggatttgaaaaaggaggacagacaagagaacatgcaatgttggcaaagacagcaggtgtaaaacacctaattgtgctaattaataagatggatgatccaacagtaaattggagcaatgagaggtgagcgtagatgtctggtattttatgttagtgggattaaggatggttttgttattgtacgactttttctctagggtttttctaaaccttaatctgtttacttaggaaactagagttcttggtttacattataattgagttattttggttacattataattgcagatatgaagaatgtaaggagaaactagtgccatttttgaaaaaagttggcttcaatcccaaaaaggacattcactttatgccctgctcaggacttactggagcaaatctcaaagagcagtcggatttctgtccttggtacatgtaagtaactgttttttcctttttttaaaaaggaaaaggatgttattacttaaattacttataaagacatatgctgagtaacatgttaacatatgcttttgagcatatatctttataagtaatttaagaaaatattaaatgtaaccttggctttaaaaatactaagatctttgcccatttttaaactgggttgtcattttgttactgagtcctaagagttctttttaatactggctaccagtcccttatcagctacaatatgattatagcaagtattttctcccactttatggattgccttttttcacttctcgatggtgtcctttgaagcacaaaaggttttatttttgaagttttttacatttagatatgtatttgattttgagttaacttttgtgtaagatgtaaggtctatgtgtaggtttgttttgtttttgtatattaattgtttacacacaatttgttgaaaagactattcttttttcattgaattgatttggctccctctttgaaaatcaaatgaccataaatacgagtttattcttgaactccgtgtttcttttttttggtttgtttttttgaaacaggttttcactctgttaaccaggctggagtgcagtggcatgatctcggctcactgcaacctctgcctcccagctcaagagatcctcccacctcagcctcccaagtcgtagggactgtaggcacatgccaccgcacccggctgatttttgtatttttagtagagacagattcaccatgttgcccaggctggtgtcgaactcctgggctcaagagatgcacctgcctttcggcctcccaaagtgctgggattataggcatgagccactgcacgcagccaatactgtatgtttaaaggggaaattattttatagaatcttggtttcatagctggaaaagtccataaaaagtaatatagtcaatttattacatgtaggctatttgctataaaatatttctctaaattttaataagtttatgaggaagccttatactgagcagttttataatagttttctgtggaataagtgagatgaaatggataataaagtggttgaatgggaagaatacatgagtagaatgaaaatattattagaagctgtttatagtcatgtaacttaacattttgatatttatgttgacttcctttaatggctttgttgttatgttctcagtggattaccgtttattccatatctggataatttgccgaacttcaatagatcagttgatggaccaatcaggctgccaattgtggataagtacaaggtacccaaaatgttaaagaaattgggtttcctgggaggggaaatcattgttgtgcattttgtttctagttttgaaaactttttttcttttcttttctttcttgttttttttttgacagaatcttgcactctgtcccccaggctggagtgcagtggcgcgatctcagctcactgcaagctctgcctccttggttcaagtgattctcctgcctcagcctcctgagtagctaggactacaggctcccgccaccacgcccagctaattttttatatttttagtagagacggggtttcactgtgtcagccaggatggtctcgatctcctgaccttgtgatccacctgcctcggcctcccccaaggtgctgggattacaggcgtgagccaccgtacctggccttcttttttttttttttttttgagacggagtctcactctgtcacccaggctagagtgcagtggtgtgatgtcagctcactgcaacctctgcctcccaggttcaagagattctccagcctcagcctcctgagtagctgggactacaggcgtgtgccaccgcatccagctaattgttttttgtatttttagtagagaccggttttcaccatgttggccaggctggtctcgaactcctaacctcaggtgatccgcccgccttggcttcccaaagtgctgggcttacaggcatgagccaccatgcccggtccaaaaactttattaacaacataacattgatgtctttttcttaatggctttatattagtggtatagatagaccataatttattcaacaagtttagtttattttagctgtttcccgatgagccagggatcatatcttagtgataaactcatagatgtaactgctgggctcaaaggattttcttattaaagttgatgcatattggtaaatagcatcgcaaaaatactgtgctaacttctgtcaccactagcagcatgagtgttagttttaccacagcctcaccagcactggatgttcgtcttaaaaaaaataaacttccttgtttttaactggatttccaacttgaatttttaagttttgcggtatcaatgtatgtaatgttttcccctcctcaaatacattattctttaattagctccgttctaaatttctttaacaagtattgctttttccaattttatatatgaggaaacaggcctagagatcaggagaacctgaatttgtacaaacagttcagatcttccaacataaacttctgtgttgttttctgcacctttttttttttttttgagatggagtctcgctgtttcaccaggctggagtgcagtggcatgatctcggctcactgcaacctccgcctcctgggttcaagcgattctcatgcctcagccttccgagtagctgggattataggcaggtaccaccacacccagctaatttttgtatttttagtaaagacggggtttcaccatgttggccaggatgggctcgatttcctgatcttgtgatccacccgcttcggcctcccaaagtgctgggattacaggcgtgagccactgagcccagcctttttttttttttgagacagagtcttgctcttttacccaagctggagtcgagtggttcagtctcggctcactgtaacctctgcctcctgagttcaagcgattcttctgcttcagcctctggagtagctgggattacaggcattccaccgtgcctggcaattttttttttttttgtatttttagtagagatggggtttcgccatattggccaggctggtctccaactcctgacctcaggtggtccacccacctccacctcccaaagtgttgggattataggcttgagccaccacatccagcttgtgccattttctttttaaattataggcatactgaattattaatatgatcatacatatgcttatgacacaaattattatagagtatttgttactgagtttaagatgaacctaagccttctacttaagcaaatgattttcctttatgaataagcagtgtagaatttcactttgggctattgagctgttatacagcaccaagaagtctgaaactggattttattttacatttgatcaggatatgggcactgtggtcctgggaaagctggaatcaggatctatttgtaaaggccagcagcttgtgatgatgccaaacaaggtaagaatcggttatgctgtttcctatctatttattgattttttttctttttctttaagagatagggtcttcttctgtcaccgaggcaggagtacagtggcgcattcatagcttattgcagcctcaaactttcaagcaatcctgccacctgagcctcccaagtagctgggactataggcttgtgccactctgcctggctaattttttttttttttaaataaaaattgagatggggtctcactatgttgaccagactagtctctaactcctggcctcaaacaatcctcccatcttggcctcccaaagtgctaggattacgggcgtgagccatcatgcctggcctcctttgtgtcatttttgactgttcagttgctgagatttgcagataacctgaggcagggcttctctaacagctccaaagatgttgcttatgcaggaccacagacttgagtcatcagtaccttcagatggagattttgctagatttcagtgagaatttatttaccatgctaactccaggcagagtaaattagaaaaagaatccattatcaaatgtaatatttagacataattggcaccttacaaattgtattatctggtttcttgatgccttgtgcattggagatgagaatatatagtatcttctaaaatgtttacattttaaagcctactttttcctattatctttgcaacttggaggctaacatatgagtgaaaataattctcaggttgagttcttagttagttgttgctgctgttgttgttttgagatggagtctcaccctgtcgccaggctggagtgcagtggcacattcttggctcactgcaacctccgcctcccgggtagctgggattacaggcatgcatcaccatatctggctaatttttgtggttttagtagagacagggtttcaccttgttggccaggctggtctcgaactcctaacctcgtgatttgcccgcctgggcctcccaaagtgctgggattacaggcttgagccaccacacccagcccttacttactcagttttgtctgtagagttgtcccaaaaattatggagatgagccaggcatggtggctaacacctagcactttcgaagtttgaggtggaccgattgcttgagcccaggagttggagaccacactgggcaacatagggagaccctgtctctgtgaaaaataaaattagccacttgtggtgatacgtgcctgtggtcgtagctatttgggaggttgaggcaggaggattgcttgagcccaggaagtcaaggttgctatgatttatgagctctgatcacaccactgcactccaggctgggcaacagaacgagacctttactaaaaaaaaaaaaaaaaaagctatggaagtgtaaggcagcttggtggttgcaaggggctgaaggagggaaagtaaggagtgactgcttaacgggtgtaggatttcctttttgggacaatgaagttttagaattagatagtggtattgattgtacaacatggtgaatacactagatggcactgaattgcaaactaaaatggtttaaaagttgaatgttattacttatattttaccagaatagaaaaaagtatgattctctaaacataagtgaagttagtgcccagacatatttgcaagtgaggggccttagtaactagtatagagaaagtagctgttctctgtggaagctatcacttgatactaatcactaggcaggtatagaatgtcctagagttgagcaagcctcaaaaactcacttcagtttagtcctcctgaatctcagtggaacagagctagaatagtttaaaagacatagaggcagctggtgggtgggccatgcctgtaatcccagcactttgggaggccaaggtgggtggatcacgaggtcaggagttcgagaccagcttggccaacatagtgaaaccccgtctctactaaaaatacaaaaaattagccaagtgtgtcagcgggtgcctgtaatcctagctacccaggaggctgagacaggagaatcgcttgaacccgggaggcggaggttgcagtgagctgagatcacgccactgcacaccagcacaggcgacagtgcgagactccgtctcaaatatcaaataaaaaagaggccagacttttacaataaaaaattcatggggttggcaacctacggaatgagagaaaacatttgccaatcatgtatctaaatatggggttaatatctagaatatatgaagaactcctacaagtcaacagaaaacctgaacaacccaattcaaaaatgggcaaaggactgcaatagacatttttccagagaagatgtacaaacagccaaaaagtacatgaagaaatgcctagcactgctaactattagggaaataaaaatcaaatccacagggctggacatggtggcttatgcctataatccctgcactttcggaaaagctgaggcaggaggatcacttgagttttgagaccaggctgggtctctcactatgtgtgagatcccatctcaattaaaaacttttttttggaaagcagagtaacacgtgttggcaaggatgtggagaatttggaacccttgtgcactgttggtcatgtaaaattgtgccaagtgccgtgaaaaaatatagcagttcctcaaaaaattaaacatagatttcccacataatccagcaatactctttctgagtatatacccaaaagagtctcagatatctgtataaacatgttcatacatgtattattcacagtagccagaaggtggaagcaaccctggtgtccataaaggatgatggataaagaaagcgtgttacatacacgtaatagaatattgcacagccttaaaaaggaagttctgacacaggccacaacatgaatgaaccttgaggacattatgctatgtgaaataaaacagtcacaaaaagacaaataccgtatgattctacttaaatgaggtacctggaatagtcacatttgtcacctgaaagtaggatggtggttgccagggttcgggtgaacggggagtttcagttttgcaagataacaagatttcagagttctgaatattggttgtacaatattttaaatgtatttaatttaggtgtactattgaaatgtacacctaaaatggttatgatggtaaattttgttacatgtattttaccacagtaagtaattaatgggttaaattaaaaattggttattttttactttgatattttatgaaactgttctgagatacagattgttttttgttttttgttttgtttttttttttttttttgagacggagtctcgctctgtagcccaggctggagtgcagtggtgtgatctcggctcactgcgacctccacctcccaggtcccggttcaagcaatgctcctgcctcagcctcccaagtagctgggattacaggaacgtgccaccatgcccagctcatttttgtatttttaatggagacaggatttcaccgtgttggccaggctggtcttgaacttctgacctcgtgatccacctgccttggcctcccaaagtgctggggttacaggcgtgagccactgcgcccagccgatacagattgttttttaggtgagtgacttctaaactcttgtttctttcttttttttttgagacggagtctccttctgtggcccaggctggagtacagtggcgccatctcagctcactgcaacctccacctccagggttcaagcagttctctgcctcagcctcccgagtagctgggattacaggtgcctgccaccacgcctggctaatttttgtatttttagtcgagacagggtttcaccatcttggctaggctggccttgaactcctgaccttgtgatccacccaccttggcctcccaaagtgctgggattacaggtgtgagccactgtgcccggccttttttttattattattattattattttttattttttggagatggagtttcgctcttattgcccaggctggagtatagtggcacgatctcggctcactgcatcctctgcctcctgggttcaagcgattctcctgcccaagcctcctgagtagctgggattacaggtgcctgccaccacgccaagctaattgttttttttcttttgtatttttagtagagacagggtttcaccatgttggccaggctggtctcaaactcctgatctcaggtgatcacccgcctcggcctcccaaaatgctgaggcgtgagccactgcacctggcctgcatagcattattgatgtagtaaatgtcactgatggtaaatttcccgtgtatctcctctcaggtcacttgttcttttgcttcaccttgctgccacagccagcactggcagtactgaggagcaatactggcatcagaactggaggctccataactattttatttttacattaaaaactttttttttttttttttttaaagacagggtctcgctgtgtcactcaggctacagtgcggtagtgtgatcatagctcactgcagccttaaaacacctgggctcaagcagtcctcatgcctcagccttccaagtagcggggctaaaggcatgtggactacccagctccgtggactattttgttagaaacaaagagtttaggccgggcacagtggctcacgcctgtaatctgagcactttgggaggccaaggtgggtggatcacctgaggtcaggagtttgagaccagcctggccaacatggtgaaacctcgtctctactaaaaatacaaaaaattagccaggcatggtggtgggtgcctgtaatcccagctacttgggaggctgaggcaggagaatggcttgaacccaggaggcagaggttgcagtgagccaagatcgcaccactgcactccagcctgggcaacaagagcaaaactctgtctcaaaataaaaaaataacaatgctatgcagccatcatcactatctaattccagaccatttcattacaccaaaaggaaatgatgtattcattaaatagttgatagacttttaaagcttagttcaataatttttaagtagtgcataattccgatatttggagattgataggtaatagaagacaggtttattaaatccttcatagaattccataataataaaaattatatccataaaactgaaatccaaatattaaattgtgttttcgattttgaaaaggtaaaaaaaggcaaatgctagtgtatacagtgttctagttggaaatgattagaatgtgatatttaaaaggtgacacgttaatactttaattggcagttatacttctaggatatgatttttgctgatcatatctaggctaagattttatgtcatacaaacataagtgtttacagtcaaatcttgcaactctttattgagcagacagacattcagatcattttatgttgcgtaatgcagtgaatgtgtcagaaaacctccagtcttgttttcttttaaagcacaacgtggaagttcttggaatactttccgatgatgtagagactgataccgtagccccaggtgaaaacctcaaaatcagactgaaaggaattgaagaagaggagattcttccagggtttatactttgtgatcctaataatctttgtcattctggacgcacatttgatgcccaggtaaacaaattattgttgttgtcatagtgggttttaatgtctaaatgaaattagaatatcagtgccttttgtcctgattatttgtgacatgccagttaacccatcttagtgtagagaaggggaatggaaatattataagccacttatatatcataaccacaataggcacctcatacaaggtcttcaagctggtacaagtgcttactggataaggagtattctttgtaagttcctttttatgtttgatctcctgatgatacattctacagtatctaatattcactttgaccagagcacagttactgtggaagtcatggtttatgtgctcattgacagcacatagctttccagacaagaaatcacacaggtttccctgttattaacaatctaacctccctgggagaatgacagagtaagtgactggtgtgaataacagaattttttaaagttcttttctaaggtatgacaactaatcaagttagattttgatgccagatgtaaggttgtttactttactggaccttggatattgagaaatggataaagctggataagtttacatctaggtagcttctgagcggtaaaaattagcttagttccttggggaatataaggaaagtcttcccagataagaaagttggcctgctgtcttttgttttgtttggagatggggtcttgctctgtcacccaggctggagtgcagtggcgcgatcttggctcactgcaacctccacctccgggattcaagcgattgtcctgcctcagcctcctgagtagctgggatttaggcgcccaccaccacgcctggctgattgttttgtatttttagtagagacagggtttcaccatgttgtccaggctggtcctgaactcctggcctcaggtgatccccccggcccccctgccgcctcggcctcccaaagtgctgagattacaggcgtgaaccactgcgcccagccagcctgccgtattttgaaagttgaccagggacttgccaagaagataaatacaggataagatactgaaattcatgctttgagttcaagcagcctgacccatcctgtgaacaaaattagtaagacaaacctatcacctctaacacaaaaatcacttaagttgatgtcctagtgagatggtaacactaattcttgggatttatatggcgcttgagaacattgaattcttatttaccctaaggctaaagataagaatgtgtgtgtttgtttgacagatagtgattatagagcacaaatccatcatctgcccaggctataatgcggtgctgcatattcatacctgtattgaggaggtggaaataacagtgagtttaagataattggtttatttctgttttaatactgttttatcttcataatttctaatcagcaacagtgatgcacttttatttctacacctgttcttaaagattattttatttggcattattctgattttctcatactcttttcttggttaggccttaatctgcttggtagacaaaaaatcaggagaaaaaagtaagacccgaccccgttttgtcaaacaagatcaagtatgcattgctcgcttaaggacagcaggaaccatctgccttgagacctttaaagacttccctcagatgggtcgtttcaccttaagagatgagggtaagagcttttaaactgacgtctagtagtatatccaggatacctagctttggtcatcttcatcatctcagtacagtacacattgcaacaggttcacagaaaacttcgattcacattcttattcgtatgagtgttttatgagttgaatgtattgaacagaattgaccacgtgctttagtagtaatgccaaatctagtaatgctctacgtgaagaatcttaattttgatgttttgtgagtagtggatttggagggctattttgtttactaagatatttctatgatgtaatcctttgtaatatgtctagcgattaaaaggaacatagagattgatttttttttttacacctaatttttcagaggtctaatctttgtgaccttttgtgtgcatccatttctgcctacctctgggtgacgcagaacaactaacattcccatcttggggtcatgaagttctttggcataaaaacaaaatgattgttatgaaacgtttccttatgagcttttaatattcctgtccttttcctttccctttccctttccctttcctcttccctttcctttcctttttttgagatggagtctcgatctgtcacccaggctggagtgcagtggcaccatcttggctcactgcaagctccacctcccaggttcacgccattctcctgcctcagcctcccgagtagctgggactataggtgctgccaccatgcctggctaattttttgtatttttgtagagacggggtttcaccacgttagccaggatggtcttgatctcctgacctcgtgatccgcccgccttggcctcccaaagtgctgggattacaggcgtgagccaccgtgcccggcccagctgttaatatttctaacttagataaccattttaagactatagaagactttacataaaactttatagttccattgaaatacagaatagtcatttcacatgttcattccaattccatttagcaaaaactactttgtatctacaaagtgtcaggaactgtgctaagccctggtgatgaatacagttcctgaactttacattggatgaaattgtataaagacagtgtttattttactttaaaggcccagaactcttctggttgatagtaaaactggttattgggtttatcttattaatataacaaaatgatagttttagtttaccactcagaacctgataaaatcaggaagacagaagaaaagcaattaatgtagcaggaattcttaaccctagaattattttttcctaaaagctaacttggctttaaaaaaaaaaaaaaaaaaaaaaaaaaaaaagctaacttggcttttaggttttccacaagacccaatgggttttgtatcctttcagtccacaggattactaccagaaggacgtgttcactgcactgtagtcagtggtgattgctgtgccttttcacagttacttaaggataggttttgggatttttttttttagcagctttattgagatacaatttccataatatgaaattgacctgttttaagtatgtaattcaatgaattttagtatgtttacagaattgtacaaccatcaccatatactaatattagaacatttagaacacctaaaaagaaaccttacacctgttcataatcaccccttattcccacctccaccccaggcaaccatttttcaatttgtcttttatagacactccataaatagaattataaattatgtggtcctttgtctagtttattttacttagtgtgattttgaggttcaaccatgtaacatgttatttattcctttgtatcactgaatagtactccactgggtggatattccacaaatacggatattcccttttcttatttttaatccaaagaggttttttggcccagtgtggtggctcacccctgtaatcccagcactttgggaggccgaggcaggcggatcacctgaggccaagagttcaagaccagcctggccaacatggtgaaaccctgcctctactaaaaatataaaaattagaatgggcatggtggcaagcacctatactcccagctactcaggaggctgaggcaggagaatcacttgaacccagaaggaggaggttgcagtcagctgaagtcgcaccactgcactccagcctgggtgacagagtaagactctgtctttatgcagtggctcatgcctgtaatcccagcactttgggaggctgaggcgggtggatcacctgaggtcaggagttcaagaccagcctggccaacatggtgaaatcccgtctcaactaaaaatacaaaaattagctgggcgtggtggcaggcatctgtatctcagctactggggaggatgaggcaggagaattgtttggggggtacggggggagataggtttttgatacagggaaccatctctttaccagcccccccaaataagaccctcttattaagactacctaaatagaagtatcatgggtttggcagtaaagctagttaattagtaacttacattgtaaaaaatatttttgtgatttaaaataataagttttaatatcttatatagacttgctgttaactactgaaagatttttttaaaatttcatttctaggtaagaccattgcaattggaaaagttctgaaactggttccagagaaagactaagcattttcttgatgaccctgcacaatactgtgaggaaaattgactgcagaagcctacttcacaccgccttctcttattttctgcccattgataaacctctccccatattttgcaaagaggaaattcacagcaaaagtccacattatgtcagctttctcatattgagagctctgctatgccactgttgaatttttcccaagattcctgtccctagccctcacttcaaactctgcttccttggacagatttggcaatagctttgtaagtgatgtggacataattgcctacaataatgaaaacctacaggaatttttttatttttcattttccccttaggcatatttagtatttttcccccaggcagatcattctgagtgtgcgagtgtgtgtgcacatgttacaaaggcaactaccatgttaataaaatattcaatttgaaatccttttcggtatttgaattgcttttgaataatgttttttatctggatgtaacattgttgcattagctttttaactttcccaagtaattgaatacattttattacttggacttttataaactctttccctacccactataaatgagacattcacagcgttcaagtttgtattaaaggaaaggattagtttgaccccttcttttgatggttaatgcatacatgcagttaaatccctttatgcaaatgtgacactgctttactaggtcttttagttatttatttattttttttttttttgccaatttatattgtaacatgatttcttgaacacagtaagttgttttaaaataaaagaacagcatactgtagtttttataagtaaagcgtaatgaaattgtacccctagagaaaattccattaacttgttaaattagtggaattaacaacaaataaagcatgtttgagacctggcaaaaattcctctggtagtatttataaatagagctgcatgcctctagtatgaaaaccgtatcagttgcaagtgccacttctacaagttactcagtttactctttgtatcagtaactttaaaggttggatgatccttgctggttaaagctaaatctcaacctagcaactaaatgaaaatatttagaatcatcagaatctgaacagactaaaattatcagcgataagcagaatcaagcagggtataagttttatctcaattatttgaaattgactgagttttcttaagtgtaaagctgaaatttgctaaccatgtttttgatgaaccacagtgcagcattgtgtgggttttagattgaatgactctctgctataattatcatgactttgaaatttttcatgagaataaatgaggaatggaggcaatttgtgggtttatccaaagcccccttgatgttgagtgttgccattgatcaaagatagcctcttttagattgtgatttctctctaaataagatactttgtatatttaatgacaagtctcttccctataattttgctcctcagaaaagaaaagcctagacagactgtatttccagtcacagaacataaaacttaatctaatgggtgttttgttttgttttgagacagaggctcactctgtcacctaggctggagtgcagtggctcgatctcagctcactgcagcctccacctcccggattcaagcaatttcctgcctcagcctcttgagtagctgggattacaggagccctccacgaggcccagttaatttttgtatctttagtggagacgaggtttccccctattggtcaggctggtctcaaacttctgacctcaagtgatccactcgcctcagcctctcaaaagtgctgggattacaggcatgaggcgccgcacttggcctagtgttttcttaactgtgaaattcccattcatttcttgaatgaggctacatcttatggacagagcaaagttattgtcctacagattcttaaaactataattatggctattgcatgaaatttaaatagattttattatgtctgcaaatctctgggcttttatttttctggaaaatataggagctttaatcaaaacataatagttctttttgtaattccatgttaataaaaacaaatactagcaattgcttgaattttaatgaatatttaaaagttcaagagccacggaaatcacttccagagataagagttccctttctaaatagaacacatttttaaaaaataagttatgtttgctactaaaacatttacactgttagactattatgtgcatgttgccaagactcttaagtaacttggatatcaactgtgaagggcctacctctaaaaagtaacaggtcatacaaatacaaatgtaactgtaaaaattccactggattcttgcatatttgcaagattagattattcaaaagaaatttcagtgctaaaattaaccagcaacataagttctatgggctttgaaaattgttctcatctttttaaagttgatgcattttcaatcctgcttacacaggctgttcatttggataagtaaataaaatgtctaaggtgaacttggcattatgtggagatgttggaccgttatagagcaatacaaattcctatgctgtcattctgttttctgcaaatgcaaacgtgcttatatggtcaacagtgcaaaaatagggtagttggctgcatatttagggtattacctaagcatttgttctctaacgttgctctactagaatgatttttttcttgcatcttttcacattaatgatgttctttatataactttcatgcgattatttagttttttaaattaataaagtgaatttaagaaatattgaaataaacatctaagtaattgccattttaaacccttgtttcttactgtgggagagggggaaatacagcactcatttcttgtttttaatttgcagaagtaagtgaaaatctatgtaaaatcaaaccaaaagagttggactgagtgtgtattgtcttgagattaagtgacaaatagtaaagtgttactgagtaattaagcccatgtattttttttttgtgagttgaaaatctttgaaatatgtgataaccgaatgtcaaaagttcctaaactctaacagtgcaggttgttcactgtaacgaggtaactcatatttgctggttacataaactacaagtactgctctcacaatatgggactttgaactgtgatgtagttcaacagttgccggcatcctctcagctgatacgctgcgaatattttgggttagacttgcagccagatgcagttttgcaacccaagaaaaaagttgaacctatgatcaaaaactgctcccaagatgaacctggaaaaaaatcagctaagctcccttggcgatctgcaggaacactagtaatgactggaattactccgtgatctttgatgactattacacataacagcactctagcaccttttcttactggcatggacttcctcatggactgctacttcatggatgatagcttcattgctttgggtagggatttaaggtagtcaaggggaaaatacgcagttttattacaggtcttaacatcaggcaactttcaactttaaaaccctttgtgaaaaatgtggttatagcactatagctctgattttaggatggttaaatgttatattcattgttggcttaccttatcaaactgtgccattaatcctttcacagacataggtaaggaagagaacaaccagtggattcaggggacaattatctatctccaaataataggcttttatttcttgcagctaactttttcagtgattctagcagatgccatctagtacatccttgatcttgtttctttcgtgagagatctcgccatggcagcatcttgttaagtaagtgtaattgcacatgcacaaaagacttaactagctttacatttagcagtcagttggttagattaggtttcatagtaaatgaataggaatagaaagaataggaagtgtttttattttccagtagtaattccgtggattccatttgacccagtttactatcagttcagttcaggtagatttggttcaacttttggtggtttttggctctaggatattcttgactttaatatcctagaacttactgagtcttcccttcaataaatacacttctcacatacctctaatcctatgcttccttgaaacaataatgctagctgagttgtttactaaggattattataagggcctgaaggtgtgggagtggagattaattaaaacctttatgttctccaatataagggaaaagcaggttggtactacttctgattaggcagaaaacaccaggattccttaagtgatccttgaaatggttattgttttctgccttgtcacatttgccactgtgccctttaaaacgatgtggaaacctcaggtttgtggacagcacaggtggaatgacatcttgtgcttcctgaggctcccctctaccaggcacattagcttagtgcttcagatgtcagcccaagtccttgttacctccttttcctgctgcccagggaagagtgtgtgtgctggagctggagcgcttgcactcttcaggtgactattctcacctccatttcctccacatgcattaggtgaaactgaggtctaagcctcctgcaaggtctacattttaaggactcacacatcaggctctcagaaatgtacacaggtattagttctgtttgttctaaaggaaatgtgggtatctctcaggccaggacttagtgactagttttcgctagacagcaggttaatacctagatctcatttaaaaaaaaaaaaaaaaaacaggattaaagggaactgatcaggtttgttgagttttttagcctaattccaaagcatggaagagtgctctaggtaggaaagaaagctttttcttacgatttgtagctacctactgtgcctgacttggtgcctgtgtgaggattaagcccttagtctgctcttgcaattattcaaatgacaaattaaatttgcttttgtaataacaataaaagttgtcatcttcccttttgaaggatttgtcgtttgtaattacctgtgttgtaacaagcaaaaaccatgcccttttttgtacaatccttttatttttgtatcaggtactggaaccatctaccaaaaggtttgttggatggatctaataagctctgtcacataagggattcacaaacgtcatctgcttgcatatggcatgcaagtcttttgtataatgtatacgacaac

SEQ ID NO: 6593 - DNA, 855 bp, Homo sapiens
ttatccttaaacttttcttgaaaatggaaaagcaaaaaaaagttaatctgtattgtgttgaagtacagtttctgcctccttccaaaccaggttcaaatgcgtttcccccctgtttgttaatgtcctgctcatcccacagcttggggtcatcttagaccttttactctccctttctcccaactcctgtcaggtgtagcccccatcccctcctagttgtattgcttggttgtctccatggcatgctttcttgcagtggtgatgtgggtcttcctgcctgtggggtcttgcccactctagttcatgtagtttaagctgcaagaaaaagatcttcctaagtgacagtctgagcctgtcacttaaaaaaaaaaagaaaacaatttggttgtcctttacctatcagggacaggaaattactttactcaacatttgatgctattgaaggttgggcccaaaacactttctcttgactcttacaggtattgatcctttccgggcaatgattttacaggttacaaattcattattttttcatacttgctgtgcatgattcatatgatttaattctttagtatcgttttctgtcgtggagattctttaaagcaggggcacgttcatattggagtataatttaggtttgtctgtatctgacaaactaaaatccaaaaagcagacttagatatttggttattagtatgtatttctcctacatctcttccagtaatgtcataagtaaatttgcagtgtggcaactggaaactggattgttgcttggttttagagttctagtataggaaaaaactggcatcattggaatcaccttttctgcagatatttttaatggcttatatatgtttc

SEQ ID NO: 6594 - DNA, 177 bp, Homo sapiens
tactaaaaatacaaaattagccgggcatggtggcatgcacctgtgatcccaggtactcaggaggctgaggcaggagaatcgcttgaaccggggagatggaggttgcggtaagccaagatcgtgccattgcactccaactccagcctgggcaacaagagtgaaactcagtctcaaaaa

SEQ ID NO: 6595 - DNA, 729 bp, Homo sapiens
gttgattctgatgtgcctgtatgttagatggtagtgattacaggatctgtttcctaaggcttttggtgggaatgagctagcagtcggcacttagggctcaataaaaattagttaaagcaaattgctaccccctccatcccccactccctacacaatatggatttgtgagtacttttatccttgtctggcccataatagatactcaatacatatatatatgtattcatttttattaattttttttttttttgagacggagtttcattcttgtccaagctggagtgcagtgacgtgatcttggctcactgcaacctccacctcccgggttcaagcgattctcctgccttggcctcccgagtagctgggattacaggtgtatgccacacccagctaattgttttgtattttcagtagagacagggttttgccatgttggccgggttggtcttgaactcccgaactcaaatgatccccccgcttccgcctcccaaagtgttgggattacaggtgtgagccaccgtgcctggctgatactcaatacatattgataggattgagttggagtagttacatagcagatggagacacatttgttgaatacgccaggagttctttaactgacactaaacaaattattctcccatttcctcccataaactcctcaacaatcctctcaggtagatggtatatcatttccacaatttcagtggaataagtgcatgcacagct

SEQ ID NO: 6596 - DNA, 530 bp, Homo sapiens
aaacagataaacatcaagttgaaacaagaccccactgacacatgggacaaatgtgtcggagctggccactctctgcagggagaaacgcagctcggtttctccccagcttccagaacacccggcagcgcctgctctgccatcttcattacctcaacctccagaaactggggtgcccagggcccaaacccaacgtgtctttcctctcattgatcgcattcagtctcatggctttaaacacaatatcacaccaaatttacctcccgcctgggcctctgccctgtccttgggcctcctgcattttactgcccacctgcacctatgtttggacataaaagaaactcccagcgccacctgtaatgcggcactccgtagatcctccaagtcggctctgtctactgcaactctgcccatctcagctgagggcagtgccactgtccagtggtcaaaagccctggagtgcccctgactcctgtctttctctcacaccctgtgtctgactcactggcaaattatattggctctacctcgag

SEQ ID NO: 6597 - DNA, 15342 bp, Homo sapiens
gtgaatgcggcatcccacaaatgggccctttatttctgaactgccaccactgcacggataaggccacttgggttgcaggcacactgtggagtgtcaggggacagagaggagaggggctgcacaccaagactgccctgtcctcacggagaggaaaagcggccgcagaagagaatcccgttggtcttgctgtgctggatgaagaaaaggaaggggtggtcggcgcagaagcgggggacgaatctggcacaccgcatcatcatgatggcagctgtggcggctgcagcctccgtgccttcctcattgacctccacaaaagacttgtgcacgaccttggacagagacaggtctgtctgggacattccagagaagtctgccttgcccagctcgaaggcatcagtcatgcccaggttgcgcaggacactctccatgtcgtagctttcctctagtttaaaccgcgggagggacacttccacctcctcttcatccatcatgtccagcctcgtccattctacgaacttctcgtaagtgagttctttctccacctagagggagacagttgaagactttaagacccagggtgctgctgcccagcagggccctgtgctatgctgtggatgccagacaccagtggcagcgtggctatggtcagcagcgctccagtgttaaacggctgaccgcaaagtagggacagcagccacagcagacacccccgagtggctccttgctagcacgcctcgctcacagcttagctgttaccgttctcaagtcagtggtctcgtccggaagcatgatgatcatattcagttccttgccaacatatggaagcaccaagatttgggtaaatatttctcctatataggtcttcttaaaagtagattgcttaaacatcatttgcacaggtttctcctcattctacaaagaaaacagataaacatcaagttgaaacaagaccccactgacacatgggacaaatgtgtcggagctggccactctctgcagggagaaacgcagctcggtttctccccagcttccagaacacccggcagcgcctgctctgccatcttcattacctcaacctccagaaactggggtgcccagggcccaaacccaacgtgtctttcctctcattgatcgcattcagtctcatggctttaaacacaatatcacaccaaatttacctcccgcctgggcctctgccctgtccttgggcctcctgcattttactgcccacctgcacctatgtttggacataaaagaaactcccagcgccacctgtaatgcggcactccgtagatcctccaagtcggctctgtctactgcaactctgcccatctcagctgagggcagtgccactgtccagtggtcaaaagccctggagtgcccctgactcctgtctttctctcacaccctgtgtctgactcactggcaaattatattggctctacctcgagaatataacaaaatctgacctgttccttctgcctctgctgctaccagcctagccctggaatattgtgataatatgattgtgattgttcccagcacagtggccagaggggcccggtagaacctaaggcagatcacattgttctttggctggacacccttccctggctccccatttactcggagcaggagctgaaagtccctaaaaagcctggaattgtgataagagctcgtccccagttccctctccctttgcttatctgctacagtcacagaggcctcctcactgcactgccagcaaacccagttcatctcatctctacgcagtaagcttgtcctccagaacctggagagtgaacttctgcctctttacggtctttgttcaaaaaccaccttggcagagaagctgtccttgatagatcttacctgaccctacactcccaccccaaacacagattcctatcccctcccttggtatgtctctgtaccatttaccactgtctaatatgctcctattttcttatttatgcttgctgtctctcccccaagaaaacataagcttcaccagggcaagcatgctttgcttgttttgtgcatggctgaaaaatacctagcaccatgcctgatacatagaagacactcagtcaggttaggcatggtggctcatgcctgtaatcccaccattttgggaggctgaggcagacggatcacctgaggtcaggaaatcgagaccagcctggccaacatggtgaaaccccacctctactaaaaatagaaaaattagctgggcatggtggtgcgctcctgtaatcccagctactcgggaggctgaggtaggagaatcacttgaacccgggaggcagaggttgcagtgacccaagattgcaccgctgcactccagcctgggagacagaccgagactccatctcaaaaaaaaaaaaaaaaaggcactcagtcaatctctgctgaataaatgataaatgcataaacgaattaatgagctgggatgctaaaaaggccaggcaacatttacacatctcaccagaaaaaactgcactggtcaccaaccccagccagccaatgagaaagactggaggccaggaaccacaccccatccaacaatccccctcagttcctgactcggagctgctcctgtgagttgagtaaataccctgcaataggcacagtcaaagacgccgtatggtccccagtctctggtgtagcacattcttctgtgttaaatggaataaataaaatacactgcggcggcagctttctgctttcacgtggtagaggctcgcctgggctggcccttagcctttggctagagcagtctcctgggcctcggctgccccactcatttccttggccagcagtaggcatgtttcttccataactgaccagacaggaactattttccggtttgtggctacatgtaccatctccgtcacaacgactcagctgttgttacaggatgaaataagtaagtaaataagcatgggccaggcgtggtggctcacgcctgtaatcccagcactgtgggaggcccgggcaggtggatcacctgaggtcaggagttcgagaccaacctgaccaacatggtgaaaccccgtctctactaaaaatgcaaaaattagccgggcatagtggcacacacctgtaatcccagctactcaagaggccacggcaggagaatcacctgaacccgggaggcggaggctgcagtgttccgagatggcaccactgcactccagcctgggcaacaagagagaaactctgtcttggaaaaaataaaaaataaaaaaaaaaaataagcatggctgtgtttcagtaaacctttaaaaaaaattaggtggtgggctggctttgctgtaggctgaagtttgctgacccctgccttcagtaattcctccctgcaccccttcagggtccaaagcctccaatcttgcaatataaaaagatctaaccttagtgactgaatgattcactaaatacacaattatatagacaagttccagtttatatagaaggtaatgaaattaaaataagaatctgtatcaactcaaaatctgtgcccttggaggtacacctctggcctcaggctggtacgctcaatactgcagccccttccttcacccttcttcactgcagaactcagaaagcatgacgggattccacatctccccaaacccacaagacctatagttctggcctacaccatatagaaagcagctttccctttctgaaacgcagaaccactaaggggaaggtttaggctccccttcccctcccttgttccttccccctccctgccaccgggactgctgaagccagctcagccatcttgtgaccatgaggaagaaggcgacgtgctgagaatggtggagccgcctccctgggatcatcgccccagtgccagaccagcccaggtctcacctgcctccagacctcctagcaggggagatgagctcctaggagataaaccatggtgaaccggggtttctgttatctgtagtcaaagcccttgtacatcttgttaatcattaaattttaaagagagaaattattttgccaggggaaaatagcacagttcatttcagaataaagcttcaaagaaaataattctttctgaattgcgaggagaacagacaatgaaaataaatttcttgaaaaactgaaggctcaagttcaagttagcctggaagatctaactatggtcaatgatcaagaatacactgtaattaatctattctgtttactttgtctatgttcaaaaatttctatagttaaagaaaaacaaaacaagagacaataaagaagattcagtgagaggaagataaagggccatcagcaaatgacatcttccacgctggaggtggttaatctcagtgtctatctacatgtttggtttggttgttttaaaacaaaaatctgtacttatccttactatcaagagaggactgaatatcactcatcggttcagcatttactaagcaccagctacgtgtctggcacttgtcagagagtcctccctgctcagcctcaattcagcaggctgagttgttccgctcctgcagtgtggcacggaggccagcaggaggcgcggtagcggggctttcccggacgcccgccagaaagaaaggagtgggtaggtcctgatgggaatgaagctagagaaaaggaggaaatgtccgctagaagatggcacgccatatctggagtctgagctttaagaccttgatcgagcctgagggctgcagcttcagacttgccctgtaggtggcagggcggatgccaggcgcccagggacacgaggccacccaatggatgtcaagcaggaggggcagggacagaaaggccccacggctgcagacgcgggaggccccgagccggagacgctcgtgtgaacacaggcgctgctcctgtcacggccccttactcgccttgctgactttaaacagtctctcctcggtgttctccttgtcaaactgttcatcccagtttcctctgaaatagacagcattcaccagaaccagccttgtcaatggatccactgagcccggagagagcaactccgcaattttacctgagcggaagaattcaagaccgcattagataggggcggctgcggatccccgacacatcaggaatcggctggggccttctccttcagcagtcaagtgcacggatagagagttccactgtcccccaaatataaagggatacgtgtccttaaagcaaaacaacaaaatcttctggtacgaaaaacatcatcaattgaataaaacacacaaagtgaacaaatatgcgttaattatgcaggatgagttcctaacacatgagataagaagcaatcatgggtgcctatgacttaaagacaagaacttaaaggattatcaaaaaggtgggcagtcagaagatgttctttacaagcttaaagaacagttaggccagacacagtggctcacacctataattccagcagtttgggaggctgaggtgtgaggatcacttgaggccaggagtttgagaccaacctggacaacatagtgaggccttgtctcttaaaaaaaaaatttattaaaattagctgggcatggtggtgctacctgtagtcccaattacttgggagactgaagcaggaggaccgcttgagcacaagaattgatgctgtaatcccagcactttgggaggccaaggcgggtggatcacgaggtcaagagattgagatcatcctggccaacatggtgaaaacctgtctctactaaaaaatacaaaaattagcagggcatggtggcacgtgcctgtgatcccaactacttgggaggttgagataggagaatcacttgaacctgggaggcagaggttgcaatgagccaagattgcaccattgcactccagcctgggcaataagagcaaaactccatctcaaagaaaaaaaaagaaaattgaggctgcagtgaattgtgattgtgtcactgcattccagcctaggtgacagagggagaccttgtctcaaaaaaaaaaaaaaaaaaagtttaaattaagaaccacagatagaccagggcgtgacccagtgtcccacagcaatgcatggcaactgtagactgtgctacccaagagggaggcagcttgagatccacactgcgaattttttatgttacttgtgaaaggaaaaactatattaacattaacacactaaccccctcctcaaaattaaaacgtggattgatccagaagaggtataccaaacactgaaaggcatcacgggtacaccaaggaaacagggagaaatcagagagaacagaacacattgagcatttccaaaatgtcaaataatggcaactgatttcagaagcagattttttaagtttgcagttattcagagaaaaaaaaatcattcctgtttacaattgacagtcttgtgaaggaactgacaataaaatggattaagaggttattacaaaagtagaataacaatacattttcaccttctgtcttttcagctacccaggtgtttatgtgttttctggacttctctacggcgctgataaagtcaagctcctccatctctgcttggtagaatttttggcaggaatctctaaaagactaggatagacagagtgacataactgcctggctacaaaaatgatgaacaccaacggcctacttcttcattgcaccaagtcagaaaatctataattttatgattgacatacataatttacaaataaatatgaggacttaacctaaactacaacttcctagctttagctatatttaatcctagcttaaaaactaagtcaaggtcaggtactgtggcttacacttgtaatcccagcactttggggggccgaggcgggtggatcgtgtgagctcaggagttcgagaccagcctggccaacatggcgaaagcccgtctctactaaaaatacaaaaattagccatgtatggtggcatgcacctgtaatcccagctacttgggaggctgaggcaggagaatcacttgaacccagaaggcggaggttgcagtaagccgagatcaggccaccacactccagcctgggcgacagagcgagattctgtctcaaaaaaaaaaaaacaaaaaaaaaaaagcaaaaaacactaagttgaatcagtctctgaatatcaaacgaacttcaccaactgctggatcctttaagggagcagccatgcatcaaggagctgcctgacaagatgctgacaagacacttcaaaagcgtgaagtagatccaccttattgaaatgcagagaatttaaaacatattggcaggtgaaaagaaattacaaaagcctatgtatggcataatggcatttagagccacacgcttcctgctgggccccagcccccactacctggccacctttatttctttagtgaataagagcaagtatgacttactgagaggaaatcacaagacttttccccaaagagcctgttggccatcctaagcaagtactgcgtgccagtcttgttcacttcggtgagaagagactggaagccctggtggatgtctccaccaccgccacttttattgaaagaaagtatctgaaatcaaaaacagaatgaaaacaaatcattcctgtatgctctgacttcaggaaatggggcaaccccaaactcagcctaacaaccatccagacccttattactgcttaaaagatctatccgaggctgggcgcagcagctcacgcctataatcccagcactttgggaggccaaggcgggaggatcacctgaggtcaggagttcgagatcagcctggccaacatggcaaaaccccatctctactaaacacacaaaaatgagctgggcctggtggtgcgtacctgtaacccagctactcgggaagctgaggaaagagaatcgcttgaacccgggaggcggaggttgcagtgagctgagatcgtgccactgcactctagcctggcgacagagtgagactccgtctcaaaaaaaaaaaaagatccatctgattaaaggccagaagggtcttgaaagcccctccctgtaccctgtctgtgctggcatgagctgcaacgccctccacaaacccaggctcctgatgctcagtacttggagtctggtggcaaacaagggtgccaaccagacctcctgtctatacaaacacaggccgcccctgacatcagaaggggcagactccctcctgcccgtggctctggaatgcccgtgtcactggctctgactaatgatacagtaggtagaattcagtagaagtgatgctgttccaggcctaggccctttttaaaaggcctgacagctgccatgttcactctcttgtaccctggccaccatgacagaaggaagtccaggctatcctgccgaaggccacatggaaagccctggagaaggtgccatcacctgtagagagagttgcttgaagaactgaggcctctagccgggcgtggtggctcacacctgcaatcccagcactttgggaggccgaggcgagtgcatcacctgaggtcaggaatttgagaccagcctgaccaacgtggagaaaccccatctctactaaaaatacaaaattagcctggcgtggtggtgcatgcctgtaatcccagatactcgggaggctgaggcaggagaatcacttgaacccgggaggcggaggttgcagtgagccgacatcgcgccattgtgctccagcctgggcaacaagagcaaaactctgtctcaaaaaaaaaaaaaaatcgaggtttcaggtgtgagagaggccttcttgaaccttccgggccaggtgtccactgaaacagctgcatgagtgacctgcactgcttcctgggagcagtcctgcctgctcaggccacggaatctgagaaataatcaatcattgttatttccagccactaagtttgggatggtttgttttgtggcaacagctgacacatgcagccatccagaagtggaattctgccatgaccaaaacctaaaacatgtggacttggccttggacccaggcagctggcagaggctggacggacaggacgaaatgactcctgggggctggagaaagggggctgtgtgtgtaccagctgaagaagtggaaagaaggtcaccctcagtgacagggaggatggagtgcctcccccgggaactcctgcatctggctaaggggtccaggaggaagctggcttctttttgctgcctagggtaacacatgggaagagaaagatgaaggaactgttccattttcaagcagaatttaaaggaactatttccaatccaggatgtactgggtggagaataaaaatgtttcttcttcccagcctttccagctggcaaaagattctaaaagagatggcctcagggcaaagatcaaatcccagacactggcctcaagggtgaggtccaaatccactttgttaaaccttagaagattcagacagcatcttatagaccatctggcaggctctcccatggcaccctgactcccaacccaacaaagagcactcaggatggcggtgggggtgcttttgtccagggaagcagaattttaagttgatagaaattccacagtggttttcaggcacttgtaacagcttggactaaaagagagagacggctcaaagtgcagggaggcctctgggtgcccacgttctacaggtgggaggtaggctgggagcgcagcaagcacgggccatttcttacagaacaggaaaggagctgccaagagcgacaccaggacacagagggcagagcacagccagggcagcaacggacaagggacaattctgggaagctgcagtggaggctcatcaaggaacaccctgcacccagggctgagaggtgaacaatacatgcctggctgggcttgggaattgccactgctccgtgacggccacgtgcctcccacgcctactgtgatgggctgcatgtgtcccctcaaatttacacactgaagtcccaactccagtgtctcaggatggaactgcatttgcagagagggcctttacaggggtgattaaggtaacataaggccattaggttgggctttaatccaataggactcatgtccttataaaaagaggagatgaggacacagacacacacagagagatgaccatgtgaggacacagggagaaaacagtgtctacaagccgaggagaaaggctgcaggagaaaccaaccctgcctacacctggatctcaggctcccagggaaccaccaggtccagagggcagaccacagcagtcacgggtggccccgaccagctacatctgtggtgtgcgcaccctctctcaacccctctcaggcgcggagatgcctctgcctttggcagtggggccttggcaagcaggacacaggcggggacgtgatgggtacttgtttcaagcctgtcttctgcgagcacttcctctcagaacccagccgccaggcctacggaagcccaggcaacgctgctgaaggaagcatgtggaaggccccagcggagaaggccacggagaagacgcccagcgccccgctgagcccccgctgacgcagcccacaagggacccacccagtgccaagtggtgcagaagcaccactcaatccacccagattcaacaaccaggaaagctgctaagctgggagagctggttacacaacaacaaataaccagaacgctactgaaaacatgtttagctgacaaatgccattctaagaaggctttacgcgtaaatgagaaaataaagactcctaacaaccaacaagcagatgacagtacccaaagatcatcacaggactcaacctgaaccttgtgactttacaaccatctacaaactcacgaacaagctaagccatgtgatgatgaaatcattcattcctctgaatcgggcgccccctctccaccccagggggtcagtcagggtgttgtccccagggtgctccagcatgggtggcatgcccttccctgtaaactcgccacccacaccctgcaatactgcacagtcatccgtctcgagcgatccctttgggatttggaataaggaggaccagctaacttgacagttaatagcaccatggctgccctgaagctgtacctgggccatctgtgcagcggtgtttccctttgcccccatgtagaccatggccagggcacaggacatgctcatgggtgagaaaaacacattcttcgagttgtctttacccagcgttttcaaaaggtttaaggcaaaggtgccatttgcttctgcgagaacatccatgatggcagacctggaacaagatttaaaatcagtatcacttaagcacagcttccacgcgactgcatctcacgcgccttaccgacagtcaccgccgatgctgtggttcagtgggcaagcagaaacacacacagaactctggctgtttctttttaggaccctccacattattttgtgtgtttctaatgttaagtgtggaaaatgaaagagttctatgtgaaacgccgccctgttttgtgaggactcctccctgcacgcctgcccgcacgtggagaaagtgggaaggaggcaccctttcctggagtctcttccttggggtggaattacagaaggggcactggcttttgcttctatgtttgtattctttggtgtgttttgcgggcttaaatgtactgttttaatttgaaaaatattcaaaatgatacattcactgacagttacacaagaaaagatggccaaatgtttttataatgagagagagaatcccatttctgggtagcaagagccttaaaaaaggatcaatcaagccacatacaaagatgcgtgaaagcctttcaaatgcctcctgacccttggatctccttctaggaaatccctgcaggtggcaaagccccaattttggaccacgcttggggacatcctgctgcaacaagccaggccttcctgcgcctgaactcacagcacactcaggacaccaccttgcctcatgggctgtgggtgcatgcccatctccaccttcacagacaggctcaggggtagggtcaggctgcacatctctctagccctgccgtgcagtgggtgtggcagccccagcagggtccagagcaggaatgcagctggatagtcgggaggggggagctggggtatcttcaggcaagtcggaatcacagaatcacatgttaaagtccaccaagcccttagagagacctaccatcaatgccccactgcactacagggaaggtgaagttgacggaagtgaagctaagaagtagctgggcttgaaacgcagggcggatgcgctttctgagctgctgctcaagaagaagaatctgcagaatcaggtgagaggacaaggggcagctaagggccccacaggcagtcaggctgggaaggaggggatgcaggaatgcagggatgcggggcctgcctgctctgacacagttctcagatgtttaccaaatgaatatgtcccagtcagagaatgccagcattctaagacagtcccagtgactcacttgagcagtgagtgggaacccacggaacaaggaaggggagaagctggagcagacatttcctggagcagatgggagagggaaggaggtgcctactggaggccctgtgaggagatgctgaattaagcggctctccactgtgcatgcctttacatttggagctggggttggctgagcaagtgctccaaagatacctgggtcataatccctgggacctgtgaatgccccttacatggcaaaagggactgtgcagcacgattagattcaggctcttgagatgggagattatcctggattgttccagttgaccctaaatgtaatcacaggtatccttctaagagggagggagggggagatctcacgggaaaaagcaatgcaaagaataaagcaaaatgccactccactggccttgaagatgaagggcctcaagccaagaaacgcaaggaccacagctgcagtagctggaaaggcaaggaggatcctctggaggagcctggccctgcggaacccatttccaacctccaacctcagaactctgagaaaataaacatgtgcagtttagccacgaatccatggtcatttgttacagcagccacgggaaaccaagacaataactcatacacctgataaagcttgtttgctgtgcttgtttaaatattttgttttcaaactcttctttattcattacacagaatacttggggcactgggcactcctggcttgccaagcctttccaaacatattttaagattactaatttctaataaaaggacaatagaaagtacatattactaaaattcttctgaatataagggagtctttgatgatacataaataaatccaggattccgcagagccctgggaacaccagtataaacaaaagtagccattacacggaactgaagcaaaattgggcctatttttggttctttggattctagatcacaagaactgcccgcttatcaacttgaagagaaacaattggtaaaacagggaaacttctaggttaagaataagaaaagaggagatgccccaaagcaagaagcacagcctgtgaagtccgtgtctcaggactcaaagccagcagacaccctgacacgtggggttttccctggcctggggacatggacttctgtctttgtccccaagagggctcagcccacgtggagaggctgccaggtgagatggctcctccataaaccaaaaaaaaaagacagaggttaagtaccatgtcagctggccaggggaaggtcccacatgctcccccaaccccatcctagactattctaccgtcagcacacgttttcccctcaaatgctgaaggactcttacgcttttttttttgtagagacaaggttcttgccaccttgcccaggctgctctccaacgcctggcctcaagtgatcttcctgcctcagcctcccaaggtgctgagattacagccatgcaccacgcccagcctaaaggacttttaattcaaatggaaatgtccacctaagaaaggctaataataaaacactccgtctccggtaatatcccggagaatctgtttcaggcgctgatctttatatcagtaacttcaacaaagcaaagccacctttgtctgaagacacgcccactggggaggtgcctgtctggccagcccaggttacaccatctggggcagaggagaagtcggtgcacatgagtttcactgtgtcaggggatttaatttgaaatactgaactggagaaaccaaagcaggatattcggaggagaagtcagtgcacatgagttttactgtgtcaggggatttaatctgaaacactgaactggagaaaccagaccaggatattcggaggagatggcacgagtcaggaggaagacagggtctctagtcctggctctggtaccctgggcaaatcactggactcctgataccagtttcctctctgtatgaggaaaagcatataccagataatctgggttcccttccatctctaacattcaataattgttaataccaaatgcagaaggaagagcaaaaatgtagctcaattttcaaagcccacagtgaggtcagtaatgatattccatttcttagttgaaaacactgctgacagccgtgaaaggtaaaattctatctatgccttacataaaaattgctgagcaacaaagaaacaataaatcaaggatgtcctagagatttaattttcttagcagaaactatgttagtcattaaataactgaatatcctactcctgataaacacccttacgtcaaacagcaagtggtacttcccatgcttccttaacaaggtaagaattacctacttcagcagccaccagcacagctgatgatagaacattagtcccttaactccccaaacaggaacaagataaaaatatctgtcgtcccaaccttgtgtaactttgttcagatagttctggcaaaggcaaatacaactcatgaaacataatgagaaaggagattgtcagaaaggagacaaaatgagcacagttagcaaacaatttgatggtctacccaaaaagcagccagaatcagtaaaatactcttaaaactgaaaaataatggagtaactgggctactaaaaaaataggaaaaacagaccccagtagaaacacgtgcaaaggacattaacaaatttacccccaaaaaagaaagacaatagctaataattatatttaaaagtttcaacttcagaaaaaaatatcacttttttgatatatactatgtgctaggtccacactgaaagacccttaccctctgagatagctgctgagaacacctacgttttataagcaaagaaatcgggccttagctctttaagtaccatgtctccagagaacccagggcaacaatggcagaatgacggctggaagccaggaccgcatggctctgtagttcactctcttaacaccatggtgcacagcct

SEQ ID NO: 6598 - DNA, 914 bp, Homo sapiens
gtgaatgcggcatcccacaaatgggccctttatttctgaactgccaccactgcacggataaggccacttgggttgcaggcacactgtggagtgtcaggggacagagaggagaggggctgcacaccaagactgccctgtcctcacggagaggaaaagcggccgcagaagagaatcccgttggtcttgctgtgctggatgaagaaaaggaaggggtggtcggcgcagaagcgggggacgaatctggcacaccgcatcatcatgatggcagctgtggcggctgcagcctccgtgccttcctcattgacctccacaaaagacttgtgcacgaccttggacagagacaggtctgtctgggacattccagagaagtctgccttgcccagctcgaaggcatcagtcatgcccaggttgcgcaggacactctccatgtcgtagctttcctctagtttaaaccgcgggagggacacttccacctcctcttcatccatcatgtccagcctcgtccattctacgaacttctcgtaagtgagttctttctccacctagagggagacagttgaagactttaagacctagggtgctgctgcccagcagggccctgtgctatgctgtggatgccagacaccagtggcagcgtggctatggtcagcagcgctccagtgttaaacggctgaccgcaaagtagggacagcagccacagcagacacccccgagtggctccttgctagcacgcctcgctcacagcttagctgttaccgttctcaagtcagtggtctcgtccggaagcatgatgatcatattcagttccttgccaacatatggaagcaccaagatttgggtaaatatttctcctatataggtcttcttaaaagtagattgcttaaacatcatttgcacaggtttctcctcattct

SEQ ID NO: 6599 - DNA, 101 bp, Homo sapiens
tgaggcaggagaatggcttgaacctgggaggtggagcttgcagtgagccgagatcgtgccactgcactccagcctgggtgacagagtgagactccatctca

SEQ ID NO: 6600 - DNA, 761 bp, Homo sapiens
acagagcttggcccgtacccactcccgtattttccatacatcccccacgccatcacacctgcccaccagaccatgcaaaccagggagggaaacaagataagccatgttccaccccaaatcttacccaagggagttaagcctgatgcccacatgcatacaggatcagaacgacgatcctgacctcttgccttgttgtattactaaaaccctctcctcaggggctcatctgccatgccctgatcatgacacatctgtgctaacatgatgttccccggtgcctgccactagcgtgtgtaatgctgctgacacacctcatgactatccatgtcaccctaaaacaccaggaacacctgtcccgagggccagcccgggaactcctgcccctgtgccgctgccctcctgctccagcataagcccattataaagccttgtctgggacactttctctgtctcatgtcaatttccactgcatgagaatctaagaacccacgatcagtaacaatactgtaaattggtacaccagtatttcctgagtatgatttagaattatgtcaaaaataaaagtaaaatacaataaagtgaaggaagaaaagaaaatgtcatggaaacattcatactatctgaattaaaaattccacttctaggaatttcactgaaggtaaaactcacaggttttgtacataataaaacattatgtacaacattatgggatataaatagggctaataataataaaaatcacagtaatgacatgggaatac

SEQ ID NO: 6601 - DNA, 1980 bp, Homo sapiens
tggaaatcatattacatagaatatttgggtgacatctgcctgagagatctccaagaattacagaaaaaaaaatactaatgcacttgagaaagcggtagttttgtggggaggcggaaaaagcaactgcttttctgcaacttggctggatgctaagatgtccgtggacatgaatagccaggggtctgacagcaatgaaaagcactatgactcaaattgtgaggaagaggaacaagaagaggatgaagaccctggggacatagaggactattacctgggagtagccagcaatgtggagcagcagggggctgatgcctttgatcctgaggagtactagttcacttacttgacctacaagaaatctgagggtgccctgaaagagcacatgaccagcttagcctctgtcctaaaggtatctcattcagttgctaaacttatattagttaatttccattggcaagtttcagagagattggacagatacaagtccaattctgctcaactgctcgttgaggctcgagttcagcctaatccatcaaaacatgttcccgcatctcatccccctcacctctgtgcagtgtgtatgcagtttgcgcgaaagaaaaacctactctccctggtctgtcagcaccagttttgccgtagctgctgggagcagcactgctcagttctcgttaaggatggtgtgggtgtgggagtcgcttgcatggctcaggactgtcccactccatacaccagaggactttgtgtttccattgcttcccaatgaagaattgagggagaaatacaggtgctacctcttcagggactatgtgaagagtcattactagctccagctgtgccctggtgcagactgcctcatggttgttcgggtacaggagcctagagctcaccgagtatagtgcaatcggtgcaacgaggtcttctgtttcaagtgtcatcaaatatatcacgcacccacagaccgcatcaccatccgaaaatggctcaagaagtgtgcagacaactctgaaacagccgactacagtagtgctcacactaaagactgtcccgaatacaacatctgcattgagaagaatggaggctgcaatcacatgcaatgctccaaatgtaaacacgacttctgctggacatatctaggagattggaaggcacatggcagtgaataatatgagtgcagtacttacaaggagaatcctgacattgtgaaccagcgccaacaagcccaggcgagggaagccctcaaaaagtacttattctactttgagaggtgggaaaaccacaacaaaagcttgcagctagaggcacagacataccagcagattcatgagaagattcaggagagggtcatgaacaatctggggacatggattgactggcagtacctacagaatgcagccaagctcttggccaggtgttgatacaccctgcagtacatcaacccatatacatattacatggagtctggacccaggaatgagctgtttgaataccagcaggctgagcaggaggctgaaattgaaaacctctcatggaaagtggagcatgcagacagctatgacagaggggacttggagaaccagatgcatgtagccgagcagtggaggagaaccctgctgaaggatttccatgacacctaagttgggatgtggatgtgcgggggtgaggaagataaggctgcaaggtctcctggctgccctactacatgctgcaggctctgcctttcatgacccctggcgacagccagggccccactcctgagagacactggcaacacctcatagttaatttctgttttcttctcttctcactttttgtttctgccagggtagaggccatgttgaactggtctcttttcaggacttttacttccccctggatggttgttgagagggagggaaagtgttttttggatagctattaataatattagatcattacaacttatgtaactttcaaagtttgtacaattatacaaaaaaa

SEQ ID NO: 6602 - DNA, 1981 bp, Homo sapiens
tggaaatcatattacatagaatatttgggtgacatctgcctgagagatctccaagaattacagaaaacaaaaatactaatgcacttgagaaagcggtagttttgtggggaggcggaaaaagcaactgcttttctgcaacttggctggatgctaagatgtccgtggacatgaatagccaggggtctgacagcaatgaaaagcactatgactcaaattgtgaggaagaggaacaagaagaggatgaagaccctggggacatagaggactattacctgggagtagccagcaatgtggagcagcagggggctgatgcctttgatcctgaggagtactagttcacttacttgacctacaagaaatctgagggtgccctgaacgagcacatgaccagcttagcctctgtcctaaaggtatctcattcagttgctaaacttatattagttaatttccattggcaagtttcagagagattggacagatacaagtccaattctgctcaactgctcgttgaggctcgagttcagcctaatccatcaaaacatgttcccgcatctcatccccctcacctctgtgcagtgtgtatgcagtttgcgcgaaagaaaaacctactctccctggtctgtcagcaccagttttgccgtagctgcttggagcagcactgctcagttctcgttaaggatggtgtgggtgtgggagtcgcttgcatggctcaggactgtcccactccatacaccagaggactttgtgtttccattgcttcccaatgaagaattgagagagaaatacaggtgctacctcttcagggactatgtgaagagtcattactagctccagctgtgccctggtgcagactgcctcatggttgttcgggtacaggagcctagagctcaccgagtatagtgcaatcggtgcaacgaggtcttctgtttcaagtgtcatcaaatatatcacgcacccacagaccgcatcaccatccgaaaatggctcaagaagtgtgcagacaactctgaaacagccgactacagtagtgctcacactaaagactgtcccgaatacaacatctgcattgagaagaatggaggctgcaatcacatgcaatgctccaaatgtaaacacgacttctgctggacatatctaggagattggaaggcacatggcagtgaataatatgagtgcagtacttacaaggagaatcctgacattgtgaaccagcgccaacaagcccaggcgagggaagccctcaaaaagtacttattctactttgagaggtgggaaaaccacaacaaaagcttgcagctagaggcacagacataccagcagattcatgagaagattcaggagagggtcatgaacaatctggggacatggattgactggcagtacctacagagtgcagccaagctcttggccaggtgttgatacaccctgcagtacatcaacccatatacatattacatggagtctggacccaggaatgagctgtttgaataccagcaggctgagcaggaggctgaaattgaaaacctctcatggaaagtggaacatgcagacagctatgacagaggggacttggagaaccagatgcatgtagccgagcagtggaggagaaccctgctgaaggatttccatgacacctaagttgggatgtggatgtgcgggggtgaggaagataaggctgcaaggtctcctggctgccctactacatgctgcaggctctgcctttcatgacccctggcgacagccagggccccactcctgagagacactggcaacacctcttagttaatttctgttttcttctcttctcactttttgtttctgccagggtagaggccatgttgaactggtctcttttcaggacttttacttccccctggatggttgttgagtgggagggaaagtgttttttggatagctattaataatattagatcattacaacttatgtaactttcaaagtttgtacaattatacaaaaaaa

SEQ ID NO: 6603 - DNA, 107 bp, Homo sapiens
actcacaatagcaaagacttggaaccaacccaaatgtccatcagtgatagactggtttaagaaaatgtgtcacctatacaccatggaatactatgcagccataaaaa

SEQ ID NO: 6604 - DNA, 711 bp, Homo sapiens
ttaaatagagaatatagcccaaaccttaatgtgctggaagataattacttagaatatccgacagctttgcgagaggcctgtattactttaaaaggtataaatgataggttgtgtaataccctacattcttatcttgaactatattatcgggggctctttctgttttaccttaatgtgcccaggggactcctgcttagcttaataggacacccaaaaggaggaaatgcagagttaatggtttaacaaattctaaactttattagcaatttgcatttaggagaagggcagatggtgtgtggtcgaaagctcatgggactgtgaattggtagactttttttaaaatccagcttttgcccctaacttttggtctcggagacctctgttctttaataactagaactgtaggccgggcgtggcggctcatgcctgtaatcccagcactttggtagggtgaggcgggcggatcacaaggtcaggagttcgagaccagcctggcccagcatagtgaaaccctgtctctagtaaaaatacaaaaattagccaggcatggtgacgtgcgcctgtagtctcagctacttggaaggctggggcaggagaattgcttgaacctgggagatggaggttgcagtgagcccagatcaccccgttgcactccagcctgggcgacagagaaaaacaaaaatccttctcaggaaaaaaaaaaaaaaatta

SEQ ID NO: 6605 - DNA, 637 bp, Homo sapiens
ttaaatagagaatatagcccaaaccttaatgtgctggaagataattacttagaatatccgacagctttgcgagaggcctgtattactttaaaaggtataaatgataggttgtgtaataccctacattcttatcttgaactatattatcgggggctctttctgttttaccttaatgtgcccaggggactcctgcttagcttaataggacacccaaaaggaggaaatgcagagttaatggtttaacaaattctaaactttattagcaatttgcatttaggagaagggcagatggtgtgtggtcgaaagctcatgggactgtgaattggtagactttttttaaaatccagcttttgcccctaacttttggtctcggagacctctgttctttaataactagaactgtaggccgggcgtggcggctcatgcctgtaatcccagcactttggtagggtgaggcgggcggatcacaaggtcaggagttcgagaccagcctggcccagcatagtgaaaccctgtctctagtaaaaatacaaaaattagccaggcatggtgacgtgcgcctgtagtcccagtgactcaggaggcggaggcaggagaattgcttgaacctgggaggcagaggtgcagtgagctgaga

SEQ ID NO: 6606 - DNA, 283 bp, Homo sapiens
ctgcctctgtcccctcgagagtaacatcagtgtgtctttcctagctgggagatcaggccaccaagagagacagtcattttgaaatgtgcgaatgttttcacaattgttcgagattatttctcagtaacacagctttagtctacagagcttgctaacctgcctcagtattctgtgttcttttattgtgggtagatagatgttgataaatcaaaagaaaaaaaaatcttgttaatttcagcattacatcagatcttagcaaatgtagatttctattataatattt

SEQ ID NO: 6607 - DNA, 255 bp, Homo sapiens
tctcgctctctcccccaggctggagtgcagcggcgcaatctcggctcactgcaagctccgcctcccgggttcacgctattctcctgcctcagcctcccgagtagctgggactacaggcacctgccaccacgcccactaattttattgtatttttagtacaggcggggtttcaccgtgttagccaggatggtcgcgatctcctgaccttgtgatccgcccgcctcagcctcccaaagtgctgggattacaggcgtg

SEQ ID NO: 6608 - DNA, 283 bp, Homo sapiens
ctgcctctgtcccctcgagagtaacatcagtgtgtctttcctagctgggagatcaggccaccaagagagacagtcattttgaaatgtgcgaatgttttcacaattgttcgagattatttctcagtaacacagctttagtctacagagcttgctaacctgcctcagtattctgtgttcttttattgtgggtagatttatgttgataaatcaaaagaaaaaaaaatcttgttaatttcatcattacatcagatcttagcaaatgtagatttctattataatattt

SEQ ID NO: 6609 - DNA, 497 bp, Homo sapiens
tggagatcccaggccagagtaaggtacctgaactcttcctcgcgcctccctgcacatgtgctcccccgcctctgtagaactgatgatggtcatcgtgtgtgtcattgtgcaaaaagcattgtccgtgccatcccctctccaagggacacttcttacccctatccttcaaggccttctgcaaatgccattctctccaggaaagcctttccgcattctcagttggatttgatcttctcttcgaactcccaggcccttttgttccctttgaggacagattgcattctgctttttaatctagctgtgttttatccccctcagtggatggaaggtgtcttcagggccagaactgtgggttcctcttccttctcatcagtagcatcgccatagctcctgatttctgaacacccactaaacaccaggcactgggctaggtactttgtcacaaaatttcactgaaacctcccttacagcaactcccaagaggtgggtggtgccgt

SEQ ID NO: 6610 - DNA, 497 bp, Homo sapiens
tggagatcccaggccagagtaaggtacctgaactcttcctcgcgcctccctgcacatgtgctcccccgcctctgtagaactgatgatggtcatcgtgtgtgtcattgtgcaaaaagcattgtccgtgccatcccctctccaagggacacttcttacccctatccttcaaggccttctgcaaatgccattctctccaggaaagcctttccgcattctcagttggatttgatcttctcttcgaactcccaggcccttttgttccctttgaggacagattgcattctgctttttaatctagctgtgttttatccccctcagtggatggaaggtgtcttcagggccagaactgtgggttcctcttccttctcatcagtagcatcgccatagctcctgatttctgaacacccactaaacaccaggcactgggctaggtactttgtcacaaaatttcactgaaacctcccttacaacaactcccaagaggtgggtggtgccgt

SEQ ID NO: 6611 - DNA, 497 bp, Homo sapiens; identical to SEQ ID NO: 6609

SEQ ID NO: 6612 - DNA, 387 bp, Homo sapiens
gaaaatggagacagcagaaaccctagggctcctattcaatatgaacgtcactcccacagtagcaacgggcgtacaagggactgtgcaccctttgcctgtttttgactgtctcctggtctggtaacataggataaccccatttttgttttactgtctccatggtttggtaagataagataaaccattttttagagaaggaaaactgaggctcagagaacttgtatttcatggaagggtctggggggaactcttcctccaaagggggcctctcctgccttcggcccctgtgccctgaggctgcggggaaggtgggcgttcatccttcctcagagccgcccctgatggacacatggcccatctgcccccatctgacatcttgaccgagga

SEQ ID NO: 6613 - DNA, 387 bp, Homo sapiens; identical to SEQ ID NO: 6612

SEQ ID NO: 6614 - DNA, 387 bp, Homo sapiens; identical to SEQ ID NO: 6612

SEQ ID NO: 6615 - DNA, 7720 bp, Homo sapiens
agcctaacatggcagaccagagacagcgctcactgtctacctctggggagtcattgtaccacgtccttgggttggacaagaacgcaacctcagatgacattaaaaagtcctatcggtaagtggacaagtgtggcccccacatccccccaggaagacacacatgccccgtgtggtttagtctgcattttaccaagaaccattgcacatactttatcctggccgactcagcgttgaactggtcacagctcggtaacacctttgtatgtgtaatgtactccttatagcttaaagttatggtattcatgttctcttgccaacaaaaaatagcacttagtagaaactgacacactgtccacagttccatagggagtcagggtctgaacctgtttgaggcctcacaggagccgcagagcgctggcatggtcctgtggtctccttgttttagcacagtgatgacagagacccctcactctgttgtggccttctgattgagcttgaagaactgcactcttgggtacagtttcattgagtaacctgtaagagacaccatcactaatccagacaattcagatagtcctcctctcgtgtgctagcatcgtgtagttcataaaacacttcttaaagtgccatcattacgccccgccgtgcttaccgttcacttggcacttgtgcagttagcggctgggacaccagggctggccttggtgccgctgaacttagatgtgccgtggcactcacagcccttggggctccctcctctgaggctgggtcagggtgaggaggtttacctgaaacaaccgcggagcttgcttttgtctctggcccctgcagccctggagagtcggacagtgaggtggcctgggtggacctgccttccactgcacccggcagtgcgtgcgggtgggatggacgcggcggcgggtgcgggtggaacaaagtccagggtagagccaggacatggttttggtttgcaggaagcttgccttgaaatatcaccccgacaagaaccccgacaacccggaggccgcggacaagtttaaggagatcaacaacgcgcacgccatcctcacggacgccacaaaaaggaacatctacgacaagtacggctcgctgggtctctacgtggccgagcagtttggggaagagaacgtgaacacctacttcgtgctgtccagctggtgggccaaggtgagggcgagctgcctgccgtgcgggcacccgagtcactcctgccgtgcgggcacccgagtctctcctgccgtgcgggcacccgagtcactcctgccgtgcgggcacccgagtctctcctgccgtgcgggcacccgagtctctcctgccgtgcgggcgcccgagtcactcctgccgtgcgggcgcccgagtcactcctgccgtgcgggcgcccgagtcactcctgccgtgcgggcacccgagtctctcctgccatgtgggcacccgggtcactccacgcctgcagggttcccagcattgcagagcccatgcgttgatgccagcaactctacactcctgagaaaaggcttctgggcatatggagcctttctcctcacctgtgtgatgggcgaagctctgtcactggcttggtgtcctgcctggaacaagccatagcgtacagattgtcccagggaagagccgtgcggagccgccagggtttcttctgtaaatggctcccagtccttcgtgagacaggaggaaataagcctcgatgttacatccgcatttcttcgtttcctcgttttgttccaaatgtcatatatgaggccagagggttggaatcactgcatggcatttgtgagaagcctgtatttggctttgactggtcggcctcctcactagaatccttataaagtactttttatttagttaatgttagacagagtctcgctctgttgcccagactggagtgctgtggtgagatcctggctcactttaactttgaattcctgggttcaagtgatcctcccacttcagctccagaactgcaggagttgaggcgtgaaccactgtgcccagcctggaggctgctttgttttttttttgagacggagtctcgctctgtttcccaggctggagtgcagtggcgcgatcttggctcactgcaagctccacctcccgggttcacgccattctcctgcctctgcctcccgagtggctgggactacaggtgcccgccaccacgtccagctaattttttgtatttttagtagagacagggtttcaccgtgttagccaggatggtctcgatctcctgacctcgtgatccgccagcctcggcctcctggagtgctgggatgacaggcatgggccaccacgcccgtcttggaggctgcttttctttaagctgcgggtttctttctgtctctcctcctcccttcttcagttctttccttctgcttcctgtctggaaggcagtatccccacctggaacgcaccccctgccttctgctgagggcatttgggagtcctgcgcctccctctccaggggcctcggaggccatgcaacaccaccttcttctccccccaggccctgtttgtcttctgcggcctcctcacgtgctgctactgctgctgctgtctgtgctgctgcttcaactgctgctgcgggaagtgtaagcccaaggcgcctgaaggcgaggagacggagttctacgtgtcccccgaggatctggaggcacagctgcagtctgacgagaggggtgagtgcccgccccagggcccgtgtgtgtgtgtggggcagagccagaatgggccctgaatggtgtcaacctgtcttgtcaaacaggagggcactgacactgtgccgcgagtgtttgtggtggcagctgggactgttgaggtgtgaacgtggaccctgaggtaaagcaggcgcatagagctgtccccgccgtgacctgcggtagccgtagatcccagggactgcgaggcggggcagggcggcaggcagttggggcggggctgagggccgagggctggcggtgacccaaggcgacggaggaaagccgtgtggggtggaggtcagcgagtagcctctcccggtggagagtttgtccaggtgcccgaaagtcgctccacaggaccagcgttgggtgcgcgccaggctgtggccctcgtgcagtgccctgtgtgcttgcttttcagaggccacagacacgccgatcgtcatacagccggcatccgccaccgagaccacccagctcacagccgactcccaccccagctaccacactgacgggttcaactaaatccaggaggagctgtggtcagaggaggagccggcgcctggccacgccaaccttagaatcatgaactgtagtcacagagatgggaaggcagcctcctgcctgccctggccttgctggggcccctcctgcctccacgcccacccagcgtcgacccttgacccacgaagtgcgtagcatgcagtatttaaagcagtgtagctacggtcttctgtttttttcccttttttaatagcatgtatggggttctgttccatgtctgtgttgtggacattccgcggcatgaccgcgtgaactgcacggtggagctgcctcagggctgtcggtcaggttggtccagtgaggggtgactgcagccggtcaggtgggcgaggagaaggggggctgcccctttcctacctgtgcttgaggggccggaggcaggtgctgcctggcagagctgtgttaccgtcttggcctcggggtctggtccacactctgtgctcccagccttgaggctgcagtaggactctgatctcacctgccagaagagaggcggggccgcgtcctcctggcgtcaccggcgtcactgtcattccttggtgtctgtgctgggcatggttggcttgggggtctgtggtttcctgggccttgtggcagggtttctcccgtgggagaatttggtgtggaaagcataggaggccccttccgaggttgacaccgtgtcctccgcggtgtttctcgcctggtcgtctcgtcgtgtggacgctgccgttctggttctcggaggtgtgtccttcgccgtgttggggttatttgtctgtgttcctgcacttttcccgggctctgagctggattgatggggccagtctcccccctcccatcttgaggtcgttctccacattccttccagcacacctgtcctttccatagccctttttggacctttagaaccacagatgataggaccagcccaatgagccacagtcagagagtagattgtgcatgtgtgagcacccagctactggggacgggggctctcccacgacccctcctcctgtgtttgccagagctcccatctgccccactcgcctttgccccgtcatcgatgattcaggcagagccagattcgttaggtccctggaggaaggactgactggaccagagggaccctctggctcaggagggttgggtccctgggaggccggcagccaggccacagaatccacacgtggaccattgtgggtccctgggaggccggcagccaggccacggaatccacacgtggaccattgtgggtcccttgggaggccagcagccagactacggaatccacatgtggaccatgggaagtcagtctcttgcgtgtcctagaccttgtgggtggcgccctgcataggggagcagggggaacgggtctgatgtccctgtgctggctgagggctcagagctgcccgcactccgtagctcatgggatgtgctgggcctgcctttggcgccatgctgcagactccagtgggcctggtttctgcagaatgtccatggtggccgctgcagagttgcagaggtccctgtagagataaagctgaggaggaggctgtgtgtgatggctctggctcggaccaaccagatgagcctcctgaagcccccttccctgcctgcctgctgacccgtggccccagctcactcattgccctcagcagccacccgaggctgtgcagaagggtaggttcaggttgaccaggaagctgccaaaagggacatggatatgaggatacatctggacgtgcttaggaacagggtgctggttgagggcccccagctgacccctactgcagatccgcatgtggaccatgagccggctgccagcactaggtcctgggcagctttgtttgtcccacttttctttgtttcttctcactaaaatgatcacgaagacctttgacaagaggagagatatgcactgtgatattaaattagaaataatttatcaaaatcagacctctcctaaaagaataagaaattcattgtttggcccatcctgaaaggtgaggtggcgagacagtggggtgcctccgtgccgcttcgtgcagcagcaagttcagcctgagatgctggctgtactcagcctttgcaatttttgtagatgtagcttaggacgtgagttatttttccgcagactggccaagagccaggttctaagcttggacctaaggtagaaagctgcccatcgggggccctagctcagccccaccaggccctctgttgggcctgcacacagctctgtggctagaacactccaaggcccttcggtacccatcagagtgggccccttgccaggtggcttttcagttacagagtccagtggaccattttgtagaaccatgcagctccctgcggaaggtggggtagggtgggaaagaggagcaggtctggaggtttgtggaacccagtcccctgcagaatctgtaaaacctaataaatcatggttgtggccattctcacggtggtgattgtgattagacgacccccgggaagcccagacactcggggcctggagttcctccccctgcctgacctagaagcagaaccgttttcagcgctctgccctgttggctttaaggctttgtcttaatttaaggaaaaagatcctcccgggttttatttctctctttcttgagtggactgtttccctataattaaaagaggtggtgagtcctggggcagcttccgcgcctccctgtccacgtgctaacagatcaggacgcccccagcacccctgcctgcttttgctggtggcagtgacgggaccccgactcctcactctcgggccgcagacaatgctgtgagcaagtgtggccatgggcacagaatgtccctttggacgccgctgctgggggctgccaggggccctctggggtcgtgctttgaggcctgtccggttcacgagggggtccgggcagcactgactgcttccgacctgcaggaggcgtaggagcggccctgcgggccctttcacggcagctgctgctgtatagatttgtctccactcagtgacgtgggatttttttgtcttccttttggctttatttttaaactgctttagatattactgctcagtgtttgtgaactttcctagttctctatgttgttagtgcagccagcacccagtggggacctactagaaaaaggaactggcatgcacacgtgcccagcaggaaaagcttcgtcttcacgtcggctgctgccatccagaagaggccctggagcctcacgccgtcgaggctgctctcaggcgttctgttccgggcgaggcttgtgctgcaaggaagggcaccagcatgcaggctgccactggagggtccgggtgctgcgggcagagttcagcgcttgtccaccctcccttagctctgactcagtgcatcctactgtggggacatctcgtgaggggacacgaaatgactgatctcaccctttcccagtattcagagctgtgaacccctgtggcgcaggactggcctgtgtctgttattttggttgtaaatcattctcctgtggaattggcaaaagctacatttttactgtccttaccagcaacagtttgcgtcgtcacatgctgtgagtgtgggctgtggtgtgtccgtgtgtgtacatatgtgtatatgtatatatcacgcagcaggagtgtcattcatgctgctgtcccctggtgaagtgacaagtacaattaaaggtggctctgaaatggcctctggtttcttgggagtcgggcagggacctgcaggaggctttcccagcaggtgcacagaaggaagcgctgagcccactgtgtgcagagggtgtgtgcccagggcactgccacggcccccaccagcattggcctctgctctgcagggtggggtgcccatcctgggggctgtgtgtcatgctcacctgacccaggtgtgtgtcccggtgtgaaatcgaggaggggactggaagcccttccctgccttgaaacatgaaagctgattttctgagcagcagatacggtcagtggcaaagctgcatctgaagggcggcctgggaaggggccctgtgctggccccgggtccgccccagaggagtccacacagcaccacctccagaaggggctgggcccggggtcctgcaggcggcaccttttggtagagtttgtttccctggaaaatggggaaaatgtttcaagccaggtgaggggggaagttaacactgaaatatgtattgtttttaaaaatcaaatgcacacgcatggaagctgcttgtccatgcactggttttgtcactggcgtcctggaatccgaccgtgttggggtgcaggcgctgtcagactccggctgatcctggctcgagcacacacatctaagggccaggctggttccgcatggtgatctccgtcttgtatgtctgaatgttggcctaaaataaagattactgttgtaaaataaatgttttcactgcggacccca

SEQ ID NO: 6616 - DNA, 6746 bp, Homo sapiens
agccaggacatggttttggtttgcaggaagcttgccttgaaatatcaccccgacaagaaccccgacaacccggaggccgcggacaagtttaaggagatcaacaacgcgcacgccatcctcacggacgccacaaaaaggaacatctacgacaagtacggctcgctgggtctctacgtggccgagcagtttggggaagagaacgtgaacacctacttcgtgctgtccagctggtgggccaaggtgagggcgagctgcctgccgtgcgggcacccgagtcactcctgccgtgcgggcacccgagtctctcctgccgtgcgggcacccgagtcactcctgccgtgcgggcacccgagtctctcctgccgtgcgggcacccgagtctctcctgccgtgcgggcacccgagtcactcctgccgtgcgggcgcccgagtcactcctgccgtgcgggcacccgagtctctcctgccatgtgggcacccgggtcactccacgcctgcagggttcccagcattgcagagcccatgcgttgatgccagcaactctacactcctgagaaaaggcttctgggcatatggagcctttctcctcacctgtgtgatgggcgaagctctgtcactggcttggtgtcctgcctggaacaagccatagcgtacagattgtcccagggaagagccgtgcggagccgccagggtttcttctgtaaatggctcccagtccttcgtgagacaggaggaaataagcctcgatgttacatccgcatttcttcgtttcctcgttttgttccaaatgtcatatatgaggccagagggttggaatcactgcatggcatttgtgagaagcctgtatttggctttgactggtcggcctcctcactagaatccttataaagtactttttatttagttaatgttagacagagtctcgctctgttgcccagactggagtgctgtggtgagatcctggctcactttaactttgaattcctgggttcaagtgatcctcccacttcagctccagaactgcaggagttgaggcgtgaaccactgtgcccagcctggaggctgctttgttttttttttgagacggagtctcgctctgtttcccaggctggagtgcagtggcgcgatcttggctcactgcaagctccacctcccgggttcacgccattctcctgcctctgcctcccgagtggctgggactacaggtgcccgccaccacgtccagctaattttttgtatttttagtagagacagggtttcaccgtgttagccaggatggtctcgatctcctgacctcgtgatccgccagcctcggcctcctggagtgctgggatgacaggcatgggccaccacgcccgtcttggaggctgcttttctttaagctgcgggtttctttctgtctctcctcctcccttcttcagttctttccttctgcttcctgtctggaaggcagtatccccacctggaacgcaccccctgccttctgctgagggcatttgggagtcctgcgcctccctctccaggggcctcggaggccatgcaacaccaccttcttctccccccaggccctgtttgtcttctgcggcctcctcacgtgctgctactgctgctgctgtctgtgctgctgcttcaactgctgctgcgggaagtgtaagcccaaggcgcctgaaggcgaggagacggagttctacgtgtcccccgaggatctggaggcacagctgcagtctgacgagaggggtgagtgcccgccccagggcccgtgtgtgtgtgtggggcagagccagaatgggccctgaatggtgtcaacctgtcttgtcaaacaggagggcactgacactgtgccgcgagtgtttgtggtggcagctgggactgttgaggtgtgaacgtggaccctgaggtaaagcaggcgcatagagctgtccccgccgtgacctgcggtagccgtagatcccagggactgcgaggcggggcagggcggcaggcagttggggcggggctgagggccgagggctggcggtgacccaaggcgacggaggaaagccgtgtggggtggaggtcagcgagtagcctctcccggtggagagtttgtccaggtgcccgaaagtcgctccacaggaccagcgttgggtgcgcgccaggctgtggccctcgtgcagtgccctgtgtgcttgcttttcagaggccacagacacgccgatcgtcatacagccggcatccgccaccgagaccacccagctcacagccgactcccaccccagctaccacactgacgggttcaactaaatccaggaggagctgtggtcagaggaggagccggcgcctggccacgccaaccttagaatcatgaactgtagtcacagagatgggaaggcagcctcctgcctgccctggccttgctggggcccctcctgcctccacgcccacccagcgtcgacccttgacccacgaagtgcgtagcatgcagtatttaaagcagtgtagctacggtcttctgtttttttcccttttttaatagcatgtatggggttctgttccatgtctgtgttgtggacattccgcggcatgaccgcgtgaactgcacggtggagctgcctcagggctgtcggtcaggttggtccagtgaggggtgactgcagccggtcaggtgggcgaggagaaggggggctgcccctttcctacctgtgcttgaggggccggaggcaggtgctgcctggcagagctgtgttaccgtcttggcctcggggtctggtccacactctgtgctcccagccttgaggctgcagtaggactctgatctcacctgccagaagagaggcggggccgcgtcctcctggcgtcaccggcgtcactgtcattccttggtgtctgtgctgggcatggttggcttgggggtctgtggtttcctgggccttgtggcagggtttctcccgtgggagaatttggtgtggaaagcataggaggccccttccgaggttgacaccgtgtcctccgcggtgtttctcgcctggtcgtctcgtcgtgtggacgctgccgttctggttctcggaggtgtgtccttcgccgtgttggggttatttgtctgtgttcctgcacttttcccgggctctgagctggattgatggggccagtctcccccctcccatcttgaggtcgttctccacattccttccagcacacctgtcctttccatagccctttttggacctttagaaccacagatgataggaccagcccaatgagccacagtcagagagtagattgtgcatgtgtgagcacccagctactggggacgggggctctcccacgacccctcctcctgtgtttgccagagctcccatctgccccactcgcctttgccccgtcatcgatgattcaggcagagccagattcgttaggtccctggaggaaggactgactggaccagagggaccctctggctcaggagggttgggtccctgggaggccggcagccaggccacagaatccacacgtggaccattgtgggtccctgggaggccggcagccaggccacggaatccacacgtggaccattgtgggtcccttgggaggccagcagccagactacggaatccacatgtggaccatgggaagtcagtctcttgcgtgtcctagaccttgtgggtggcgccctgcataggggagcagggggaacgggtctgatgtccctgtgctggctgagggctcagagctgcccgcactccgtagctcatgggatgtgctgggcctgcctttggcgccatgctgcagactccagtgggcctggtttctgcagaatgtccatggtggccgctgcagagttgcagaggtccctgtagagataaagctgaggaggaggctgtgtgtgatggctctggctcggaccaaccagatgagcctcctgaagcccccttccctgcctgcctgctgacccgtggccccagctcactcattgccctcagcagccacccgaggctgtgcagaagggtaggttcaggttgaccaggaagctgccaaaagggacatggatatgaggatacatctggacgtgcttaggaacagggtgctggttgagggcccccagctgacccctactgcagatccgcatgtggaccatgagccggctgccagcactaggtcctgggcagctttgtttgtcccacttttctttgtttcttctcactaaaatgatcacgaagacctttgacaagaggagagatatgcactgtgatattaaattagaaataatttatcaaaatcagacctctcctaaaagaataagaaattcattgtttggcccatcctgaaaggtgaggtggcgagacagtggggtgcctccgtgccgcttcgtgcagcagcaagttcagcctgagatgctggctgtactcagcctttgcaatttttgtagatgtagcttaggacgtgagttatttttccgcagactggccaagagccaggttctaagcttggacctaaggtagaaagctgcccatcgggggccctagctcagccccaccaggccctctgttgggcctgcacacagctctgtggctagaacactccaaggcccttcggtacccatcagagtgggccccttgccaggtggcttttcagttacagagtccagtggaccattttgtagaaccatgcagctccctgcggaaggtggggtagggtgggaaagaggagcaggtctggaggtttgtggaacccagtcccctgcagaatctgtaaaacctaataaatcatggttgtggccattctcacggtggtgattgtgattagacgacccccgggaagcccagacactcggggcctggagttcctccccctgcctgacctagaagcagaaccgttttcagcgctctgccctgttggctttaaggctttgtcttaatttaaggaaaaagatcctcccgggttttatttctctctttcttgagtggactgtttccctataattaaaagaggtggtgagtcctggggcagcttccgcgcctccctgtccacgtgctaacagatcaggacgcccccagcacccctgcctgcttttgctggtggcagtgacgggaccccgactcctcactctcgggccgcagacaatgctgtgagcaagtgtggccatgggcacagaatgtccctttggacgccgctgctgggggctgccaggggccctctggggtcgtgctttgaggcccgtccggttcacgagggggtccgggcagcactgactgcttccgacctgcaggaggcgtaggagcggccctgcgggccctttcacggcagctgctgctgtatagatttgtctccactcagtgacgtgggatttttttgtcttccttttggctttatttttaaactgctttagatattactgctcagtgtttgtgaactttcctagttctctatgttgttagtgcagccagcacccagtggggacctactagaaaaaggaactggcatgcacacgtgcccagcaggaaaagcttcgtcttcacgtcggctgctgccatccagaagaggccctggagcctcacgccgtcgaggctgctctcaggcgttctgttccgggcgaggcttgtgctgcaaggaagggcaccagcatgcaggctgccactggagggtccgggtgctgcgggcagagttcagcgcttgtccaccctcccttagctctgactcagtgcatcctactgtggggacatctcgtgaggggacacgaaatgactgatctcaccctttcccagtattcagagctgtgaacccctgtggcgcaggactggcctgtgtctgttattttggttgtaaatcattctcctgtggaattggcaaaagctacatttttactgtccttaccagcaacagtttgcgtcgtcacatgctgtgagtgtgggctgtggtgtgtccgtgtgtgtacatatgtgtatatgtatatatcacgcagcaggagtgtcattcatgctgctgtcccctggtgaagtgacaagtacaattaaaggtggctctgaaatggcctctggtttcttgggagtcgggcagggacctgcaggaggctttcccagcaggtgcacagaaggaagcgctgagcccactgtgtgcagagggtgtgtgcccagggcactgccacggcccccaccagcattggcctctgctctgcagggtggggtgcccatcctgggggctgtgtgtcatgctcacctgacccaggtgtgtgtcccggtgtgaaatcgaggaggggactggaagcccttccctgccttgaaacatgaaagctgattttctgagcagcagatacggtcagtggcaaagctgcatctgaagggcggcctgggaaggggccctgtgctggccccgggtccgccccagaggagtccacacagcaccacctccagaaggggctgggcccggggtcctgcaggcggcaccttttggtagagtttgtttccctggaaaatggggaaaatgtttcaagccaggtgaggggggaagttaacactgaaatatgtattgtttttaaaaatcaaatgcacacgcatggaagctgcttgtccatgcactggttttgtcactggcgtcctggaatccgaccgtgttggggtgcaggcgctgtcagactccggctgatcctggctcgagcacacacatctaagggccaggctggttccgcatggtgatctccgtcttgtatgtctgaatgttggcctaaaataaagattactgttgtaaaataaatgttttcactgcggacccca

SEQ ID NO: 6617 - DNA, 297 bp, Homo sapiens
tttgtttgttttttgagatggagtctcgctctgtcacccaggctggagtgcagtggcgcgatcttggctcactgcaacctccgcctcctgggttcacgccatttaggaaaacgcatgcctcaccctcccgagtagctgggactacaggcacccgccaccacgcccggctaattttttgtatttttagtggagatggggtttcaccgtgttagccaggatggtctcggatctcctgaccttgtgatctgcccacctcggcctcccaaagtgctgggattacaggcgtgagccaccgcg

SEQ ID NO: 6618 - DNA, 481 bp, Homo sapiens
tctgttccttatgatttccttgcttgcatttatgttgggtttatcctgttactttgtagcttcctgaggcggagccttaggccttgattaacgtgttgtactagtcagcattctgcagaggaacgttgccattatctgtgtctctttctaaaggagatttgttatgaggaattggcccacgtcattatggagacggaatctcatgctctgccatttgctgaagattgaggaaagcagtgggataataacagtccaaggacaggaggagacacgtggccccgctcaggctggcaggcgagaaggaaaacccaggccaactcctcctcccacccctttctattcgggacccccgtggactgggacgacactcacctgcacagggcagcgcagttggcttcatggagcccccagctcaggtgctgctcttaccaagaaacaccctcccaggcacaccctgaagtcatgtttcatctgggtgccc

SEQ ID NO: 6619 - DNA, 89 bp, Homo sapiens
ttttttttttttttgagatggagtctcgctctgtcacccaggctggagtgcagtggcgcgatcttggctcactgcaacctccgcctcct

SEQ ID NO: 6620 - DNA, 14471 bp, Homo sapiens
aatgtttggtgttttcccagcactttgggaggccgaggcgggtggatcatgaggtcaggagatcgagaccatcctggctaacaaggtgaaaccccgtctctactaaaaatacaaaaaattagccgggcgcggtggcgggcgcctgtagtcccagctactcgggaggctgaggcaggagaatggcgtgaacccgggaggcggagcttgcagtgagccgagattgcgccactgcagtccgcagtccggcctgggcgacagagcgagactccgtctcaaaaaaaaaaaaaaaaaaaaaaaagtttggtgtttatatttccagccttctacataacatatccgagttgtatatgtgtgaatagtacaaaaatagttttacataattcatagcaatacttcgtagagcttcatatcttgctttttttcctcttaatatgcattaaaaacatttccccaaggcatgtttttacaaagcatgctgttgcacagcttcatcttattgtgtaccataatttacttagtctttgtgatagttaaccgtttttctacgttttgcttttaaagcagtgagccaagaaaatctttgtacatacattgttttttcacagctctctgattatttcccgagtatgccaaaatgcttttgaaaggaggttttgcagtgcttggtactacccattagacatacaaatgctcattttcatcttttaccaacattgagtattatcattcttattaagtttttgttcgtttgataagtttgggtcatttattttattttgcatttatttgatttcaaataaggttgagtaatttttaatatgttatgctattggccatttatatttctaatgtaaattgctggtttgtgttcctggcctatttttctactagggtattttttttgtcataatgttctatgagagccttttttaaatgaaagatttttccatttgaatttctattagttctttgccttttaattttaattttacatttttacatagaaatttttgaaaaaaatcttctggtttcttccattacttctgtgtttgcaaagccttccctgtttcaagattagaaaacagttctagttccttccagctctttttttttctttttgaaataggatctcgctgtcttgccctggctggacataaatatggtttattttttgcctttaacattttcagatatttgaacctttttttgtgtgtgagctaagatctcaactcaatttttttcagaaatttagccaattttctcagaacaattaattgaatattctttccattaatttgaaatgctatttacatgctaaattgttatgagaagtttctggaatttctgttctgttgcgttgatatgtatgctgtttttattctagtcattttaagtaatggaagctttctattacattttaacttgtgctgatgttcctcctatacataggtcactgtggtcttcgtttgtttttcttggctgctggtgctcacttagtttctttggtgctttcaatttgaaaatatttcataaagatataagcatttagttgtatcttaaaggagccatcttatcaggtaaacattagtgtgatggattctgagattcataaagccctgaaacgaatgtttccattttgttcctttggcagcaggttgtccagagcgttgttcatctctacgagctcctcagcgctctgcaggtgcgtgccttcatcttccatccctgcgtttatttgtctagagaacagcagcttggggctgttgttgacttggatctttgaggtttgcaggatgtttaatggataaatggggccctcagtctagggaagactggctctcgtggtgagaaagttacagaatgcatcgaccttccaggactagaattagtgaagagctggtgtgccgtaggcatggcttgataaccatgctacaaatcacatagcatgctaacatgcatctgggagattacttcactttagaaagccttaagtatgattataagtttctatattccgtatctctgtggtatttgaatagagtggccttcctaatacagcttctgtttcggacttcccaggaacatcctcaaattctgctcacttcctttcttgaagatctaacctgtctcattcctactttctcccacttccaacacacacacacacaacccacccacccacacagacacacacacacacaaccacccccccccccaccccaggtaataccactgactgcaaacagcatgcaaccagattgacaaaaacccgtgagttcctgcacctttgaggttcttgtatgataaacagctgcaattatcctggagcatttttatgagacgggcttgaaaaatgaggggagagttctagtccgtcatagtgcctggtgccccctgctgtggggtcgggagggatccagaagctcgctgtcgtcctggccagagttgcagggctcccctctgtgtgcctcccagggtgtggtgctgcagcaggacagctacattgaggaccagaaactggtgctgagcgagagggcgctcactcgcagcttgtcccgcccgagctccctcattgagcaggagaagcagcgcagcctggagaagcagcgccaggacctggccaacctgcagaagcagcaggcccagtacctcgaggagaacggcaggcgcgagcgtgagtgggaagctcgtgagagggagctgcgggagcgggagccctcctggcccagcgcgaggaggaggtgcagcaggggcagcaggacctggaaaaggagcgggaggagctccagcagaagaagggcacataccagtatgacctggagcgactgcgtgctgcccagaaacagcttgagagggaacaggagcagctgcgccgggaggcagagcggctcagccagcggcagacagaacgggacctgtgtcaggtaatgggactccctgccgagagcaacctaatgatgatattaattaagaccccctgtgtattaagcaaggtaagaaagtgagcagaaatatagagcctgtttttggccagatgctcatgcctgtgatcccagcactttaggaggctgaggtgagagggtagcttgaccagcctgggcaacagagggagactctgtctctcctaaaaaaaaaaaaaaaaaacaaacaaacaaacaaacaaaaaaacagtttttaagaatctttgtagctggacacaatggctcacacctataaatcccagcaccttgggaggccgaggcaggtggatctcttgaggccaggagtttgagaccagcctggtcaacatggcgaaacggcgtctctactaaaaatacagaaattagctgggtgtggtggcaggcgcctataatcccagctgcttgggagtctgaggcatgagaatcgcttgaaccggggaggtggggattgcagcgagccgagatctcgccactgcactccagcctgagcaactccgtctcaaaaaaacacacacagaaaaacaaaaagaatctttgttttaccccgaaagagaggcagaggcagaaagtcttcttctgctttttgcatctctaagaggctgaaaaagagaatggaagtgctggggcattttggccagggcagtaatggatatttggagttggcacttccctcagctagaggagtctcagtgtgtctgagaaaatggcagtcagccatccaggattttaggagcaacgccactgctctgtgccacatcagaaatcaggcatggccccaacctgaaggaacttgtagcttaatggggaagcacaccaagaataaaagagcctccagaacatgtggtgcctgtggtcctgagacagcaggaaatggctctcaggccagagttgctggaagaacccatgtggcaggatcggtgggaggcagttacagagggaaacgcccatcccagcaactaggggaggccgccactcctctcgtggatggatgatattcttgcttggggatgttgagacagctgcactctgcatagttcctgatttgcctctctactgctgatgaaaaacctctctttctctatagctgctgcttatattggaaggcttttggttattcagcacactcactcctgagcttatttcagtgatattccttggttatttcgaaacatggatgcttgtggcagatggagagcctgggtgtacacagatctgcctgtgttttgaaatgcataccatgttgccgtttgtttgattgattgatcttggaccacgaaagaaaattatactgacagcttccagggtagggggcagttgtagctttctgcagatgttgccaaatatattgggggtggggagcagcaaatgccatgtgttgctttttatgacataaggagggattccacccccatcccaataaaatcggtgctttgacaaaggagggttcccaggcagctaagagaacccagagtagatgatcctctttatctctggtttaacctgtgactaggattcttggtgtaagctcggcttttccacttatcctctaaccggaacaggcttctataatctctttgccttaaaataattatctgcatccctgtgtagagcaatcttaagcagctctccttgtttcttcagggaatgggaattcttttctaagtcgccccatcaaaggtactattggttttttacaacgccggcgtttgtgtatgtagtaaaagtattaacagcattaaaggcgatatttttaacatgtttatagatactacttgggggagggcagctaatgaaaccttcaagctctatgcagtccacagacgtgagctctgtagagttcgcagaggtgggtaagtacccagccagcacacccagttgaattcagccaggatttattgagttggcatcacagacgctgacagcctccaagtgaaaacccttctcttgaatatgtacaggtttcccatccacataccaagctgatgaggatcccatcgttcttccccagtcctgaggagcccccctcgccatctgcaccttccatagccaaatcagggtcattggactcagaactttcagtgtccccaaaaaggaacagcatctctcggacacacaaagataaggggccttttcacatactgagttcaaccagccagacaaacaaaggaccagaagggcagagccaggcccctgcgtccacctctgcctctacccgcctgtttgggttaacaaagccaaaggaaaagaaggagaaaaaaaagaagaacaaaaccagccgctctcagcccggtggtgagtcacgcacacctgctctccctgtggccatagtgtctgtgcattctgagagagggtagattttagtggcatggggcggggttgaaaaggggacagttcagatgctcaaaagccaaactgccatccttttcaccagctccgcttgctaagagcactcatgcagcgaacattaagaacccactctgtgtggcacgtgtgcagaagcagagagcatgggtttcattttcaaggcattatccgatcgaggaactggagctcacccctcaatgaagtaattcaagtcctccttgcctttctgggcctagagtagtcattggtaacagctagcatttggtgatttaaccctcaaatgactgtatgaagttggcactgctaaccccaagagaagtgaggaaactgaggctcacagaggctaactaatgtgccagcggccacagagcctgcggctgaattccactaaatgcctccctgttcatgtaccactttttcccctgaatccttctctttaggattgatctctcctttctgtgtgggaggttaaagaaaaagtacattttcctggcctcttcataaattctagtgattatttaaaagttaaagggagcattaggcagtgaaggatatcacttaagaaccttattaaccaaatttgttcagaaaccccggtgcgcagaagagttaattgcccataagccccagtcgcctgtttgcattacagaagactttgggatggggaggaagttcaatgaaaggagcagtttttctgaatttttttcattcttggttttcacatttccagatggtcccacgtcagaagtatcagcagagggtgaagagatcttctgctgaccctcttcctctctgctgaggcagctgcctcctgatcctggccagcccacctctcctgctgtccccgcgtgcacaagtctcttacactggacgcccactgctcctcagcgtccagtcctcctgggcggccccaggtcctggacaataagcaacagatgatattgagtgtcgggtggggaaggaggcccagactctgcttcggccatgatttgtgactgcccaggactctcaggttgggctggccctactcaggattacactgaaagtaatggcctcgtaagtacaggtgatggttttggacacgtcaggaattcctaaaggctgaaagagtgtatccaagtaaggtctgaacctccgaatgccttttatttgggggaacacaaaaccaaacagcagatgttttggacttgatctgtgtacgtacatggggacctgtctgcatatacacacggggaatgccagaagaaggcccagtctgcaccaggcgtctggtcaacttagcacaagggcagtgcctggacggacccggagcccccgcatatcagcagttcacccagtactcctcagagactggtttccctctaaacccatcccgggcacataccacccgtgttttgcatgtatttctcatttcattttagggatgacaaacatttgtgaaaccagtgagagaaggcttgatgtgtataaaagacgtgatgtgcaccacctcgatctcggtgtttcaggcactaaagcaacaaaacaacccatagtatctcattctgtcatcagatccagaagaaatatcctggttttccagcatgtttacccacatgttttgggcatggataaagtgaagaggcctactcaccattatccctgcagcgtgacaccttttgattgtcactgaccactcagaaggggccacggcctcctggctgtgttcctgagcccccgtcgtgcctctcccagacagcagctgtctggcccttgctgggtgagggcacaccactgccaggggtcagcctcgcacccaggccaggcagaagctgtgctctgaagctaggacagctggctgagaagtgggttcaggcgaagggtgaagccatgtgtagcagttcctgccagtgcagatctggagaggagctggcccggaaggcgtggttgtgaaagcgcccttcttatgttaggaggccttggcaaaattggatttcttcaaaaatacatgtaaaggtctgttgttgaattgtactctgcccctggaagcagatacagatggctgcctgctgctcggctttgcttttgcttttcccaccgtgttttcatctttgttcacttgaggctttccccagctggtgtgtgcaggacagttcatggtaatgttgccctctgaggccccgtacaccagaagggaggccctggaaaattttgtgcttccaacgtggccttcaattcttgcttttttgcccctcggaagcatggggcttttgagcacacttaaaaaaagaaaaatctgtaacttggtgcttattgatgaattgcaagctggccttgcagatggagatatttatctttcagtttatttgaaagaggtctggtttaaaatttgtagcctacatttgttttatttattgtatttgtgtgtttgtgtttgttttttttttaagggtgagccaggtctagcccaacagtctaaactatccagtcaataccgagtgaagtggcagccagcactgttcactctgtgtcttttgaagtgccttgaaggcccagatgaaattttaaagggagggggtccatgtccttccctcccccaccccgcctcattctttaatcaaaggatgtcttctcccttgtttgagaatgaagaaactcgccacctctgacctacctttgcctttttctgtcatggagaatactcacccttcagaaacagaccaaaggccaaaacctgctgatttttctattgaaaatatgtccccttgcaaagaccctaaacaaaaagttaagtttctttctttcacctatttgtacaactccaagttacagctgaatctgtcgtgactttcctgagatctacccggggcttggctgtctgttctgggcactggctccgagttcccctcctgggatttgcaggagggcagtactgaacctgcattcttctccttgtaaatgtaggccgggtgcccctgttctccgggtttggaacaatacgaggttggtgctgatgggatttacttgcgtacgtgctcttcacaaaaacaccgtggatgctgaagttagagcacgtcgccacagagcttgacatcaatgttagagggtctcttactccccgcccagctgtgatgtttcatctgctttggttgttttggtggtcttttttaaaaatagagatttcacatctgcccagaccccactcaaaacgatttggtcaggttctggttggacaagtttaaaatcaaagtagtgcccggaattccctcaaaccacccaacttcatccaggaatacagtctgcagtgcagcaacagaaccgcttaccaagaactgtgcttacatacctttgtcatctctcttccccccttggaagttgtcctcagggggatttgttcctgtcctggggatttacctgggatggtggctgcctgtgcttttgctcatggccttgacagtgctctagttgctggatctaatggcctgtcttggtttctatcacatgagaaggggttgtttttttggggtgactcggactgaattccccatactgtttccacgccgggacaccatgttctccatcaagctaaagaaatcacgtgcctgaaactgtgcttaagttttgggggaaagatggagttcctatccagagcccccagatttccagaatcgagtgagcttcctggaaggagactgcgtcttctctcaattccagtcatctcagtcgttgtcgttaggtgacatgtgcactttaaatgctctcatcggttggcttcattttcaagacaatcaaatgtattgactgtgttttcttcttagaaaatggagagggttaaaaacatgcaaactgccactttcaacctttgccagtattccctctacccccgtgagagctatctggggggaacaatccttaccaaggtttttttggaaaggtacgaatcttaacttttttccccttctgtgtctcagggtaatactattcagagtcgcccctttgctcattttctcccgtatttgttaccttcctgaggcctcagtattagtcgtgagcacaaagttttgagacctttggcgttgtttcttgatgtgggaggggaggtgttagtgcatgcaagggttgaactagatagaccctgccttagtagaggatgggactataaccttagaggccagaacttgatccagaagttgctgtccacagaagtgctttctatttcatcatttttgtttctagggctctttttctgtagccaggtcttcccaaggattttagtatttgcattggagttgaggtttactctaatgatggtggcccagctgtgcccagaggacagccaggcaggccctgggagggagtttagaaagacagtcctggtgaatgggcttcaagtggtcacaaagagggtggctgtgaggtgaccccagacactgcagaacgatgtgcaccctctgcattttggatgtccttggaatgtgggagcctagaaataaccctgtggatggaattggggcagcggctgctggagatctgtgtgccttgccttccttcagcaggaccgtctaggtgcgcagccacctatggatgcgtcccagccagccccgtcgctctcgtccatcctcagagacaaagaagagggcagggagtttgggcttggttttgaactttcctttcaatgtagcaaagcattcctagttaaccagagccttggaatctactgcctgctggccaggctttaaaatgaaaagtgttttaatgctgccataaaagggaggcgggggggaggaagggaaaataaaggcatctttccaagtactcatctaatttaattgtcaaaagattgataggccatgaattacttctccatctcactaagggttaaaggcgtgcaaccccccactggctgtgtcccctgtcaccgaagtgagtgacctgccctacaaccaggtgggaccacctgtgctgcagtccggaggggcttctgcaggaagcactcaccccccacaccttccccggcctgagcttcccctacctttcgtcaccacctgagggcatgagcacaggccatggggcgtgcctggtgagtctgcctgtggttcaggcttagcctgtggtctcctgtgtgctgctgcccgcatgggatgcgcaggggaggcgtggggatccgcaggagggtggttgggatacaccggatacctctgctctcattgcttgtttccaaatgctctatggacatttgtgtgctaaatcctattaaataaaaaagacgggttaaaacccagatgctgtatattcatttgtaattatgtataaagtgaagcagttttaaactgtaaagatttttttcagtgtgttttctcgaattttgccacaacatactggcttcgtattttatttatctttctttctagttaccagcttcagacccttgtaaagtctccctcagccctttcaaaaaataataaatttcctgtgaagttctggttggtgctgtgacttattcctattcctgattcctgtagaagggatactccccatccacccccatagctcttgaggagacgccttatgcaccgagcagctgctggggacgcatttcactctcggagtgggacccaaacccagagagtgactgatcagccctaaagtcaaacaaacagtttatgccaagagccaaaacttcctatttccagataaatcaatacagtgaacaggaactttgctatagagcctgcgacttcccttaatgttagtttctctctcttcgctaacattctccaccccgtcccacccccaaactagagcaactgccagaaactaattcaagaagaaagatcctctctgcttgtagctcccggctgattcactgggtctgatcccggaatgtcggggctcccctggagacacacagggctccagctgtcactggctccaccagcacagcctgtgccttccatttttagattagattactagcttcctactcttccaggtctgcgctttctggacctataggaagacccttaagtccagctgggccttggagaactgtgccgctcgcagtaatgcagagaacctgggcaaagctgcctggagtccccgctctgccacttcccagctccccgcccctccctgacagtcaccaaaaagaaagtcctggccaggcgtggtggctcacgcctataatcccagcactttgggaggccgaggtggtcgggtcacttgagctcaggggttcaagaccagcctggccaacatggtgaagccccgcctctagtaaaaatacaaaaattagctgggcgtggtgaaaccccatatctatctactaaaaatacaaaaattagccaggcgtggtggcacatacctgtaatcccagctactcgggaggttgaggcaggagaattgcttgaacccgggaggcggaggttgcagtgagccgagatcgtgccgctgcactccagcctggcaacagagcgagactctgtctcaaaaaataaaatcctgcccagctgccaagtgtctttcctttcaccacgaacttggaagtgcacgggtttctttgcagagtcttgtagccctggtgatagctgcctccccataagccagtaaaacactggtcttttttctctcgctcactgctcttggctgtcactgctgccctggcggtctcctcccccacagcagccatcctggcctgggtccgcgggtggccctcatccacccagacaccctcagcagggcaagaggagtggttcccatggcctccctcctccgctctccaccgcaactggttctgagccagggacaggctctgtctgggaggcaagaagagcgagaagattccattctcttccagaacagcagagacacaaagcgcagagggccccaagaacactagccagccattcagtaggggcttaagtctctgcccactcctaacggatgctgctgtgcccagagcctctgccacagcacagacttgaccgccaagtggctcctacgaaagtggccattttccgtttgaaggtccctcatccccagggaaagcccgtggcctaggggcggccacctgtgaactagcaggagatgctgtctgcagccacagccctgccggaaaagaagtgggagtcgctgatgctgcaagacagagacctaaaccgaagtgtggggaggacactaggaggccccaaaaaccaaaaagccagggaggagcttgggaggagaggaggcatgcagcgtgcaagccttgcgatttccttggaagcagccacagaagcagagggcgggcgagctgagctgcagattgttagacctcagacctggaactccctgaactccctgcctgggggtgacaaccccctcatccagcctctgcacagcaagaagtgcctccccaagccccccacctccccgtccctgccacagttcctgttctttggagtcttcggagactcctttgtccttaaaatttgactctgtttcttcaggggcacagtggcagatcatccagagggtcctggagcagtccagttccagcgccgtcctgccacccctgtgggtgtccccccgggccagagaggagtgacaagtgggaggaagtggcatgtgccctaaatggggaggatgtgggtcccagagccccagcagcctaccccctccaccccagtttggggccctcccttgctgcctgcccgcccctgccccttccgccatccccagctgcctttggtatccaagtgacagcctgggcccttcccacccccgctaaggcctcctcctttcatatggtaatggcttgctctacacagccctagtcccacagatgtgtgggctacccctctctccccatgcctttgggaaactttcttcttcctgggaaacagaatctggaccctgccgaggacaaggaccccggaggcctcagtgggagagttgtggggagggggtcataacagggcttcttggaatggaccagctggaagccagcctgcttttctctcccttcctccctggtcactgcttccctttgagctgtccctggacttcccaccccacccccagcttcagagattgaggtggcggttgcctggacaacctcggttcttctctgcggtccaaaggagagggctgctgggcaagtaaagcagggctgcctgccctgaggagcctggaagaggggcacactggggtcccctctgtcgtggaggagtatggacaggggctgagggggccacgcggaggccccaggatgggcacagactccaggactgccgctggtagccgagtggccaagctgttaaacctttgtctccatttcctttttcagaagggtctgcagagtctgcaggtggcgcgcacattcgtcatgatgctgaagagatgagcagagtgcttagtctggggcccagcgcactcatctggaagcatgtcagcggagccgcgggacagctgccacggacggcagtggccccggattcatgtcccgagtctgaagagagctcctccctggccttttggtttttggggcctcctagtgtcctccccacacttcggtttaggtctctgtcttgcagcatcagccactcccacttcttttctggcagggctgtggctgcagacagcatctccagctagttcacaggtggcccgccctaggccacgggctttccctggggatgagggaccttcaaatggaaaatggccactttcataggactgtttcaggttacaggggtcaccccttcctgtccctaccttagactcccaaccccatcgctgcacctggcctggcctcctctggaaggaagctcagatttggagcctctgccagggcagggagcctgttggaaccagcccaggccagccggctcattcctggaattcctacctcctctcactgccctgggttggcaccaggtgctgagtgggcctcaggccaactgtgggcatgggctcgatgccgctgcttcctcctccacatcaaggcatcagccgtatctcaccccaaaaggcagagaggaaatccagctaagtcccacgcccaagctctgtgctggcttctggagggaagacacagccactgatcggcacttttggttcatgtgtcctcctacaacaaatgcgaacaaccatacacccttcacatggcttatgtctagctctcaaacg

SEQ ID NO: 6621 - DNA, 122 bp, Homo sapiens
ggggccgggctcggtggctcacgcctgtaatcccaacactttgggaggccgaggtgggtggatcacttgaggtcaggagttcaagaccagcctggctaacatggtgaaaccctgtctctact

SEQ ID NO: 6622 - DNA, 14471 bp, Homo sapiens; identical to SEQ ID NO: 6620

SEQ ID NO: 6623 - DNA, 122 bp, Homo sapiens; identical to SEQ ID NO: 6621

SEQ ID NO: 6624 - DNA, 1335 bp, Homo sapiens
cttttttccaaagaaaaaccactgtggtcatttttatttttttaattaccgaaggaaaatttctgcatacccaaccatgaacaaagaaacacaaagttatggtgagatggaatgccagccattcacttaagtcgttcttaggtcctcaggtgtttaagatccttgtcctggcaaaatggcaaatgactacatatcatggatctctgggatcaccccacagtattttgaatggtgactgtggtatccaagaatgccaagggtgttaattaaacatctgatctgttgctacactctgtccacctcttgttatacgagatgactctgaggcctcccattttactataaaactgtttattatcagcttccttgcaccccaagttccaagttctgcctgccatactggatggcctcccggcacccacactcatgggcttccctcccaggacatgccccaccccagtgggcgtgtcacgtgccaggtgtccacacctcccagtgcatcttgtttcctcaatactagacccagttggctagaaggactgtcattaccaatagcacatttagcactgaaggtactgactcatggaaattgtttcaaatacctctgcttgctctccagggaaacagatcaagagaaaatctttgaggtatgtttggatcatcaaaccatctcatatgagccatgctaaggtctaactaatccagcaagattataattgaccacatgatagccatcaaattaggcttgagttcaagcgtatgatccagtggtacttctatgtgctctacagttcattggactccctgtgtaatcactgtgtagagtacctcaaacccattttatagaagctggagtggcacgtgtttattgttttaggtgattacagatttttataatcttttaggatgtatttttgacttattcagttctgagtccttggtcaggagtacgtggtcccgttttactagttttcctatggtaaaatgcaatgtacctatttttttcattccatgaatattttaatgtttaaacaatccactctacactaagcacataatgagcgttcagcctctgacttggcactgaggttatgggcatgtgtggcacaggatagtggggagggcttgagcatgaaacttcgtgaaataagtgtgatctttgggcaaggcaggtggctcacacctgtaatcccagcactttgggaggccaaagccgtcacttgagaccaggaatttgagaccagcctggccaacatggtgaaactctgtctctactaaaaatacaaaagttagctgggtgtggtggcgcacatctgtaatcccagctactcgaga

SEQ ID NO: 6625 - DNA, 3204 bp, Homo sapiens
ccagaggggaccccatatgctggaggtctgttccgcatgaaactcctgctggggaaggacttccctgcctccccacccaagggctacttcctgaccaagatcttccacccgaacgtgggcgccaatggcgagatctgcgtcaacgtgctcaagagggactggacggctgagctgggcatccgacacgtactgctggtgagttctgggctggggctgggcctcctgcctcctgcctctggaggtctgctggtgtctgagccatagcgctttgtttagtttttctgaatcaactctgaagtggttgaaggtttccacataaaaatccatgttgctagctttcctggaaagacaaacagtgccagacccaggacacccaagtactgttgagaagtgcccaggagcaccttactatgcaacgagtggtgagtttgtattgtaggatggtttttctcttctcccttttttttaaaaaacaaggatagggtaggccaggtgtggtggatcacttgagctcaggagttcgagaccagcctggctaacacggtgaaaccctgtctctactaaaaatgcaaaaattagccgggcatggtggcacatgcctgtaatcccagctacttgggaggctgaggcaggagaatcgcttgagcctgggaggcagaggttgcagtgagccgagatcgcgccactgcactccagcctgggtgacagagtgagactctatctcaaaaaaaaaaaaaaaataagataaaaaataaaacaggaatggggtctcatttgttgcccaggctggtgtcaaactcctgaactcaagtgatcctcccacctcggcctcccaaagtgctgggcttataggagccagccactgcgcctaccctgtaggacagttttctgacaggtggaggtcaagggtctagttagaagctctttctttcttttctttcttctttctttcctttttctttcttccctttctttcctttctttctttttgttttaaagatactggctctttgttgcccaggctggagtgcagtggcgcagtcatagctcactgtagccttgaactcctgggctcaggtgatcttcctgcctcagcttcctgaatggctggtattacacgcatgcaccaccatacccagctagtttttatatttttatggtttgcagagatggggtctcattagaggcttttttgctaaagctgagcttacatgccgtaaaactcagttccaaagtatacagttcagtggttttttaatagcgatagggttcataaaccagtgtttctcagccagaggtgattttgccccccaaggggtattatgcattgtcaggagaccagaaagggttgtcacaactcgggggtgccactagcatctagtgggtggaggccaagggtgctgcccaaatcctgcagcgtacgagatggctccatgacacagaatgacctggctgcggtgttgctgaggtggaggcgtcctggtctaggctggtgctccaggctgcttacagcctgctgcctcccaacccttcccgcaagctgaaaaaaaaaaaagttaaccaaatttctaatgagtccctggggcacatggcagagagggtggggaattggggtttcctgccatggggagggagaggattgagctccaaggtaaacagaccccaaacccttccctcccacatgtaccgcctcccttcccctggggtgtcattggaggctgctggggacattggcaccgagctccaggcctacttgctgctaggtcagcatctgggcctgtcaggggctcagccagcaagaagagcagccagacctgcagtttgggtgcagtgatgagaattagggtgggaacctgtgtcctggtcaccatcagtgatatctgctgagcatctgctgagccaggtactgtgtatgtgtcatagtggccccagggagcaaactgctgtggccagtttgcccagacccacttcagaggatccagctggggctgctggaggcctggcctgcaggtcacacctctgcactccaatttacccctcaggacgggctgtgaagggggttgagaggaatctctggaccaccctcgaagtgcacctcagccagcagtcctggtgtcttgccctcttgtgtgtggtccaacccagctagagtcttaggctgtgaacttcggatgtctgataaaagacagaggtcaggatttatgctgtatctggaaagatggggagctttagagtccaacacgcaggtgtgatttcctcaaatcctgaggccctggggaagtctcttctctctgtccaggctgcaggcctcactcgttgaaccagagggcctctaaggtcatgctgaactgcatggaggcaaattcaaaaccataataggactcaagtctggggctcaggcaagtaatggactcctgagagggggccttggcgtttcccccgttacccagcaagttccacggaggaccagggacattttaaaccattgggcctatggcatcgtgtccttttgggaacatctgctgtgaggcaggtcacatgaaggtggcctctgagggagacagggagcaaagatgagggaggatgcagcataggtggggcctggatctgcagctgagttgggagcagaaggaacagccagtgcggaggccaccctcttgtggaggcctgggggtccctgtaggttgcccgacccactgtgaccctgagcctcttcccacagaccatcaagtgcctgctgatccaccctaaccccgagtctgcactcaacgaggaggcgggccgcctgctcttggagaactacgaggagtatgcggctcgggcccgtctgctcacagagatccacgggggcgccggcgggcccagcggcagggccgaagccggtcgggccctggccagtggcactgaagcttcctccaccgaccctggggccccagggggcccgggaggggctgagggtcccatggccaagaagcatgctggcgagcgcgataagaagctggcggccaagaaaaagacggacaagaagcgggcgctgcggcggctgtagtgggctctcttcctccttccaccgtgaccccaacctctcctgtcccctccctccaactctgtctctaagttatttaaattatggctggggtcggggagggtacagggggcactgggacctggatttgtttttctaaataaagttggaaaagcagc

SEQ ID NO: 6626 - DNA, 695 bp, Homo sapiens
tgccctcaaggggaagggattaacctgggtgtgcacaccagggggtggggaaacttcccattctattaatgcgtttaggttatttagaccaatgtctcattaattttaaaaaaattaaaaataggccaggcgcaatggctcacgcctgtaatcccaactttaggaggtgaaaggatcacttgaggccaggagttaaagacgaacgtgggcaacacagtgagatcccatctctacaaaaagtaaaatacatttacaataaaaatctacaagttctgacccataggagagtggaaaactcaaaggctgcttttgtcctgaaagaatttgcctattctaataaaacagctgaggttgaaacggctcagcctctgaaaggggtctgacccttccttgagcccttgcctccagtgacaatctcccaagctaagggagaaaaggaaccaaaagtctgcactcctctctacctctagcagtgcagggagcgaaggaaagacaagggaagaaacccttcagattttcagatcaaattcacatcactggccatccaagaaatcttaagctctgcgtttatcgtcaaccatttctgcatgagggaagcaaacagtccttgctgaaggaaggtgcctgcatcctgggcctcggaacccactgaaataatttagcgaagtgcataataaaaataatatttgccctta

SEQ ID NO: 6627 - DNA, 575 bp, Homo sapiens
gtggcacgaggaagcagtggaataatcctccatggcacaagggagcggtggaataatcctctgtggcacgcgggggggggtgtggaataatcctccgtggcacgagggggtggtggaataatcctccgtggcacggggggtggaataatcctccgtggcatgagggggcggtggaataatcctccgtggcacgagggggcagtggtataatcctctgtggcacgaggggtcggcggtataatcctccgtggcacgaggatgtcaccgcattcgtcactcttagctgcagtgcgtgtgacagtcgccaggggctgctgtttgaggaatgggagttgcctgcgtctgctctgccccaggtggtttgtaggtggtttttactccttgccaaagcccacacagccccgcaaggcaaacagtgttcaactcttttcatggctgaaaaactgggacatcagagaggttaagacactggccagggccacctggcagggaagcttccgggccttgcctgcaccaggactgtccgatggggacgtcatctgcctcccagacggtatcttaaaaaaaaaaaaaaa

SEQ ID NO: 6628 - DNA, 576 bp, Homo sapiens
gtggcacgaggaagcagtggaataatcctccatggcacaagggagcggtggaataatcctctgtggcacgcgggggggggtgtggaataatcctccgtggcacgagggggtggtggaataatcctccgtggcacggggggtggaataatcctccgtggcatgagggggcggtggaataatcctccgtggcacgagggggcagtggtataatcctctgtggcacgaggggtcggcggtataatcctccgtggcacgaggatggtcaccgcattcgtcactcttagctgcagtgcgtgtgacagtcgccagggctgctgtttgaggaatgggagttgcctgcgtctgctctgccccaggtggtttgtagggtggtttttactccttgccaaagcccacacagccccgcaaggcaaacagtgttcaactcttttcatggctgaaaaactgggacatcagagaggttaagacactggccagggccacctggcagggaagcttccgggccttgcctgcaccaggactgtccgatggggacgtcatctgcctcccagacggtatcttaaaaaaaaaaaaaaa

SEQ ID NO: 6629 - DNA, 576 bp, Homo sapiens
gtggcacgaggaagcagtggaataatcctccatggcacaagggagcggtggaataatcctctgtggcatgcgggggggggtgtggaataatcctccgtggcacgagggggtggtggaataatcctccgtggcacggggggtggaataatcctccgtggcatgagggggcggtggaataatcctccgtggcacgagggggcagtggtataatcctctgtggcacgaggggtcggcggtataatcctccgtggcacgaggatggtcaccgcattcgtcactcttagctgcagtgcgtgtgacagtcgccagggctgctgtttgaggaatgggggttgcctgcgtctgctctgccgcaggtggtttgtagggtggtttttactccttgccaaagcccacacagccccgcaaggcaaacagtgttcaactcttttcatggctgaaaaactgggacatcagagaggttaagacactggccagggccacctggcagggaagcttccgggccttgcctgcaccaggactgtccgatggggacgtcatctgcctcccagacggtatcttaaaaaaaaaaaaaaa

SEQ ID NO: 6630 - DNA, 342 bp, Homo sapiens
aaacaaaagaacatgggcagggcctctcgcccagtgtggtggctcttagggacgcagagcttcctggccgcccttcggctctgattctgtttgtccccacagcagtccacgggccgtgagatctcaaaggctgggcactggacgctttgctctctatccttcacaccaagctggtctgcgctctccacctgctggggctgcccagtgccccttgccagagacccagctcagaaactcagaaatgcttccagccacccgccctcgggaccggcgtgaagacccggtgctggggctcctgggtggggctgtcactgcctgagtttggggcctgcccttcttgtc

SEQ ID NO: 6631 - DNA, 342 bp, Homo sapiens; identical to SEQ ID NO: 6630

SEQ ID NO: 6632 - DNA, 342 bp, Homo sapiens
aaacaaaagaacatgggcagggcctctcgcccagtgtggtggctcttagggacgcagagcttcctggccgcccttcggctctgattctgtttgtccccacagcagtccacgggccgtgagatctcaaaggctgggcactggacgctttgctctctatccttcacaccaagctggtctgtgctctccacctgctggggctgcccagtgccccttgccagagacccagctcagaaactcagaaatgcttccagccacccgccctcgggaccggcgtgaagacccggtgctggggctcctgggtggggctgtcactgcctgagtttggggcctgcccttcttgtc

SEQ ID NO: 6633 - DNA, 101 bp, Homo sapiens
aggctggagtgtaacggtgcaatcttggctcactgcaacctctgcctccggggttcaagggattctcctgtctcagtctcccaggtagctgggactatagg

SEQ ID NO: 6634 - DNA, 2134 bp, Homo sapiens
gtcttgggttcttttttattttttttaatttttattttaggttcaggagtatatgtgcaggtttgttatataggtagactcgtgtcatgggggtttgttgtacagattatttcatcacccaggtactaagcctagtacccaatacttattttttctgcttcactcccttttcccatcctccaccctcaagtagtcctcagtcagacctgaattctgattccagcttggccacgcttagccacaggcaagcccctgaacctctctgtgctttagtttctttgcttataaacacctaagccatgcggctgttgtgaggactatttgagttgtacttatctcgcccagcacagagcatgtcctcaacagacagtagcttcggggctggaaaacatgtctaacgtgtaaaggcaattcagcagtcttgttcatgcatttttgtatgcaagtttctaatctgtgttacctctgtgggcatatacatcatggggatttgtagcttcattttataagaagctaatattggtcatgcttacctactattcttgggtgtttgccagaggctgctttggagtatatttgaaatggccatctcttgcagtattttccatgcctacagattctgagttttcaccttgtccttccgtttgctgtcagagcattattttagcttctaactttgcagtttctaatcatatctacgtttttccaccacaaggaaagaatgttgagaatgagagtgaaggacagagataacaagtaaggctatacctgcttagctgctggatttccttccctcttattttgatgtggcactgtttgatttccctgtttgcaaattgcgtcttgcttcccattttgccaaattttgatcattttcttctttcagaaaggaaaaaaaaaacacaaacaaccaaattttattttccatatagtttaattgaattgatggctgctgtcacaaaataaaataaaaacctcacaaacaagaaggctgcaaatcctaggattaggctacttctgaagttttaaaaattcttcaaggcatttatttgcaaattctacccatttgcatattttataagcataatacaaaaatgtattatttatcaggtggtctaggcatgcttgtggaaaatgaatggttgcaaattcaaccttcattttaaaatcctcattgtaaatccatccctctaacttgcaggaaaactgggtttttcaaccctagttttttctgatctacttaaaatactctagactccacactgtgagcaacttttattgagtatgtgtctgtaatttgaagagaatggctgccaatacataaaatcacaaaatacagaataatttacaatgtcaaaatcacctgatctcattggctccattttatctggtcatcccactgacatccatgccaaagatattcttgcaagttttcgggcagaagtatgatctcacacttaggcaatttcagttgtcaatgacgcaatacttgggagtttcatgccttgatatcttgtctaacctttatgtacagtcaagagaagaaatctgatttgagctgttgctggttcctgttgagtttagactccatgggccagaaaataccatacccccagatctgagacaattgatgagtgaataatcattacagtagaaaacaaaattaaatgagcatgccattctttggctttttgccattaaatgagcatgccattgtttggcttgtattttatgattcagtatccattttaaatatccatttttaagtatccattttaagtgagactttttaagtgaaatattttaaagtatccatattaagtaagtatgataactatattttaatatgattgctctctttggtgaaatgtaactaataggcagaaaatgctgcaagtggaggaggatttgctaaagcatctattaaggcttctttttgtaaggtagttttcttcaggcacccagaagacacttttgtccctgtagagccacatgatgttttctggactataggaagcaagacactggtacaatgacaaagtgctggtcctctctcctggctcccttccgcttgcctgtcatatcacatatctgaccactgatttgtatcctgtggacacagcctgtactatgg

SEQ ID NO: 6635 - DNA, 913 bp, Homo sapiens
aaagtatgctagtagtcattgtgttcttcactatcacacactcagagtaaaaaaatacgtttcacttaatcctaaatgaagaagtaaaaattactagttttctaagtctttattccttaaggacacatcttaattgcttgtgtgacaaaatgggaggtatgcctaaagcacttctgcatactgaagtatggtggtcgtcccaaaatgaaaacatttgtgtgtgcttttgacttgtgagcttgtttctgtttctggacctaccctgggcaggtttccacagttgagaatcttagcgtattgctgttacctcaaatttccacacactaccagtttgtcttttgaaatgttatttttataagatgtcaaccctggtatggttcacttttgttatatgttggcacctctgtgggttacggaaagctttgccctccaaagcaaccagttggtttttaggaaagggaaatattgatctttgtggataagtagagtcttgttaaaagctattagaaggctctctttggaaaaaaatcagaaaaatcaaaagaactgtgaaaaggatgataataatggaaaagaggcctttgtagccttgtgaatgtaatacgtatagtcaccacagatttttcagggaggccagtcacggtggttcaagcgtgtaatcccagcactttgggaggctgaggcaggaggattgatagaaccaaggagtttgagaccagcctgggcaacatagtgagaccccatctctagcaaaaaaaatgtttttcagggaatgctgaaatgtctccttctcaaaaaaaaaaaaaaagtctccttctcttacaagttagtcaccttactcagtttattacagcaggagttcccaatcctcaggctgtggcctgttgtgaactgggcagcacagcaggaggcg

SEQ ID NO: 6636 - DNA, 913 bp, Homo sapiens; identical to SEQ ID NO: 6635

SEQ ID NO: 6637 - DNA, 748 bp, Homo sapiens
gtgcttcatatggatatttggtatagcctataagaggttatgatatagctatccctatatccaagcctctagctatatatgagggttttgaaggtgagaactaaaactccttcatctttgtgttcatagcagagtttcttctctgacagaagaaactcagtaaatatttgttgaagtttgtccttgcctagtaaatgcttgctttctcagtttccttgtggtaaaccaaagggatccagacaagattttcttctggcactaacaaattattttatgatttctagataatgccaaagtggtagtgtaagaagatggcaaggaagaaatgtttgaattccaagaggacaagcttcttaaggtccctgaatattcaaccttttaggtgaagctttattatttgcgtatagttccctggcgctgggtgtgaactgacacagtgatgatgttaaagacagtggaatcacccaggtgcagtggctcacgcctgcaatcccacaactttgggaggttgaggccagaggattacttgagtccaggagtttgagaccagcctgggctacatagactttttctctacaaaaaaaataaataaaattaactgggcttggtggcatgtgcctgtagtcagttacttgggaggctgaagtgggagaagaggattgttgagctcaggaggtcaatcaaggctgtagtaagccgagattgtgctactgcactccagcctaggcaacagggtgagaccatgtct

SEQ ID NO: 6638 - DNA, 748 bp, Homo sapiens; identical to SEQ ID NO: 6637

SEQ ID NO: 6639 - DNA, 609 bp, Homo sapiens
atctaggagccttgttgaactgagtaattaagggcaattaaacttttctgcttgctctctgcaaaatatgctaatgatctggtctgctggaaggtggacatatgcagtgctgtttcactgctgtcagacgctgctgccctggaaggtccccctggagaaggtgtggcatcaccaggatggtcaggtgggcagtgggttgagcgtgcagcctcgtacccagcctcctgtgtcctggctggctgttccaggacttgcaccttttcagcagttatctagacctggccgcagtggcctgagttgcagtgattcgtattcactcattctttgatgttctagatccaccattcattcgttgcgttatttttctgggatgatgaagctaccagggttttgtgcgtgttgtttcagcatatgacacgtggcaccagctgtacactgcccttctggttagtgttgttcttggtcaagggctccaggctgtcttccatgctatcttcatgagtgggtggcagcacgtgcccaacgctgcccactgggagaagcattgatactgtggccactcactgcagagagggttttttttggcacagcaaaaaaaaaaaaaaaaaa

SEQ ID NO: 6640 - DNA, 374 bp, Homo sapiens
ttgttaaatgaaaaatggagtttacaggataacataggttgattcctttttgtaagtatttttcttacagcttttaaaatattcaagcaaggagttagtgactggtgtctctggctgttttggcggtgggatgtatttatatggactctaacagaatgtcagatgtgtggcaagggctcagaatggtggtggtgcttgttgatagagattttagcagaatcactaacaggctacgaagaagtaaatcttggttgtcttttgttcatggagatgttttttatttgccaatattcgtagtttgattactctgtgattctcctgcattttgcatttacatagagaggataggagtagttctcagggtgtatactgtc

SEQ ID NO: 6641 - DNA, 34650 bp, Homo sapiens
taaacaggatcttgctctgttgcccagactggagtgaagtggcacgactatagcccactgcagccttgaactccgggctcaagtgatcctcccgcttcagcctctccagtagctgaaactacaggcacacgccaccacgcccagctaatttttatttttattttgtagagatggggtttcactatgttgccccggctggtctaaaattcctggcctcaagcgatcctcctgcctccgccttccgaagtgctgggattataggcttgagtcaccaccgtgcccagcatacatctgctttctgaatatttgagaggcggaaggcacaaggcgtgacaattgatgggatttgggatgtaaagagcaagagaggactcaagcacagtcgcctcgaggtttctagccccggctgctgtcaccaaccactctcaggaaggtaggcagaaggttacgcaggagaaactgtaggggtagttctgaggccctggaaggggtagttctgaggcccccgggggtgcggagctgcaggtccagggaggagtggtgaggctggaggaaggtgaggctggaggaggaggttcaggaggctctgaggtaaagatggaggctggggccttgggagtcgaggagtttacccaagacgaagcatctgtgtggaagaaaagataaggctgggcgcagtggctcacgcctgtaaaccaagcgctttgggaggccgaggtgggcggatcatctgtggtcaggagttcgagaccagcctggtcaatatggtgaaaccccttctctactaaaaatacaaatattagccgggtacagtgcacctgtaatcccagctactcgggaggctgaggcacaaggatcacttgaacccgagaggcagaggttacagtgagccgagatcatgccactgcactccagcctgggtgacagagcaagactccatctccaaaagaaaaagaaactataaacatcattgaaagaaactaaagaagacctaaataaatggaaggaaatcatgttcatggattaaaagacttaatattattaaaatttcattacttcagaagtgatctacagattcaacacaatccctatcaaaatcccagctgtggctgggtgtggcggctcacttctgtaatcctggcacttcaagagccaaggtgggaggattgtttgagccgagaaatttgagaccagcctggcaacatgatctctacaaaaaatatagaaattagccaggcgttgtggtgccagcctgtagtcccagctacccaggaggctgaggaaggaggatcgcttgagtccaggagtttgaggctgcagtgggctatgatcacatcactgctctccggcctgggcaacagtgcaaggtcatgtctcaaaaaaaaaatcccagctggctttttttttttttttgagatggagtcttgctctgttgcccaagctggagtgcagtggcggacgatcagcctcagggcaggccatctagaagaattaccaaaaacaccaacccatttgtctctctataaagtgctgacatttgtgctctgcaacgtacagctgagagagcacaaaacttgtctgactcagcacagtctaggaagtcaagcagctcaatcttgaacaggacagtggtgtttggggggatcaagggaggggagcccagcgttccataggcgtagttcggtttgaacagaaacctggccagctctcctctctgcatgctcagaaggcccagctccatgccccacaatgtaatatctgtaagaagggacaaagaaggtgggtgaagcttgctcagtatcctgcttaatgctatcagtttcttccccctctaagtcagcagtactctggcctccatgtctccctcacacagttccctcttcctgcaatgtcttcctcctgagcctgtgcccagcttctagtgatagaaattttattcaaacttccgggctcagttcaaatgccccctcttccaggaagccttccctgaacttcccagctagaattaatcatgccttcattaagcacacccacaacactgctttcacctcccaggcactcatccgattctaccaagtgagctgagtgcaggtcagtctcctctactacattgtgaggtccttaagggtggagatgttctaatcttctgagtacaacctctcttttcaccatgtattgtgggaagtaagcattcgtcgatttttacttaataaatgaacaaagaaacattcccagtggtgagttaagtcagagtgcaaagattataccttgcccattaagccatctcccaaatgcctaggtctcaaggggagagaacatggctgttttaccaaaacccagcctcagcaaagtcaattcaaagaacctgcgctctgagcagtcttcccagcctgaggcatggtgcctcatctcgctcctaaacaatcccttcttctccagctcctactctgaatttaccctctccaagtttcattagccgaggagttttcctaaagtaattagaatcgaagggtctgtccaagtgttccaggtatccatagtatttcactagaatagaggaaagaatgtaaggaaaatggacccaaaacacccacgccaccataatatcgagtctctcatgatcacacagaaacaatgcgatcagatgagcttaagctgcccgacaccacgaggtacaggaataaatctctctgcattttaggagcctacccttcggctcagaggttcaagagcttcatggaagcatcacgcaaaggggacataggggtccttagctttcctcttaaaaaaactaattcatggcagaagcagcggctcacgcttgtaatcccagctactggggaggctgaggtgggaggatcacttgggaccaggagtctgagaccagcctgggcaacatagaaagtgccccatctctacaaaaatattaaaaattagccgggcatggtggattgcgcctgtaaatctcttatttgggaggctgaggctggagaatcacttgagcccaggaagcagaggctgcagtgagctatgttcgcaccactgcactccagcctggggaactgagcgagaccccgtttcaaaaacaaaaatccacttcaaacaaagcatttccaaccccattaaatgctttttgaaaatgaggcctctctcttcccaacagagtgcgatgacatggatcctgcggacaaaccgccccagggcgtacctagcaccgaagcatcaggcgccactaggtctccagctccttctcggatgacgtccttcagcacgccccggtcccccgagatgtccagcatcctctgacttaaccgctcgtacagggactgatggagaatgaaagccaggcctcagagccgcagacccacccggccacccctcagcgtctacgcccccgaaacgtctgggccctcacctggccgggggcgtcgtccccttccaggactccctggtttaacgcgcttccccccatgtcctagctgccctccctgtggcgtgagccttcggcctggtgcgccccgctgcccttcctggctgtgactctggtggggttccgaaggcccctttatgcccggcagacccctaccgacggcggcattacattctggggccacgaggaggcactcatcgtttcgttccaaccgccgccaacggccctggccctcgcgagctctggaactacagaggtcgcacggtgagttgccaggtgtggcccgtaatcggagcgcacaaaacatgatgggacacgtaacgggaccacacagggcacattgggcacttgcaggggcgcgaggtggcggcacgtaatgggagcgcgctgagcatgatggggcatgtgcgggagcgccaggcggggcatgtaaccagagcgtgcggggcatgatggggcacggacatggggggttaggtggggcacgtaattggagctcgcggggcaggatggggcatctaactggagcgacagagagcacgatggggcacttacaggggccggaggctgggtacgtaatgagagcgagcgggaaatgatggggcacctaacgagcacgcagagcatgatggggcacgggtgcgaggtggggcgcacagtgggagcgcgtggggcatgatgggacacatggcgaggccgtcagggcacaggggaagcacttttggaacacgtgagtgacagggctgccgcccttgaaggagccctcggagtggctgcgtggtggggcacgtggggcaggttcaggaaaaaggatgcagcatgtgattgcagggcaacctggtgaggacacgagagccacctgccaccagcagggttcagggctcccagctgtgggttacttccaccttctttcactttccctcttccattgtattctagagaatttaggcccagacaagacactgattgattgattgattgattgattgacagaggctcgctctgagcccaggctggagttcagtgatggatctcagctcactgcagccgccacctcctgggctcaagagatcctcctgcctcggcctcccaagtagctgggattacagacgtgcaccaccaggcccagctaatttattttttagtttttaatttgctggtaagatggtttgtagctttgttgcctaggctggtcttgaactcctggcttcaagcgatcctccagtcttgacctcccaaagtgctgggattataggcgtaggctacagccaactttcaatactgccccattgggggttacgtttccaacacatgaaattaggaggatacattcaaaccacagcagtatattatgaccataatattcattaactgtgtaacaggctgggcgcggtggctcacacctgtaatcccagcactttgggagaccagagtgggtagatcactcgaggtcaggagtttgagaccagcctggcccacatgatgaaaccgcctctctactaaaaatacaaaaaattagccggtgtggtggcaggcgcctgtaacctcagctacttgggaggctgaggcaggagaatcacttgaatccgggaggtggaggtggcagtgagcctgattgcaccactgcactccagcctgggcaacaagagcaaaactctgtctcaataaacaaacaaacaaacaaaacctgtataacagagtgtcattgaatttctaaacgttgaaagacttcacattaaaaaaaaactcacaatttaatattattgagtgaaagaaaccagacacaaaagggtacattctatatgatgctgtttatgtgacattcaaaaacaggccacatgacaacatggtaataaggacagtggctgtccttgttaggagttatgactggaaggaggcaggagggagctttctggaaacactgtacatcttgctcttgagagtgcacgtatatacatcaagtgtttatcaagctgtgtggttaagatttgcacacttgtatatgttatacctcgatttaaaaaatctaaataagtaaataaagataccttcaaatcttttaaaaaaaaaaaaaaaaagaggccaggttcggcggctcacacctgtaatcccagcactttgggaggctgaggtaggaggattgcttgaggccaggagttcaaaaccagcccaggcaacaaagtgagacccctgtctctactaaagtaaataaaacaataaaataaaaaaaaaaattcgagagatcgaaccatcatctgccagtttgtattagaaaaaaagagagagagaaggaagactgcgtgcaataaggctcatgcctgtaatcccagcactttgggaggccaaggtgggaggattgcttgagcccagaagttgaagaccagcctgggcaacaaagcaagacccggtatctacaaaaaaaattttaaaaattagcttggcatggtggcacgtgcctgtagtcccagctactcaggcagctaaggtaggaggatggcttgagcctaggagttggaggctgcagtgagctgtgaccacgccactgcactccagcctgggcaacagagcaagacactgtcttcccctgccccccagccccccaccccccccccaaaaaggatataagagcaagagattgagattcagaaagaactgtttcccagcacctgtctgctcctgtcggggtcgtgaggtgtggacagtgtgcctagtccctctgtttctgcccctcctccacagtggccaaggccagcacttgaatgttatcagagcaggcccaacaaaggctgcctccccagtcctgtgatgtaacccagtttccacctgattctggtgaccttggggacacaggggtgttgctggggaaggggaggagagaaggggcagagaccaggcagtggtgcaggcgtccagctgcacttcccacttctgactctgtgcctgctgttccctgctgggaagaagaaaagccagtgatgctggcttgaggctgtagtgggaggcccagcggattgtgagaagccaggtattccaatgtcgggctctcgctgggggcttctggtgcttcttctgtctcactgacaagctttcataggggagcaggtgggagatcagggtagaggccttgtaggttccaggctctctagaattacctgggagtgtcacctataagtgtagagttctgggtctcactggagaccccctgaagcagatcctttgaaggtgggcctctagaatctctattacacctatgctttcaacagtttcctgaaagtttgggaactgatctagaaggtggggagcttgcctaggttttgctgttcagttctaggtccggatgcatgctggggctggaccttgcattattagtgtcactgcaaatgaccctgcagatggcccctttcatgcttgtctccaaatttgagtaaaaaatgtagacacacacacacacacacacacacacacacacacacacacgtatcttcaagggaccagttttttcactgcagtcttttgttttacagctgtggaaactgaggcccaaggtcatgtgggttaggactgggatccaggactcaaagtgtttcctctaaaattctggtgctccttagggttgagggtggtgggtgagtgctggacagggggaggggagtggacaggactgaggtcggatgcctgtgtttcagcccgggcagtgagtgtggatggcttggcaggtgagcctgctggagctggaggaccggcttcagtgtcccatctgcctggaggtcttcaaggagtccctaatgctacagtgcggccactcctactgcaagggctgcctggtttccctgtcctaccacctggacaccaaggtgcgctgccccatgtgctggcaggtggtggacggcagcagctccttgcccaacgtctccctggcctgggtgatcgaagccctgaggctccctggggacccagagcccaaggtctgcgtgcaccaccggaacccgctcagccttttctgcgagaaggaccaggagctcatctgtggcctctgcggtctgctgggctcccaccaacaccacccggtcacgcccgtctccaccgtctgcagccgcatgaaggtggggagtgagggtgcaggcggggcggcggggcccgcggggactggatcctgtgctctctggcgctatcaactggcaccaaaacggatccagctatcctcgatttccctgcagccctgccctggcgcattcattccttagtgtttgagcggcagctaaacccaggtgctggggattgaagctacacgcacaggatgggagctccctggtgtcacgtgctcaccccttcctgttttttgtttgcagttctggtttgtttctttttctttttttctttctctctctcccgcccccttcccttcctctctctctctctccccctccctcgcccgccccccctttctttttcttctttctttttggagacagcgtctcactctgttgcccaggctggagtgcagtggtgtgatcatggctcactgcagcctccaactcctaggctcaagcaatccacccacctcagcctcccgagcagctgggactacaggtgcacaccaccatgcccagctcattttttatattttgtagaaatggggtctggttatgttgcccaggctggtgttgaattccttggcctccaacgatcttcctgcctgggcctcccaaagtgctggaattataggcatgcaccactgccctacgccccttgtttgtgtctggacactcccctgtttgcactctctggtgcatgagagtggggacttcattttgtcccctggtgtatttcagtgcctggagccatgcctggcacattgtaaatgtccaaaatgctgaatcagtgaattcctgcctttataggccatcaccaaacctagcagatcattctttaagatgagtaataataatacctgactgggtgttatatatataaaacacctgttataaaacacgtgactgggtggcttatgcctataataacagcactttgggaggctgaggtgggtggatcacttgagtccaggagtttgagaccagcctgggcaacatagtgagaccctgcctctacaaaagtttcaaaattagcctggttggccaggcgcagtggccactcctgtaatcccagcataaagctggagggagcatgggtgggggcgagatagggccagcgaggtaagctgcggctggggcatggagaggccagtgtgacccgggaatggatttggagtttattcacaggatgagggagaaaggcgggggctggagtgttttaagccagtgatgacatgctcagatctctctggcagaggggagctttgagggtgaggcaaaaggacagtgagagatgaaggtgccaggacctaagttggtgggaactgggacaaaggcctggggcagaccaaagacaaatttcaaacagaaaaaaaccctgacaactgtgtgtggcaaggagggtgagggatggggaggttgactccagctctgtaattcccccttgcacagaggaagtgatcgcaggggaggatccggcgtgggcaggtggagcgggaggtgcctggggatgtgcagtcgggttgaggggtgtgcagaccaggacagcggtggggctcagggcaagaggtgtggagggtccttcctcttggtggtcactgaagtcccctttggtggagaagaccaacccaggagagtctacatagtgataagggaagacactgatgatgaccccaaggggtaccaggcttaaaatctggattgagagagagagagccctgaaaaaggaatagaaagaatcctcagagcaggaacaccggctgagtgtggcctcccggaaatcagagagacagactgaaggaggagatcacgtgtgtgaaatgtctctgaggactgaaaagtgttaaatgtagcagtaagaactgattatcttggcaagagcaggtttaggggagtatggaaggtggaagccaactgcaggtgaggaagccgagtttatgttttattagttgatgggaaggagggagggaacaggctgggagattgtctgtcctttgtagttaggatccagcagctcagcttgggtccctgttttagatttgggcttaatttttttttttttggtagagacagggtctcactattttgtccaggctggactcaaactcctggcctcaagtgatcctcccgtctcggcctcccaaagtgctgggattccaggcatgagccactgttcccggccagatttgggttttgatgatcccgaggctcttctctgttgcaacacagaatacaactaaattgcactcctttattgccctctttaaggtgttcccgttgcctcctgtttattgagatcttgagatgctcgattgatgggtgcattgatttgcataacttagttcttctcacggggaaggaatgagtcccgtctgtctgcctggggagggtgacattggaatgctgttcttaggcctctgtgagatgttctgatgcctcattctccagagcaaggactctgtccgtttatgccagcaagtgcttgattctttacccaactcccttcctgaaagccccttgcagctctctggtgcttgggcacgatccaagccaaaaattctgtacattgcatgggtataaaccgacgggggctctggtcaagtcatggagtagatggtggtccaggagtcctggttggcacccccaaggctaggtcagatttggggcccgggcagtccaggagaagtgcatttatgtcagcttggggaggtcgcaaatccgtgctgtgtccaagcccaccaggaatggattcaggtgtttataggtgtggggattcaccaggttaaacccaggcccgtgtgagcaccactggccctagaattagcctcacctggcgccggcctttttgtgatggctcctgattaaatacccactaattctggatctgctggtgaccacagagttcacctgatgggtcccctacaggcagcattcaatccaggaagtgccagcatcacatggtgacttctggtagctgtaacatttagtgactgtctccatgtcatgcacaggggtgacatcgagaccctcttatgcctgggaagttcctgctgtcaatgcagaatattctctttttttttttttttttgagacggagtctcgctctgtcgcccaggctggagtgcagtgggcgatctcggctcactgcaagctccgcctcccaggttcacgccattctcctgcctcagcctcccgagtagctgggactacaggcgcccgctaccacgcccggctaattttttgtatttttagtagagacagggtttcactgtgttagccaggatggtttcgatctcctgacctcgtgatccgcccgcctcagcctcccagagtgttgggattacaggcgtgagccaccgcgcccggcccagaatattctttgaagaaaaaaaaaacattagagatgggatttcactgtgttgcccagtctggtctcaaattcctagcctcaagtgatcctcccatcttggcctcctaaagtgctgggattacaggcatgagccactgtgcccagcctagaatattcttttttttttttcttgagatggagtcttgctctgttgcccaggctggagtgctgtggcgcaatctcggctcactgcaacctcctcctcccaagttcatgccattctcctgactcagcctccggagtagctgggactacaggtgcccgccaccatgcccggctaattttttttgtatttttagtagagacagggtttcactgtgttagccaggatggtctcgatctcctgacctcgtgatcagccagcctcggcctcccaaagtgctgggattacaggcgtgagccaccgcgcccggcccttagaatattcttgaattatcttattttttatttttattttttgagacagagtctcactgtgacacccaggctggagtgcaatggcatgatctcagctcactgcaacatcaatctcccaggttcaagcgattctcgtgcctcagcctcccaagtagctgggactacaggtgtgtgccaccacacctggctaatttttgtattttcaatagaaatggggtttcaccatgttggccaggctagtctcaaactcctgacctcaagtgaagtcccacctcagtctcccaaagtgctggaattacaggcgtgagctactgcgcccagactattcttgaacaatttaacctgttttggactcaagggtacctgggtggctctggttcccgccctggtttccctgggagtgcttgtggccattgggatactcccaagaaggtgatccaaggagctgagaaggggagggatcagctgctcatggggccatggcctgttgcctccaggaggagctcgcagccctcttctctgagctgaagcaggagcagaagaaggtggatgagctcatcgccaaactggtgaaaaaccggacccgaatcgtcgtgagtgccccttccctctgcccctgcctgggaccggccaccttcactttcctgtagagctcagttctcattggtcctttacagaaaaccatgccttccatataaagccagaactcaaagcattccggggcggggtggggaaagcgcaaatcctctcaggggaattcaacccagttgtcgttaggactggctccaagttggcttttgccctctgtgtccttgagactgagataacccaggacttgagtctcgggggtaaacagctgaaagcatgggcgtgactcctccgcccctgtgccacctgtgtctgcttgaccttgccagcctgtcatggtgccctcccagtacctgggtgcgcaggcgtggagaggctggcagccctgggccctggctgatctcctgaactgagaggcacatggggctgggacgcatagtgccccggccctggaggtggctgtgaaacagaaacaggagccgagcaagatccagaagcacttggcctccctcatttaccctcctcacccttgcgcggcaggcggtatcagccctgcctggtggaggcggagctcagggttctgcagggagttctggctccctcacagcaaagcccgctcgcccagggccttcctgctttccttcagttgtggaactctgggatatgcacatttaatagctgaaataggcaaagtggggtgtggtggcgtgcatctgtaatcccagcaactcgggaggctgaggcgggaggattgcttgaggctgggaggtcaaggctacagtgagctatgatcgtgccactgcgctccagcctgggcaacagagtgagaccctgtctgttaaaaaaaaaattaaaaattaaaacaggccaaagcagagcctctccatttgaaatgggagctggggccaccctccccacggccaccgccagggctccccatgcatggggtgaactccctgcccggcgccaggccatgcagcctcccctgagactcaggtcccaggaccaacccggtcaggaaggccctggggacaccgaggccagccagacagagcctggcagctcggctgtgactctgcagtgagcagccctccctgtcccagaatgagtcggatgtcttcagctgggtgatccgccgcgagttccaggagctgcgccacccggtggacgaggagaaggcccgctgcctggaggggatagggggtcacacccgtggcctggtggcctccctggacatgcagctggagcaggcccagggaacccgggagcggctggcccaagccgagtgtgtgctggaacagttcggcaatgaggaccaccatgagttcatctgggtgagtggacagggaggcgtcccatccccatacccgccagggccttccccttcccaacagtgccctggcttcccaccttctagccttaacctccctctctcttgccttccagaagttccactccatggcctccaggtaataaccttggagagagctcagccagggtctggtggctgcgggcacgggcatctcagctccactggttcctccattcagcttaaccagcgcctcccaagcagctgcctatagctggctctataactgagcctggggaagatagaggaaagtcacatccctgccttcaagggtctcgcagacaggtggggaggcagatggtgaactgtgggtacctagaacagcagaagttcactcaagctacagaaatactagaggagggtagctcatgcctgcaatcccagtactttgggaggccaaggcaggagtattgctggaggccgggagttcgagaccagcctggccaatgtagtaacacccccgtctctacaaaaaatacaaaaataaaaaaattagttgggcatggtggcatgcgcctatagtccctgctactcataaggctgaggtgggaggattgcttgagcccaaagtttgatgctgcagtgagtcatgatcatgctactgcatgatccagcctgggtgacagagcgagaccctgtctcagaaaacaaaacactagaggaggagcaggtgtctgggaggcctggcagaggggcacacgcctgatggctgagaagggcccaggacccgagtttgccaggcaagccgagggaacagtcctgtaaaagggggagtggcgtgcggactctggttatgagaagttcagggtggctggatgtaaggcaggatatcaggaggagtgggagctgggagaggtgggaaatggccagaagcaacatccaggagcaccaggcatcccttgcttaccgtcctcacccttgcgcagcaggcagtatcagccctgcctgaaacttgctctgcagattgtgggaagagagcggatccatgttctagacccaacaaacgaacacgtgcagttcccaagccttcctcactccctgtttatgggagactccttgtttctcacatttcttttagtcttagagacaatttggtcaggagacatgggtttaaatgaaggcacagagcctgggcacagcagcttacacctgtaatcccagcactttggaaggccaaggcagaaggatgacttgaggtcaggagatcaagaccagcctggccaacatggtgaaaccctgtctctatgaaaaatacaaaaattagctgggtgtggtggcacatacctgtaatcccagctactcgggaggctgaggcacgagaatctcttgaacctgggaggtggaggttgcagtgagctgagattgctccactgcactccagcctgggtgacagagcaagactccatctcaaaaaaaaaagaaaagaaaacaagaaaaaaaaaagtccgggcatggtggctcatgcctataatcccagcactttatgctcaagtctgcttttttttttttttttttttgagatggagtctcgctctgtcacccaggctggagtgcagtggcacgatctcagctcactgcaacctacacctctcaggttcaagtgatctcctgcctcagcctcccgagtagctgggattacaggtgtgcaccccatgctcagctaatttttttatttttaatatagatggggttttgccatgttgaccatgctggtctcgaactcctgacctcaaatgattcgcctgcctcggcctcccaaagtgctgggattacaggcgtgagccaccgtgcccagccttgagtctttatttttagagacaggatcttgctctgtcacccaggctggagcgcagtggtgcaactgtagctcactgcagccttgacctcccaggctcaagtgatcctcctgcctcagcctcctgagtagctgggacgacaagtgtgtgctaccatacccagctaatatttaaatttttagtagagatgggatcttgctatgttacccaggctggtctgggcctcaagcaatcctcccaccttggcctcccaaagtgttgggattataggtgtgagccactgtgcttagcctcccataaccctttgattcacgatactcataggctaagtgggtcctggaagctccggggtagccttctaaccaagatgctggctctggccactggaagtcaaactgggtgcacagaccagtgagagggcatgagggagcctagcaggggtgaacagcaaccctcagcctccccacagccctgcctctcctcctgcctctcctcggtctcctttgaggattcagcctctcgtcctcaccacttatggtctgagggcctccaggctcctcttctggctgtctacccctccacacccatagctccagtcatcacttccacagggatgactcagaagttccctctccgggagacccgtcccttacaggccacatccagtagcgctccagccattcagcagctccgcctggacgtcaagggcatgtccaaaaccgcgctcatgatcttcctactcccccatccctgagatttatcctgtggctgtggtgtcctgtggctactgtaacaaatgaccacaaacttggtggcttcaaacaaatttaatctctcatggttctgaaggccagatgtccaagatcacgatgacggcaaggccgcgctccctctggagactgtcggggaaaacctgcccctttcctcttcagcttcaggtggtggctgccatgccctggtgtttcctggcctgtgaccgcatcattccaatctctgcctccatcttcacgtggccttttctgtatgtgccggtctaatcttcctctgcttctctcttattttttgttttttgagacagagtctcactctgttgcccaggctggagtgcagtggtgtgatctcggctcactgcaaccgccacttcccaggttcaagcaattcccttaacttagccccctgagtagctgggattacaggcgtgcactcagcaaatttttgtatttttagtagagacgtggtttcaccatgttggctaggctggttgtgaactcctgggctcaagggatccaccagcctcagtctcccaaagtgctgggattacaggtgtgacccactgcgcttctccctataagagaggccttcctctgcctctctcttatagggatacttgtgatgccatgcaggacctgcccagataatccaggataaccttctctccaaatccttcccctgatcactcctacagatctcttccatagaaggtgacatttccaggctctaggaattaggacctgctctctctgggtggccgttgttcactccaccaccccaggtttccccatcctaccaaaagacacagcagcattgtgtcaactgcccaaactgaaaacctatgagttattctcgacctgacctttttcctgagcaagttctgtggatttaacttagcggtcacactgccaacttcaaccgaactccactgccaccaactcagtccaggccaccagttcttgtttaggtgactgccatgacccccattggtctctccctgcctcaactctgtcccctccatcctatatccccacactgtaaccagactgattatttatttatttatttattttttggggaaagaagcttgctctatcccccaggctggagtgcggtggcacaatctcagcttactgcaacctccgcctcccaggttcaaacgattctgcctcagcctcccaagtagctgagattacaggtgtctgccacaatgcctggctaatctttgtatttttagtagagacgggttttgtcatgttggccaggctggtctcaaactcctgacctcaagtgatccacctgccttggcctcccaaagtgctaggattacaggtgtgagccaccgcacctggccagactgatctttaaagaagtatacatgaacacagcactccatgacttaaaacccttaagaggactaccatttatctcaagataaaagaacaaaatcctcactgggcacagtggttcatgcctgtaatcactgctttgggaagccgaggtgggaagatcactttaggccaggagttcgagaccatccatgggcaacatggtgagaccgcatttctacaaaagataaaattagctgggtgtggtggtgcacgtctgtagtcccagctacttggagggtgaagtgggaggatcacttgagccctggagttcgaggctgcagtgagctatgacggtgccactgcactccagcctgggtgacggagtgggacctcatcaaaaacaaaaccgttattgtggctttgaggcctggatcataactacatcatttaatttggccaaaccggcccatttcaggtacccaaataccccacgtgctttcttgcttggctctgggactaatgtggttactggtgcagggtgagtggcaggtatcatgaaccacattgtggacctggagttgctaggaccttttctgccattacacagaaaaatcctccctgagaacacagccattggaggacacatggcagaggaagataagacaataaacagagacacataattatggccagcgtgggggctcacgcctgtaatcccaaaactttgggaggccgaggtgggcagatcacctaaggtcaggagttcgaggccagcctggccaacatggtgaaaccccgtctctactaaaaatacaaaaattagccgggcgtggtggcacgggcctgtagtcctagctactccagagggtgaggcaggagaattgcttgaacctgggaggcggaggttgcagtgagccaagatcgcgacactgcgcgacagagtgagtctttttgtctgaaaaaaaaaaaaaaaatatatatatatatatacacacacatacacacatatatatacacacacacatatatatatgaaatgaccaatacacatgtgaacatattcaacgcaataactgcggttaaacagcagtaaaatcccattatttatccatcagattgacaaagactgaagaactggagaagaagtggcgaaacgggctcgcagcgtcgcattccctaccccagcaggtgcgcccgcagcgtcgcactccctagcccggcaggtgcgcgatcacacacacaccctgcagggggacttcgaccggcacttccggtcccggaagggcatgcccttggaccccggaagtccgggcgggggcagagccgggtgcgctttgcgacagagccgtaaaggcgcgcgggaacatggggctgtacgctgcggtggcaggcgtgctggccggcgtggagagccgccagggctctatcaaggggctggtgtactccagcaacttccaggtagcgggcccgggcgccacaagtaggggtggggggtgaggaacccggggtggggtgggacgggcccggatggggtcgggaggtggggcccggcgaggagggccgggggagcccccgacccagcttgtctccctcggccacacagaacgtgaagcagctgtacgcgctggtgtgcgaaacgcagcgctactccgccgtgctggatgccgtgatctccagcgccggcctcctcagtgcgaagaagctgcagccgcacctggccaagggtaggggcggggcggggaagtgaaccccgacggtcagcgctttgtcatctggtttcagccccgctgccgtgcacggcgggactggagcaagtcgctcacctgaaatgagtatgagcagaccttccctgggttacgaattgagatgggatgaaaatgctttaacttcgagtgttttgaaggattaaataaccgaagtacaaagtagtagtagcggagacagtaaggaagtcgggcgtggcggcgcgcacctgtggtcccagctactcggaaggctgaggggggaggatcacttgagcccaggagttcgaagctgcagtgagctgttatgtggccactgcacttcagcctgggcgacagatctagaccccattctaaaaaaaaacaaaaaccccaaacccacacccacgaaagggtaatgttggcaagaagttgggtgcagaggtctactggtgaacatctgtggggaaagggtctaaggctgggaagcgagacgccaggttccgatcctgttgtgtagttaatttctggtgtggtcttgagtaaggtaccccacctttatctgtaaccatctagtcaggtgatctctttagccattccagtgcccgggctctattagagttagttctaaggcattcatacttcttgcttagggcgtttctgtctttgatccctcatccccaggtgctagtgtatgagttgttgggaaagggctttcgagggggtgggggccaatggaaggctctgttgggacggcaccaggcgaggtgttgagttggctcggctcaaggttcttcggggtgtgagctggcatgaggacctgttggaagtgggatccaggcctggtccaggtgagctggaaggagttgaggggcgggggaggtggggaactttgctcctgcctactcactgctcattgcgtcctacctagcctcccagctgcctcgatttgtgcgtgtgaacactctcaagacctgctccgtttatgtagttatttcaagagacaaggtttctcctatcagggtcgggcttccaggtgagagcttagagccctggctgtcctcatctagggaggtgtctggggtactgggaagagaagtggttggatagttgtgactttgctctctgggctttgttcctacctttccagcagtttctccatctccaaggtttgttttcctcgcatcccttaaacatcgaactcctaggagccccatcctacattcttccggagctctccgttttttctctaactttagctcctgcctcccacctggtgattctcaccgcccagtgtagacttcccttttgcattcttccctccttaggttcacatgaatgcaccacagatgccacagtcgctgcattcatctttcctctcagactttacacttagtacatccccagtttaatctaacagatgtcaccgttttccacccatttggtcaagccagaaaccgagtcatcctaggtgcttccttcccctccctccaatcatttactcctccaccttgagcatctttctcagctccacttttttttttttttttttaggactgagtctcgctctgtcactctcaccgaggctggagtgcagtggcatgatcttggttcactacctccaaggttcatgcaatgctccttcctcagcctcctgcgtagctgggattagaggctcccaccaccatgtccagctaattattgtatttttagtagagatgaggtttcaccatgttgaccaggctggtctcaaactcctgacgtcaggtgatctgcccatcttggcctcccacagtgctgggattacaggcgtgagccacagtgcccggcctccactcctttctcttaattcccccggacactgcctaggttaagcactcatttcttattgggatgaccacaagaacttcccagactggtctctctgcttccagactgtctcactgcattttccttgaggttgactgtaggaagctctaaaggcagatctgatgcattactcctctgctaagccttttttttttttttttttttgagagagttttgctcttgtttcccaggctggatggagtgccctggcgcgatctcggctcaccgcaacctctgcctcctgggttcaagcgattctcctgcttcagccttctgagcagctgggattatgaaggggtggcctgcccctccacatctgtgggatatctcatcaggtgggacaagagactgagaaaagaaataagacacagagacaaagtatagagaaacaacagtgggcccaggagactggcacttagcataccaaggacctgcaccagcactggtctccgagttccctcagtttttattgattattattttcattatctcagcacaaggaatgcggtaggagagcagggtgataataaggagaaggtcagcaaaaaaacctgtgagcaaaggaatctgtgtcataattaagttcaaagggaggtactatgcctggatgtgcacgtaggccagatttatgtttccctccgcccaaacatctgtggagtaaagcataacaaggcagcattgctgccaacatgtctcgcctcccgccatagggtggtttttctcctatctcagaattgaacaaatgtacaatcgggttttataccgagacattcagttcccaggggcaggcaggagacagtgcccttcctctatctcaactgcaaggctttcctcttttactaatccacctcagcacagaccctttacgggtgtcgggctggggcacagcctctcatcccatgaggctatatttcagactatcacatggggagaaccttggacaatacctggctttccagggcagaggtccctgcagcttttcacagtacattgtgcctctggtttattgagactagagaacggcgaagacttttaccaagcatactgcttgtaaacgttttattaacaaggcatgtcctgcacagccctagatcctttaaaccttgattccatacaacacatgtttttgtgagctcaaatttggggcaaagtcacaaattaacagcatctcagccaaccaattgttcaaggtacaggtcaaaatggaatttcttatgtcttccctttctacacagacacagtaacagtctgatctctctttcttttccctacaggattgcaggcatgcagcaccatgcctggctaattttgtatttttagtagagacgggatttctccatgttggccaggctggtctcaaactcctgacctcaggtgatctgcccaccttggcctcccaaaatgctgggattacaggcatgaaccaccgcgcccggccatgctaagtcctttcttggctccattgtgctgtccctcctgcttcctctccaggtccatctgccacagtgctacgtgcaccagcgtgccagcaacagtggctggtctctgccccgtgcctcctccactgggctcacacctgtcttattttgtcctttggtggctctgagaagcagcctctgcccctctccctttcccttactctttgtaagatcctcttccttctgccctaccatgttgcttggacaccagggtggaatagcagagaacggctgcttgtgtttgaattccagctctgccacttcgatagatttctgaactgagacatgtgactctctaggcctatttctgcatgggtcggagagtgggcgggactgctttactgagttatagtgaatgtagttttaacctaagcgcctcacatgactaactcctcatccatcaagaatgagctcagctctcacttccccactcctcacccccctgtaaagtaacctttctccaaggttatgcttcaacaggaatagctaacatttattaaattgtggcacgtaagtatcttggatatattggctcattgaatcctcacacctactattttacagagatgccagtggggcttgagattgaatcacttgcccaggctcccactgctggtaaacagtagagggggctcctgacccatcagtctggcttgacaacccattccctcaactgcggatcccggattcccttatcaccctgttgatttctccatagctgtggtaacatttgttgcatgaatggaccgttgaaatagggcctggcagggagaaattcaggaaatgaatgaatggttcttccctggcagccttgatgacttacaagccctcaaggggaagcattttctcctggactccttgatgccggagctgctggtgtttcccgcccagacagatctgcatgaacacccactgtaccgggccggacacctcattctgcaggacagggtaggcaagaggaatagaaaagggaagaatgtgtaggcacgggaagggcctagcctggggtctctgtttacccggcccctgtgctctgcctgccaggccagctgtctcccagccatgctgctggacccccgccaggctcccatgtcatcgatgcctgtgccgccccaggcaataagaccagtcacttggctgctcttctgaagaaccaagggtgagtgccacaggaggaggaggaggaggacatggggtttgattttgtgcctttcagtgggtaataaaggctgaaaggatgactttcgcttaactctttcctgctgtaccaaagtagttcacggtatttgccccaagctaagctttccccactgcaggtgtgagatgtggatcccttagcccttggggcagagaccccaggccagttacctctgaccctgggccctttaaatataggccgtttcaatattgtgtgtcctggcttaacctgcatgttctggttgtctgtgtcagctgtgacaggcccttagctgctccgtgcatgctcagctcacccctgctctgccctctgccctaggaagatctttgcctttgacctggatgccaagcggctggcatccatggccacgctgctggcctgggttggcgtctcctgctgtgagctggctgaggaggacttcctggcggtctcccccttagatccgcgctatcgtgaggtccactatgtcctgctggatccttcctgcagtggctcgggtgagatggtgagaaggcgtggctgagggactcggaggtccacagcagcttagacctggagtcatctgttttggtcttagttctgacactttaatgggcttgggaccctggagcaaaagttctcctctgtgaggcaaggatttcaggagcgaggatttcaggactgaggcagcctgtgaagctgtgtaaccgagacacgcttttccttaggtatgccgagcagacagctggaggatcccggggcagggacacctagcccggtgcgtctgcatgccctggcagggttccagcagcgagccctgtgccacgcgctcactttcccttccctgcagcggctcgtctactccatgtgctccctctgccaggaggagaatgaagacatggtaccagatgcgctgcagcagaacccgggcgccttcaggtacagggcgggcgccagggtcgtggaggggggggatggggtgaactgctctcttacccagcattggggctgtttctcttgcaggctagctcccgccctgcctgcccggccccaccgaggcctgagcacgttcccgggtgccgagcactgcctccgggcttcccccaagaccacgcttagcggtggcttcttcgttgctgtaattgaacgggtcgagatgccgacgtgagtgagtgggggcatgcttgggaggcgcaggatggtactggcacatctaacatctacacttctctagctcagcctcacaggccaaagcatcagcaccagaacgcacacccagcccagccccaaagagaaagaagagacagcaaagagccgcagccggtgcttgcacaccgccttgcacatagcagaggctccaggctgactccttcctggtgggaaaggaagatgcctgtcctctccgtggaggaccctgggccctcaccgcaggcagcagtttgcattttgaaaggttattgggtcccttcctcgggctgtgttcttgctggtgagcaaaagtgttgcctgcagaaataaaatgcagaacgtactctacgatagatcacagttttttattcttaatgtcacaagcaggagaaaaatctcacattcatactaaaaattccaactagactcaacaggaatgaagtctctatttgtaatggaaagtcccagcctcccgctgccgtccagtgtgtgtactgtacacatccacactcactctcactcagggttcccggaccggctgtcctgcctgcggaactgaggtaaacaagctcaggtactgacactaggagggtctaccttacataaggtacaggtagaagcttgattgattgctaggcccaggcccacccagaccctccaatcctaacaggtatttaggcttgaggttcactccctcctcagctgcacacgcagccaggtataacactcgccctcagtcacaacggggagggggcaccggttacatctacatcacattatttataaaataagaattacatttcatataacatggccagaaggagctctagtcccccaggaaagctgccggggacagcatttgagcctcttctttgcacaggcataacttaactatacagctaattcctagttaatagcatttatacttaaccacctcaatgaaccaagcttgaaggaatttaaaaggcaatttagcttaaatacaaaaataaatttttgttaaaaaacgtttaaatatttttttcttttaatttagacacacgcattcatacttctcccaaagaggttgggcgtgacagcaaggcgcttgggcctggggtatgtggtttcagaaggacggaaggaaaggatgggctgcagagggccctgtttgggaaaaataggattttaaaaatatggttcattaatttaggttttctaacatctactttgggtgacgtagcctccagtgaggtcagttaagtgggacagaaaccgcagagggaagaggtctttgcttcccctgggcccattctccctggctgccagcccttgaagtcagaacaccatgggaaaattcaggagtcggcacttgtagccgtcaagtggtgctactttccacattcaattagcgaggccccagaaaacttgaaacaggaagtccggcactaccaacatgccgccactcatacaactcaactcttcctccaaactcgattcaaagagcaatacacagagcgtcagacaaaggaacacaggacaaggcttgaaacatacaatcctggagaggcagacgagggcccaatggggccaaagggtagctgggcgaggaggcagctgaagcagcggtgggcatcctgcctgctccaagagcttctcccttcacccctggctctgccaggctaacagtcttgagccaccaagctctgaggggccaaactggcagagggttggagatgaaacattgattcaggcttggcaggaagaaaacggcaggagcagcacccactggggtctccaaggcaaagctagattcaagggcatttaaaaaggagggaatcctgcaaggaaccggtgagggacacagcagcaagaaatggggaaacagagtccccagaagggaccagaggaagagaaccacttctcacagctaagccaagcaagataaagctttagggataacccatttcccaaatcccatcaggtgcacaccaccgatccaggcgggctggaccctgccccctccagcgacgacggctctcggggaaaggtggaaggggcgcctgcctaagggtgcgctaagcgggagtcagggcagcggacactatgtacaggtccttagttctccagcctccccagtggaactgttcaagtagaggtcccgggctttggccctccgcatcctgcttccccttccctgaggcttgtgcttcctccagaagggaaagggccccagggctgccactgccccctggcggctgaagccagagatccggggtaggtttgctttacgcagctggaagggtccaaggctctttctagcacgtgccaaggtccagatttagggaaggggtggggggaacagggacaggggacaaaggctactttttgcgggtgtgctgccttcgggcctgcagtcgctgtcgagcccctggggtcttggatcccgcaccaatggaaaatgaaggggccgccgatcctggaaagattcaacaagacctcatcagggcagctgctacctgagactctggctctgggtgcccaaatctctggaaggccaggccagtaataaaacacagggtgcctcaatagggctttccccgctgcgtcagaaacactgtacgggaggagcctcctgaaatgcaaactcccagagtctcagagcgaggcccacgaatccatttttacctggcttcccatgggaggcaaacttccaccccggacagctcctctctgatctctgccatccaactcccatccctgggctgtgctgtactcctaacccgaaatgtctttcctgtgctgaacctgatcttcacggggcctcagagggccaggagcctgccaccccacccaacctctcctcagacagacgagcagggccacagggtggcttgctgcttaccgaacggtccaacaccaacaaagccttgggcgggtgctgaagatgccccaaaggagaggctgctgcccgatgtgcccactccaggcgcaggggtgttctgaccaaaggtgggggtggcggtgcctggaatgaagagaacagagagctggccagtgagcagagggcggaggcaggcgaggagccgggcaggagcctgtgctctgcagggcacttcccacgggaccctcagccccacttctgcttctggggcactcctccatcagcagctgagccagacaaccgagtcttcatgcctggtgccccagctcagcctgcttctcccacccgctaatggccacgccagggcagagaaaaagcccccctgccccgcagccacctcgtgggcctcctgaccatcgctgcagaggggagtactctggggcccccgcctcctagcgtacctgggttggctacctcctctgttcaggccttttccccctagccaccgtcccctcccctctgaagcctggtttgtccgtcctgtgtcttttgtgatgccccgtggtcccctcccttccccggccttgccctgactggctctggctgcctgcccgatgccctctctggcagcccctctgcagggatggctgctctcagggcttggctccggcccggacaaggggaagctccctgtgctcccacgctgcttccacacagtttctcttccttccctaaataccgtaactcaggttcaaatcactttaatctgccatgtcctcatgtcacctgtcaactgccaggtcactccctgattcacagaggacccttggctcactggcttcctccccatcaccactcacggtgacttcgccctgtgaggctgactgatggtcctctcagcccctcggccctgccacccccatgacctcctctccccgacccctgccaccactcctgcagccacactgtcaccacaactgctccggctcccgaatctcctgcaggcaccacccctcctgcagctgacttcacccgctctccactcctgcaccccctgagctgcatcggggcactgacccgctgcccctcctgctgtgcttgctggggtctccacagccgggtggcaccagctgtccgctgaccttagatctatacccagtgtcgctgggaaacacacgccatgctaactggcctcactttaacttcacaatcacaattttccagcccacaaactgcctggaaactgatcacactttttaatatgatgttcctttcccccactgtccaaaatgactatttcaaaagaccccttttttatacactttatcccgaccttccctctcccagattttctctcctacttcacgaagcaaacagaagccatgggatctacattcatcttccacacgggaggaaccatcactgcatccttctgcctgattctgcaatggttttcctgaacacttaagacccaaacacccaaccctggccacaaacaatccttgcctcttggcctccttccacaccactgctttagctcctgccctcctgccatgcttgtctttgttctgctcttcaacataccaaacatgtttctgcctctgggcctttgcatgcgccatcctgggcctgaaaggcatgtccacttgtgctgtgcccacccccaccccacccccatattcagcttacgcttgagacagtcttgctctgtcacctaggccagagtacagtgtggcatgatcttcgctcactgccacctccacctcctgggttgaaacattcttctgcctcagcctcccgagcagctgggattacaggtgggtaccaccatgcccggctaattttttggtatttttagtagagacagggtttcgccaagttgcccaggctggtcttgaactcctgtcctcaagtgatccaccctccttggcctcccaaaatattgggattacaagcatgagccactgcgcccaaccttcagcttacaattgttaagtactcagaaggcctttgaccagttaaatccacaatggctcctccagtcattactacgttagcaaaacatgtatcatgccctggcatctcactgagttctatattcagtgcctgtctcttcactgccacagcataagctccccgagaccacaggcttcacaggcacagcttttcagtgtccggcccgtagcccaagtccacgcccctccttacctccaaacacaggtttgctctcagttgtgctgcccacgttgaaggcaaacggtgtgctctggccggtggtgcccagggcgttctgacctaagccccctgtgaagggggtggaggtggctgtgctcccactctgtcctgctccaaagctgaaagctccggtggtggcgctggagcctggggtggccacgttgatcccaaagctcccactgccagcgggggctgccgaacccccaaacgtgaagggtgatggtgttgtgctgccaaacaccgagctgctgctcccgctgctggcggtctgggtggtggctccaaagccggagctggtggctgcaccgaaggagaagacagcagtggagccgccaaaggcgggctgtgagctggcgggagcgccgaaggcggaagccgtggctttcaatccaaacgccgagtgcgtggcaccgccaaaggtaggctggatgggcgtaggcacgtgcgcaggcacgatcttgatcgtggacgcaggtgcaggtgtgggtgcagtagccggggccggggctgcagagtttccaaaagtgaaagagctgccaaagctgggggtaagggctggcttggcggcccccggtggctgcccctcagcggccccaaatgcgggctgggggttggctcccggatatgatgggagcggggacttggcgcttgagccaaagggaatgttgaacgtgggggtgctcgtgttactgaacgtcagagtgggctggctgctggtggccggggcggaggtggcgagggtgctgccaaaaccactaaagtcggcagcgctgctgctggtggccgttggcacggcagtgggcagggactggctgaaggtggtgactgtggtggttgtgggcaaggcaggaggtttgccaaactggaatatggagcccatggccggggtgaagctggcagcagaggcctggggcgccccgaagaggaaaggctgtgaggcggcagtggcggtgctggtcgtggtactcacactgctgctgctcacactgtttatgccaaagccaaacgcaggcttcgaagcagagtctgtggatggactggcagaggtgatgggagccacagcagaggtggcgctggccaggccagtgaagagcggggcagttgtggtgggagcagtggcgggagtagttgtctgcttgaagaagggagcaggcaagggcacagatgcaggtggccccatgctgctaaagacaggctggaaggtcggggctgtggtgctggtggtcgtggggagggaggagctggagggcgctgtggctgtgactgaagggccaggcggtgtggggccttccttctcactcttgggtggagccgtgaaaatgggcttgaacatgggagatgctgaagatgcagcaggggcggcagggctggaaggtgaggtgttctgtgttccaaacaggaagctttgcttgggggcgggggacggggcagatgtggcttggggtttggtagccgtctctgcttgaagggttggaggtgccttggtgtcagtggctggtaccatggatggagcagggatcagccccagcaaagtggtcgggggtttggagtcaaaggaggggctggggagcagccctggcggccctgactgtgataaacccagcgggggtaggaggctgggtgtctttggaggtgagagggcctcagtggttgctgctccagcagattctggaagaagaatagaaaatgtgaaattggaataaacacttcaaagatgatggtattcagtatttcagcgtcctccccatgcctaccacagagcctgggatccaagagtcagtcaataaactcagctaagtctacactacaggcctgtacagtaaatcaaggaagtgttcattatttccacctcacagatcatcagacagaaggggataaaatggggcctaaatgggggcctaatgtgtagagactaagacagtccaattgtctgaactctgaagttcacgtatgaatctagatatactttatttgcctactaagctcacctgccaggcgctaagagcacacaactatgaatggggaagtctctgcccttgagcagggagggtgcgtacgaaccccaggttaccgtctgataaagaggtgtgcgcgcgcagtgccgtgaaggcctgggccgggaacaccagcagccctcaaagtgctggagggaaaggaagcagtgttgttctggaccagtagttctgacaggcaaggatatcctgaccacgccaccacattcacacttcagaggtgctgcaccgggaagatcattctcatctgacagatgaggaaggcgaggctcagggcagctaagccaggcttcagatcctgagcgtcgcagcaccccttctctaacacttcctgatgtgggctccggcgctgttaaacgtaggcccgctccggtgtgctgagccagggtgcgttcggcctgcagagcaatctccagcgactgacaggcacgacgcccttattccaacccaagccggggatgctgctcagaaggctggatccacggccccactccagctcacctgggcagggtggcaggctcgggggagtctgcatcttcttcaagctctctaacagtgggttggtgcttggggccaggagggaggtgggtggggaggcagttgcagcagcaggcagggtaaaggtaaatgaaggctgagtggtaggtggggtctcagtgacagagttcgaggcagcatctaagaaagaaagaaaggtgaagcagtcctggcttgtctgggacttctttccacatgcctgtcggagagcaggctctcagcacagctcatggaggaatgtctgccctaaattgcagtggtccctgctgtccagttcccgtgaagaccaacacggatatctcaggtgagaaagaccacaagaaaacatggaactctacttcggattttcccagagaaacccatttttccaaacaccaaaataaaaccaaagaaaacagacacctgaaacctctcgagagtgcaacgatctgtgctccttaccactcttgtcctccaaggcctggttgaaccactgtaatgaagccttcttctctaagtctaggtcctcggcagtgatcgaatagccaagctggggaggtggaggctaccaaagagaaaaagaagaagtcaggccaatcagaaaaaacgggaaggctgggcgtggtggctaacgccggtaatctcagcactctgggaggccaagccagctggatcacttgaggtcaggagtttgaggctggcctggccaacatggtgaaaccccatctctactaaaaatacaaaaaattagtcaggcgtggtagcaagcgcctgtaatcccagctacttgggaggctgaggcaggagaattgcttgaactcaggaggcagaggttacggttagccaaaatcgagccactgaactccagcctgggtgacagagggatgttgtctcaaaaaacaaaaacaaaaataagttagaaaaaaaaccagaagaaacttgtccttagcgttcctaagacttaggagagctaagccggggagggcaggagtagatggacaagaccataccaaggtcagctgttcccctcgccgagaaggcagcagctgaactttccgcttacgctgcccagagctgccaggtgtagactgagaattcgagttttgtttcttccttggggttgtatctgcagctaaagaaagaaatcaagactcgtttgcttccttccctcttccagaaatggatggttgtgtctacccacttcgcatttcacactgagttttcaatgatggtatctctgaaaagattcaatcttctatggtttggttgcttggatggtgtttgtaagattaaggcgcgcacacaaaccgcttactgtgcagtaattactgggatcacccacaggtgactcaaactgagcttacctctatccaatcgttagcccccatctgtagcctttctccctcatcagactataaacttctgaaggagaggaaatctctctctttgtatctaacatgccttagacatagcaatgctcaagaccttttttcaataggtattaatctctacatcctccacaaatacctccaccaccaacagcagcccctcatcctggctcagcaacctacccttttctccctgggactccttgtctgctgccaatggagttgaagaactggaatgatgacacagctcttcttctctgttgggaaaaaaggaacaatttagtctagaaagacttcttggctgaagtattaaataatttctcacaccctcctaactaccaagtggccaacatctaaaacaaccatcatttaagatctcagtatgccaggataaaaaaagtcaacaggaaattccaacagaatgaagggaggctgttcacagaggccatgaagacagtttttgtcttaaaacaagcacaaacaataatcttcaaaccttacttacaacctaccaagtccctgggagttctagacacagatgtgatccctgagggagtggcattccagccaactgcaagcacctaggggatcagctcgagtcaagaacctgaaggcgactgcccgctgacttgactctctctgctctccactctgcatggcctctgtgcttgcacccgatccctcatgctggagtgggaggcgacagccagaggccactggagtcagtatccaagactgtagggatgatagttgttcaggtgggtgctgcattgtccctctcagggacttagtttctttgattctccaagtcacagcagcacaaagcctaagagccaggttcgtttcccacctttcctcacccccttctgtccacgtagcaaatgaaaactgcaggagaatgccgaataccttattttctttgctggcctctccggtgtctgggagcgggatgaggctgggctagagaagggtgatgaactggggccatttctcttccagag

SEQ ID NO: 6642 - DNA, 35007 bp, Homo sapiens
taaacaggatcttgctctgttgcccagactggagtgaagtggcacgactatagcccactgcagccttgaactccgggctcaagtgatcctcccgcttcagcctctccagtagctgaaactacaggcacacgccaccacgcccagctaatttttatttttattttgtagagatggggtttcactatgttgccccggctggtctaaaattcctggcctcaagcgatcctcctgcctccgccttccgaagtgctgggattataggcttgagtcaccaccgtgcccagcatacatctgctttctgaatatttgagaggcggaaggcacaaggcgtgacaattgatgggatttgggatgtaaagagcaagagaggactcaagcacagtcgcctcgaggtttctagccccggctgctgtcaccaaccactctcaggaaggtaggcagaaggttacgcaggagaaaccgtaggggtagttctgaggccctggaaggggtagttctgaggcccccgggggtgcggagctgcaggtccagggaggagtggtgaggctggaggaaggtgaggctggaggaggaggttcaggaggctctgaggtaaagatggaggctggggccttgggagtcgaggagtttacccaagacgaagcatctgtgtggaagaaaagataaggctgggcgcagtggctcacgcctgtaaaccaagcgctttgggaggccgaggtgggcggatcatctgtggtcaggagttcgagaccagcctggtcaatatggtgaaaccccttctctactaaaaatacaaatattagccgggtacagtgcacctgtaatcccagctactcgggaggctgaggcacaaggatcacttgaacccgagaggcagaggttacagtgagccgagatcatgccactgcactccagcctgggtgacagagcaagactccatctccaaaagaaaaagaaactataaacatcattgaaagaaactaaagaagacctaaataaatggaaggaaatcatgttcatggattaaaagacttaatattattaaaatttcattacttcagaagtgatctacagattcaacacaatccctatcaaaatcccagctgtggctgggtgtggcggctcacttctgtaatcctggcacttcaagagccaaggtgggaggattgcttgagccgagaaatttgagaccagcctggcaacatgatctctacaaaaaatatagaaattagccaggcgttgtggtgccagcctgtagtcccagctacccaggaggctgaggaaggaggatcgcttgagcccaggagtttgaggctgcagtgggctatgatcacatcactgctctccggcctgcgcaacagtgcaaggtcatgtctcaaaaaaaaaatcccagctggctttttttttttttttgagatggagtcttgctctgttgcccatgctggagtgcagtggcggacgatcagcctcagggcaggccatctagaagaattaccaaaaacaccaacccatttgtctctctataaagtgctgacatttgtgctctgcaacgtacagctgagagagcacaaaacttgtctgactcagcacagtctaggaagtcaagcagctcaatcttgaacaggacagtggtgtttggggggatcaagggaggggagcccagcgttccataggcgtagttcggtttgaacagaaacctggccagctctcctctctgcatgctcagaaggcccagctccatgccccacaatgtaatatctgtaagaagggacaaagaaggtgggtgaagcttgctcagtatcctgcttaatgctatcagtttcttccccctctaagtcagcagtactctggcctccatgtctccctcacacagttccctcttcctgcaatgtcttcctcctgagcctgtgcccagcttctagtgatagaaattttattcaaacttctgggctcagttcaaatgccccctcttccaggaagccttccctgaacttcccagctagaattaatcatgccttcattaagcacacccacaacactgctttcacctcccaggcactcatccgattctaccaagtgagctgagtgcaggtcagtctcctctactacattgtgaggtccttaagggtggagatgttctaatcttctgagtacaacctctcttttcaccatgtattgtgggaagtaagcattcgtcgatttttacttaataaatgaacaaagaaacattcccagtggtgagttaagtcagagtgcaaagattataccttgcccattaagccatctcccaaatgcctaggtctcaaggggagagaacatggctgttttaccaaaacccagcctcagcaaagtcaattcaaagaacctgcgctctgagcagtcttcccagcctgaggcatggtgcctcatctcgctcctaaacaatcccttcttctccagctcctactctgaatttaccctctccaagtttcattagccgaggagttttcctaaagtaattagaatcgaagggtctgtccaagtgttccaggtatccatactatttcactagaatagaggaaagaatgtaaggaaaatggacccaaaacacccacgcctccataatatcgagtctctcatgatcacacagaaacaatgcgatcagatgagcttaagctgcccgacaccacgaggtacaggaataaatctctctgcattttaggagcctgcccttcggctcagaggttcaagagcttcatggaagcatcacgcaaaggggacataggggtccttagctttcctcttaaaaaaactaattcatggcagaagcagcggctcacgcttgtaatcccagctactggggaggctgaggtgggaggatcacttgggaccaggagtctgagaccagcctgggcaacatagaaagtgccccatctctacaaaaatattaaaaattagccgggcatggtggattgcgcctgtaaatctcttatttgggaggctgaggctggagaatcacttgagcccaggaagcagaggctgcagtgagctatgttcgcaccactgcactccagcctggggaactgagcgagaccccgtttcaaaaacaaaaatccacttcaaacaaagcatttccaaccccattaaatgctttttgaaaatgaggcctctctcttcccaacagagtgcgatgacatggatcctgcggacaaaccgccccagggcgtacctagcaccgaagcatcaggcgccactaggtctccagctccttctcggatgacgtccttcagcacgccccggtcccccgagatgtccagcatcctctgacttaaccgctcgtacagggactgatggagaatgaaagccaggcctcagagccgcagacccacccggccacccctcagcgtctacgcccccacgtctgggccctcacctggccgggggcgtcgtccccttccaggactccctggtttaacgcgcttccccccatgtcctagctgccctccctgtggcgtgagccttcggcctggtgcgccccgctgcccttcctggctgtgactctggtggggttccgaaggcccctttatgcccggcagacccctaccgacggcggcattccattctggggccacgaggaggcactcatcgtttcgttccaaccgccgccaacggccctggccctcgcgagctctggaactacagaggtcgcacggtgagttgccaggtgtggcccgtaatcggagcgcacaaaacatgatgggacacgtaacgggaccacacagggcacattgggcacttgcaggggcgcgaggtggcggcacgtaatgggagcgcgctgagcatgatggggcatgtgcgggagcgccaggcggggcatgtaaccagagcgtgcggggcatgatggggcacggacatggggggttaggtggggcacgtaattggagctcgcggggcaggatggggcatctaactggagcgacagagagcacgatggggcacttacaggggccggaggctgggtacgtaatgagagcgagcgggaaatgatggggcacctaacgagcacgcagagcatgatggggcacgggtgcgaggtggggcgcacagtgggagcgcgtggggcatgatgggacacatggcgaggccgtcagggcacaggggaagcacttttggaacacgtgagtgacagggctgccgcccttgaaggagccctcggagtggctgcgtggtggggcacgtggggcaggttcaggaaaaaggatgcagcatgtgattgcagggcaacctggtgaggacacgagagccacctgccaccagcagggttcagggctcccagctgtgggttacttccaccttctttcactttccctcttccattgtattctagagaatttaggcccagacaagacactgattgattgattgattgattgattgacagaggctcgctctgagcccaggctggagttcagtgatggatctcagctcactgcagccgccacctcctgggctcaagagatcctcctgcctcggcctcccaagtagctgggattacagacgtgcaccaccaggcccagctaatttattttttagtttttaatttgctggtaagatggtttgtagctttgttgcctaggctggtcttgaactcctggcttcaagcgatcctccagtcttgacctcccaaagtgctgggattataggcgtaggctacagccaactttcaatactgccccattgggggttacgtttccaacacatgaaattaggaggatacattcaaaccacagcagtatattatgaccataatattcattaactgtgtaacaggctgggcgcggtggctcacacctgtaatcccagcactttgggagaccagagtgggtagatcactcgaggtcaggagtttgagaccagcctggcccacatgatgaaaccgcctctctactaaaaatacaaaaaattagccggtgtggtggcaggcgcctgtaacctcagctacttgggaggctgaggcaggagaatcacttgaatccgggaggtggaggtggcagtgagcctgattgcaccactgcactccagcctgggcaacaagagcaaaactctgtctcaataaacaaacaaacaaacaaaacctgtataacagagtgtcattgaatttctaaacgttgaaagacttcacattaaaaaaaaactcacaatttaatattattgagtgaaagaaaccagacacaaaagggtacattctatatgatgctgtttatgtgacattcaaaaacaggccacatgacaacatggtaataaggacagtggctgtccttgttaggagttatgactggaaggaggcaggagggagctttctggaaacactgtacatcttgctcttgagagtgcacgtatatacatcaagtgtttatcaagctgtgtggttaagatttgcacacttgtatatgttatacctcgatttaaaaaatctaaataagtaaataaagataccttcaaatcttttaaaaaaaaaaaaaaaagaggccaggttcggcggctcacacctgtaatcccagcactttgggaggctgaggtaggaggattgcttgaggccaggagttcaaaaccagcccaggcaacaaagtgagacccctgtctctactaaagtaaataaaacaataaaataaaaaaaaaaattcgagagatcgaaccatcatctgccagtttgtattagaaaaaaagagagagagaaggaagactgcgtgcaataaggctcatgcctgtaatcccagcactttgggaggccaaggtgggaggattgcttgagcccagaagttgaagaccagcctgggcaacaaagcaagacccggtatctacaaaaaaaattttaaaaattagcttggcatggtggcacgtgcctgtagtcccagctactcaggcagctaaggtaggaggatggcttgagcctaggagttggaggctgcagtgagctgtgaccacgccactgcactccagcctgggcaacagagcaagacactgtcttcccctgccccccagccccccaccccccccaaaaaaggatataagagcaagagattgagattcagaaagaactgtttcccagcacctgtctgctcctgtcggggtcgtgaggtgtggacagtgtgcctagtccctctgtttctgcccctcctccacagtggccaaggccagcacttgaatgttatcagagcaggcccaacaaaggctgcctccccagtcctgtgatgtaacccagtttccacctgattctggtgaccttggggacacaggggtgttgctggggaaggggaggagagaaggggcagagaccaggcagtggtgcaggcgtccagctgcacttcccacttctgactctgtgcctgctgttccctgctgggaagaagaaaagccagtgatgctggcttgaggccatagtgggaggcccagtggatcctgagaagctaggtattccaatgtcgggctctcgctgggggcttctggtgcttcttctgtctcactgacaagctttcataggggagcaggtgggagatcagggtagaggccttgtaggttccaggctctctagaattacctgggagtgtcacctataagtgtagagttctgggtctcactggagaccccctgaagcagatcctttgaaggtgggcctctagaatctctattacacctatgctttcaacagtttcctgaaagtttgggaactgatctagaaggtggggagcttgcctaggttttgctgttcagttctaggtccggatgcatgctggggctggaccttgcattattagtgtcactgcaaatgaccctgcagatggcccctttcatgcttgtctccaaatttgagtaaaaaatgtagacacacacacacacacacacacacacacacacacacgtatcttcaagggaccagttttttcactgcagtcttttgttttacagctgtggaaactgaggcccaaggtcatgtgggttaggactgggatccaggactcaaagtgtttcttataaaattctggtgctccttagggttgagggtggtgggtgagtgctggacagggggaggggagtggacaggactgaggtcggatgcctgtgtttcagcccgggcagtgagtgtggatggcttggcaggtgagcctgctggagctggaggactggcttcagtgtcccatctgcctggaggtcttcaaggagtccctaatgctacagtgcggccactcctactgcaagggctgcctggtttccctgtcctaccacctggacaccaaggtgcgctgccccatgtgctggcaggtggtggacggcagcagctccttgcccaacgtctccctggcctgggtgatcgaagccctgaggctccctggggacccggagcccaaggtctgcgtgcaccaccggaacccgctcagccttttctgcgagaaggaccaggagctcatctgtggcctctgcggtctgctgggctcccaccaacaccacccggtcacgcccgtctccaccgtctgcagccgcatgaaggtggggagtgagggtgcaggcggggcggcggggcccgcggggactggatcctgtgctctctggcgctatcaactggcaccaaaacggatccagctatcctcgatttccctgcagccctgccctggcgcattcattccttagtgtttgagcggcagctaaacccaggtgctggggattgaagctacacgcacaggatgggagctccctggtgtcacgtgctcaccccttcgtgttttttgtttgcagttctggtttgtttctttttctttttttctttctctctctcccgcccccttcccttcctctctctctctctccccctccctcgcccgccccccctttctttttcttctttctttttggagacagcgtctcactctgttgcccaggctggagtgcagtggtgtgatcatggctcactgcagcctccaactcctaggctcaagcaatccacccacctcagcctcccgagcagctgggactacaggtgcacaccaccatgcccagctcattttttatattttgtagaaatggggtctggttatgttgcccaggctggtgttgaattccttggcctccaacgatcttcctgcctgggcctcccaaagtgctggaattataggcatgcaccactgccctacgccccttgtttgtgtctggacactcccctgtttgcactctctggtgcatgagagtggggacttcattttgtcccctggtgtatttcagtgcctggagccatgcctggcacattgtaaatgtccaaaatgctgaatcagtgaattcctgcctttataggccatcaccaaacctagcagatcattctttaagatgagtaataataatacctgactgggtgttatatatataaaacacctgttataaaacacgtgactgggtggcttatgcctataataacagcactttgggaggccgaggtgggtggatcacttgagtccaggagtttgagaccagcctgggcaacatagtgagaccctgcctctacaaaagtttcaaaattagcctggttggccaggcgcagtggccactcctgtaatcccagcataaagctggagggagcatgggtgggggcgagatagggccagcgaggtaagctgcggctggggcatggagaggccagtgtgacccgggaatggatttggagtttattcacaggatgagggagaaaggcgggggctggagtgttttaagccagtgatgacatgctcagatctctctggcagaggggagctttgagggtgaggcaaaaggacagtgagagatgaaggtgccaggacctaagttggtgggaactgggacaaaggcctggggcagaccaaagacaaatttcaaacagaaaaaaaccctgacaactgtgtgtggcaaggagggtgagggatggggaggttgactccagctctgtaattcccccttgcacagaggaagtgatcgcaggggaggatccggcgtgggcaggtggagcgggaggtgcctggggatgtgcagtcgggttgaggggtgtgcagaccaggacagcggtggggctcagggcaagaggtgtggagggtccttcctcttggtggtcactgaagtcccctttggtggagaagaccaacccaggagagtctacatagtgataagggaagacactgatgatgaccccaaggggtaccaggcttaaaatctggattgagagagagagagccctgaaaaaggaatagaaagaatcctcagagcaggaacaccggctgagtgtggcctcccggaaatcagagagacagactgaaggaggagatcacgtgtgtgaaatgtctctgaggactgaaaagtgttaaatgtagcagtaagaactgattatcttggcaagagcaggtttaggggagtatggaaggtggaagccaactgcaggtgaggaagccgagtttatgttttattagttgatgggaaggagggagggaacaggctgggagattgtctgtcctttgtagttaggatccagcagctcagcttgggtccctgttttagatttgggcttaatttttttttttttggtagagacagggtctcactattttgtccaggctggactcaaactcctggcctcaagtgatcctcccgtctcggcctcccaaagtgctgggattccaggcatgagccactgttcccggccagatttgggttttgatgatcccgaggctcttctctgttgcaacacagaatacaactaaattgcactcctttattgccctctttaaggtgttcccgttgcctcctgtttattgagatcttgagatgctcgattgatgggtgcattgatttgcataacttagttcttctcacggggaaggaatgagtcccgtctgtctgcctggggagggtgacattggaatgctgttcttaggcctctgtgagatgttctgatgcctcattctccagagcaaggactctgtccgtttatgccagcaagtgcttgattctttacccaactcccttcctgaaagccccttgcagctctctggtgcttgggcacgatccaagccaaaaattctgtacattgcatgggtataaaccgacgggggctctggtcaagtcatggagtagatggtggtccaggagtcctggttggcacccccaaggctaggtcagatttggggcccgggcagtccaggagaagtgcatttatgtcagcttggggaggtcgcaaatccgtgctgtgtccaagcccaccaggaatggattcaggtgtttataggtgtggggattcaccaggttaaacccaggcccgtgtgagcaccactggccctagaattagcctcacctggcgccggcctttttgtgatggctcctgattaaatacccactaattctggatctgctggtgaccacagagttcacctgatgggtcccctacaggcagcattcaatccaggaagtgccagcatcacatggtgacttctggtagctgtaacatttagtgactgtctccatgtcatgcacaggggtgacatcgagaccctcttatgcctgggaagttcctgctgtcaatgcagaatattctctttttttttttttttttttgagacggagtctcgctctgtcgcccaggctggagtgcagtgggcgatctcggctcactgcaagctccgcctcccaggttcacgccattctcctgcctcagcctcccgagtagctgggactacaggcgcccgctaccacgcccggctaattttttgtatttttagtagagacagggtttcactgtgttagccaggatggtttcgatctcctgacctcgtgatccgcccgcctcagcctcccagagtgttgggattacaggcgtgagccaccgcgcccggcccagaatattctttgaagaaaaaaaaaacattagagatgggatttcactgtgttgcccagtctggtctcaaattcctagcctcaagtgatcctcccatcttggcctcctaaagtgctgggattacaggcatgagccactgtgcccagcctagaatattcttttttttttttcttgagatggagtcttgctctgttgcccaggctggagtgctgtggcgcaatctcggctcactgcaacctcctcctcccaagttcatgccattctcctgactcagcctccggagtagctgggactacaggtgcccgccaccatgcccggctaattttttttgtatttttagtagagacagggtttcactgtgttagccaggatggtctcgatctcctgacctcgtgatcagccagcctcggcctcccaaagtgctgggattacaggcgtgagccaccgcgcccggcccttagaatattcttgaattatcttattttttatttttattttttgagacagagtctcactgtgacacccaggctggagtgcaatggcatgatctcagctcactgcaacatcaatctcccaggttcaagcgattctcgtgcctcagcctcccaagtagctgggactacaggtgtgtgccaccacacctggctaatttttgtattttcaatagaaatggggtttcaccatgttggccaggctagtctcaaactcctgacctcaagtgaagtcccacctcagtctcccaaagtgctggaattacaggcgtgagctactgcgcccagactattcttgaacaatttaacctgttttggactcaagggtacctgggtggctctggttcccgccctggtttccctgggagtgcttgtggccattgggatactcccaagaaggtgatccaaggagctgagaaggggagggatcagctgctcatggggccatggcctgttgcctccaggaggagctcgcagccctcttctctgagctgaagcaggagcagaagaaggtggatgagctcatcgccaaactggtgaaaaaccggacccgaatcgtcgtgagtgccccttccctctgcccctgcctgggaccggccaccttcactttcctgtagagctcagttctcattggtcctttacagaaaaccatgccttccatataaagccagaactcaaagcattccggggcggggtggggaaagcgcaaatcctctcaggggaattcaacccagttgtcgttaggactggctccaagttggcttttgccctctgtgtccttgagactgagataacccaggacttgagtctcgggggtaaacagctgaaagcatgggcgtgactcctccgcccctgtgccacctgtgtctgcttgaccttgccagcctgtcatggtgccctcccagtacctgggtgcgcaggcgtggagaggctggcagccctgggccctggctgatctcctgaactgagaggcacatggggctgggacgcatagtgccccggccctggaggtggctgtgaaacagaaacaggagccgagcaagatccagaagcacttggcctccctcatttaccctcctcacccttgcgcggcaggcggtatcagccctgcctggtggaggcggagctcagggttctgcagggagttctggctccctcacagcaaagcccgctcgcccagggccttcctgctttccttcagttgtggaactctgggatatgcacatttaatagctgaaataggcaaagtggggtgtggtggcgtgcatctgtaatcccagcaactcgggaggctgaggcgggaggattgcttgaggctgggaggtcaaggctacagtgagctatgatcgtgccactgcgctccagcctgggcaacagagtgagaccctgtctgttaaaaaaaaaattaaaaattaaaacaggccaaagcagagcctctccatttgaaatgggagctggggccaccctccccacggccaccgccagggctccccatgcatggggtgaactccctgcccggcgccaggccatgcagcctcccctgagactcaggtcccaggaccaacccggtcaggaaggccctggggacaccgaggccagccagacagagcctggcagctcggctgtgactctgcagtgagcagccctccctgtcccagaatgagtcggatgtcttcagctgggtgatccgccgcgagttccaggagctgcgccacccggtggacgaggagaaggcccgctgcctggaggggatagggggtcacacccgtggcctggtggcctccctggacatgcagctggagcaggcccagggaacccgggagcggctggcccaagccgagtgtgtgctggaacagttcggaaatgaggaccaccatgagttcatctgggtgagtggacagggaggcgtcccatccccatacccgccagggccttccccttcccaacagtgccctggcttcccaccttctagccttaacctccctctctcttgccttccagaagttccactccatggcctccaggtaataaccttggagagagctcagccagggtctggtggctgcgggcacgggcatctcagctccactggttcctccattcagcttaaccagcgcctcccaagcagctgcctatagctggctctataactgagcctggggaagatagaggaaagtcacgtccctgccttcaagggtctcgcagacaggtggggaggcagatggtgaactgtgggtacctagaacagcagaagttcactcaagctacagaaatactagaggagggtagctcatgcctgcaatcccagtactttgggaggccaaggcaggagtattgctggaggccgggagttcgagaccagcctggccaatgtagtaacacccccgtctctacaaaaaatacaaaaataaaaaaattagttgggcatggtggcatgcgcctatagtccctgctactcataaggctgaggtgggaggattgcttgagcccaaagtttgatgctgcagtgagtcatgatcatgctactgcatgatccagcctgggtgacagagcgagaccctgtctcagaaaacaaaacactagaggaggagcaggtgtctgggaggcctggcagaggggcacacgcctgatggctgagaagggcccaggacccgagtttgccaggcaagccgagggaacagtcctgtaaaagggggagtggcgtgcggactctggttatgagaagttcagggtggctggatgtaaggcaggatatcaggaggagtgggagctgggagaggtgggaaatggccagaagcaacatccaggagcaccaggcatcccttgcttaccgtcctcacccttgcgcagcaggcagtatcagccctgcctgaaacttgctctgcagattgtgggaagagagcggatccatgttctagacccaacaaacgaacacgtgcagttcccaagccttcctcactccctgtttatgggagactccttgtttctcacatttcttttagtcttagagacaatttggtcaggagacatgggtttaaatgaaggcacagagcctgggcacagcagcttacacctgtaatcccagcactttggaaggccaaggcagaaggatgacttgaggtcaggagatcaagaccagcctggccaacatggtgaaaccctgtctctatgaaaaatacaaaaattagctgggtgtggtggcacatacctgtaatcccagctactcgggaggctgaggcacaagaatctcttgaacctgggaggtggaggttgcagtgagctgagattgctccactgcactccagcctgggtgacagagcaagactccatctcaaaaaaaaaagaaaagaaaacaagaaaaaaaaaagtccgggcatggtggctcatgcctataatcccagcactttatgctcaagtctgctttttttttttttttttttgagatggagtctcgctctgtcacccaggctggagtgcagtggcacgatctcagctcactgcaacctacacctctcaggttcaagtgatctcctgcctcagcctcccgagtagctgggattacaggtgtgcaccccatgctcagctaatttttttatttttaatatagatggggttttgccatgttgaccatgctggtctcgaactcctgacctcaaatgattcgcctgcctcggcctcccaaagtgctgggattacaggcgtgagccaccgtgcccagccttgagtctttatttttagagacaggatcttgctctgtcacccaggctggagcgcagtggtgcaactgtagctcactgcagccttgacctcccaggctcaagtgatcctcctgcctcagcctcctgagtagctgggacgacaagtgtctgctaccatacccagctaatatttaaatttttagtagagatgggatcttgctatgttacccaggctggtctgggcctcaagcaatcctcccaccttggcctcccaaagtgttgggattataggtgtgagccactgtgcttagcctcccataaccctttgattcacgatactcataggctaagtgggtcctggaagctccggggtagccttctaaccaagatgctggctcgggccactggaagtcaaactgggtgcacagaccagtgagagggcatgagggagcctagcaggggtgaacagcaaccctcagcctccccacagccctgcctctcctcctgcctctcctcggtctcctttgaggattcagcctctcgtcctcaccacttatggtctgagggcctccaggctcctcttctggctgtctacccctccacacccatagctccagtcatcacttccacagggatgactcagaagttccctctccgggagacccgtcccttacaggccacatccagtagcgctccagccattcagcagctccgcctggacgtcaagggcatgtccaaaaccgcgctcatgatcttcctactcccccatccctgagatttatcctgtggctgtggtgtcctgtggctactgtaacaaatgaccacaaacttggtggcttcaaacaaatttaatctctcatggttctgaaggccagatgtccaagatcacgatgatggcaaggccgcgctccctctggagactgtcggggaaaacctgcccctttcctcttcagcttcaggtggtggctgccatgccctggtgtttcctggcctgtgaccgcatcattccaatctctgcctccatcttcacgtggccttttctgtatgtgccggtctaatcttcctctgcttctctcttattttttgttttttgagacagagtctcactctgttgcccaggctggagtgcagtggtgtgatctcggctcactgcaaccgccacttcccaggttcaagcaattcccttaacttagccccctgagtagctgggattacaggcgtgcactcagcaaatttttgtatttttagtagagacgtggtttcaccatgttggctaggctggttgtgaactcctgggctcaagggatccaccagcctcagtctcccaaagtgctgggattacaggtgtgacccactgcgcttctccctataagagaggccttcctctgcctctctcttatagggatacttgtgatgccatgcaggacctgcccagataatccaggataaccttctctccaaatccttcccctgatcactcctacagatctcttccatagaaggtgacatttccaggctctaggaattaggacctgctctctctgggtggccgttgttcactccaccaccccaggtttccccatcctaccaaaagacacagcagcattgtgtcaactgcccaaactgaaaacctatgagttattctcgacctgtcctttttcctgagcaagttctgtggatttaacttagcggtcacactgccaacttcaaccgaactccactgccaccaactcagtccaggccaccagttcttgtttaggtgactgccatgacccccattggtctctccctgcctcaactctgtcccctccatcctatatccccacactgtaaccagactgattatttatttatttatttattttttggggaaagaagcttgctctatcccccaggctggagtgcggtggcacaatctcagcttactgcaacctccgcctcccaggttcaaacgattctgcctcagcctcccaagtagctgagattacaggtgtctgccacaatgcctggctaatctttgtatttttagtagagacgggttttgtcatgttggccaggctggtctcaaactcctgacctcaagtgatccacctgccttggcctcccaaagtgctaggattacaggtgtgagccaccgcacctggccagactgatctttaaagaagtatacatgaacacagcactccatgacttaaaacccttaagaggactaccatttatctcaagatgaaagaacaaaatcctcgctgggcacagtggttcatgcctgtaatcactgctttgggaagccgaggtgggaagatcactttaggccaggagttcgagaccatccatgggcaacatggtgagaccgcatttctacaaaagataaaattagctgggtgtggtggtgcacgtctgtagtcccagctacttggagggtgaagtgggaggatcacttgagccctggagttcgaggctgcagtgagctatgacggtgccactgcactccagcctgggtgacggagtgggacctcatcaaaagcaaaaacaaaaccgttattgtggctttgaggcctggatcataactacatcatttaatttggccaaaccggcccatttcaggtacccaaataccccgtgtgctttcttgcttggctctgggactaatgtggttactggtgcagggtgagtggcaggtatcatgaaccacattgtggacctggagttgctaggaccttttctgccattacacagaaaaatcctccctgagaacacagccattggaggacacatggcagaggaagataagacaataaacagagacacataattatggccagcgtgggggctcacgcctgtaatcccaaaactttgggaggccgaggtgggcagatcacctaaggtcaggagttcgaggccagcctggccaacatggtgaaaccccgtctctactaaaaatacaaaaattagccgggcgtggtggcacgggcctgtagtcctagctactccagagggtgaggcaggagaattgcttgaacctgggaggcggaggttgcagtgagccaagatcgcgacactgcgcgacagagtgagtctttttgtctgaaaaaaaaaaaaatatatatatatatatacacacatacacacataatacacacacacatatatatatgaaatgaccaatacacatgtgaacatattcaacgcaataactgcggttaaacagcagtaaaatcccattatttatccatcagattgacaaagactgaagaactggagaagaagtggcgaaacgggctcgcagcgtcgcattccctaccccagcaggtgcgcccgcagcgtcgcactccctagcccggcaggtgcgcgatcacacacacaccctgcagggggacttcgaccggcacttccggtcccggaagggcatgcccttggaccccggaagtccgggcgggggcagagccgggtgcgctttgcgacagagccgtaaaggcgcgcgggaacatggggctgtacgctgcggtggcaggcgtgctggccggcgtggagagccgccagggctctatcaaggggctggtgtactccagcaacttccaggtagcgggcccgcgcgccacaagtaggggtggggggtgaggaacccggggtggggtgggacgggcccggatggggtcgggaggtggggcccggcgaggagggccgggggagcccccgacccagcttgtctccctcggccacacagaacgtgaagcagctgtacgcgctggtgtgcgaaacgcagcgctactccgccgtgctggatgccgtgatctccagcgccggcctcctcagtgcgaagaagctgcagccgcacctggccaagggtaggggcggggcggggaagtgaaccccgacggtcagcgctttgtcatctggtttcagccccgctgccgtgcacggcgggactggagcaagtcgctcacctgaaatgagtatgagcagaccttccctgggttacgaattgagatgggatgaaaatgctttaacttcgagtgttttgaaggattaaataaccgaagtacaaagtagtagtagcggagacagtaaggaagtcgggcgtggcggcgcgcacctgtggtcccagctactcggaaggctgaggggggaggatcacttgagcccaggagttcgaagctgcagtgagctgtgatgtggccactgcacttcagcctgggcgacagatctagaccccattctaaaaaaaaacaaaaaccccaaacccacacccacgaaagggtaatgttggcaagaagttgggtgcagaggtctactggtgaacatctgtggggaaagggtctaaggctgggaagcgagacgccaggttccgatcctgttgtgtagttaatttctggtgtggtcttgagtaaggtaccccacctttatctgtaaccatctagtcaggtgatctctttagccattccagtgcccgggctctattagagttagttctaaggcattcatacttcttgcttagggcgtttctgtctttgatccctcatccccaggtgctagtgtatgagttgttgggaaagggctttcgagggggtgggggccaatggaaggctctgttgggacggcaccaggcgaggtgttgagttggctcggctcaaggttcttcggggtgtgagctggcatgaggacctgttggaagtgggatccaggcctggtccaggtgagctggaaggagttgaggggcgggggaggtggggaactttgctcctgcctactcactgctcattgcgtcctacctagcctcccagctgcctcgatttgtgcgtgtgaacactctcaagacctgctccgtttatgtagttatttcaagagacaaggtttctcctatcagggtcgggcttccaggtgagagcttagagccctggctgtcctcatctagggaggtgtctggggtactgggaagagaagtggttggatagttgtgactttgctctctgggctttgttcctacctttccagcagtttctccatctccaaggtttgttttcctcgcatcccttaaacatcgaactcctaggagccccatcctacattcttccggagctctccgttttttctctaactttagctcctgcctcccacctggtgattctcaccgcccagtgtagacttcccttttgcattcttccctccttaggttcacatgaatgcaccacagatgccacagtcgctgcattcatctttcctctcagactttacacttagtacatccccagtttaatctaacagatgtcaccgttttccacccatttggtcaagccagaaaccgagtcatcctaggtgcttccttcccctccctccaatcatttactcctccaccttgagcatctttctcagctccactccttttttttttttttttttaggactgagtctcgctctgtcactctcaccgaggctggagtgcagtggcatgatcttggttcactacctccaaggttcatgcaatgctccttcctcagcctcctgcgtagctgggattagaggctcccaccaccatgtccagctaattattgtatttttagtagagatgaggtttcaccatgttgaccaggctggtctcaaactcctgacgtcaggtgatctgcccatcttggcctcccacagtgctgggattacaggcgtgagccacagtgcccggcctccactcctttctcttaattcccccggacactgcctaggttaagcactcatttcttattgggatgaccacaagaacttcccagactggtctctctgcttccagactgtctcactgcattttccttgaggttgactgtaggaagctctaaaggcagatctgatgcattactcctctgctaagcctttttttttttttttttttttttgagagagttttgctcttgtttcccaggctggatggagtgccctggcgcgatcttggctcaccgcaacctctgcctcctgggttcaagcgattctcctgcttcagccttctgagcagctgggattatgaaggggtggcctgcccctccacatctgtgggatatctcatcaggtgggacaagagactgagaaaagaaataagacacagagacaaagtatagagaaacaacagtgggcccaggagactggcacttagcataccaaggacctgcaccagcactggtctccgagttccctcagtttttattgattattattttcattatctcagcacaaggaatgcggtaggagagcagggtgataataaggagaaggtcagcaaaaaaacatgtgagcaaaggaatctgtgtcataattaagttcaaagggaggtactatgcctggatgtgcacgtaggccagatttatgtttccctccgcccaaacatctgtggagtaaagcataacaaggcagcattgctgccaacatgtctcgcctcccgccatagggtggtttttctcctatctcagaattgaacaaatgtacaatcgggttttataccgagacattcagttcccaggggcaggcaggagacagtgcccttcctctatctcaactgcaaggctttcctcttttactaatccacctcagcacagaccctttacgggtgtcgggctggggcacagcctctcatcccatgaggctatatttcagactatcacatggggagaaccttggacaatacctggctttccagggcagaggtccctgcagcttttcacagtacattgtgcctctggtttattgagactagagaacggcgaagacttttaccaagcatactgcttgtaaacgttttattaacaaggcatgtcctgcacagccctagatcctttaaaccttgattccatacaacacatgtttttgtgagctcaaatttggggcaaagtcacaaattaacagcatctcagccaaccaattgttcaaggtacaggtcaaaatggaatttcttatgtcttccctttctacacagacacagtaacagtctgatctctctttcttttccctacaggattgcaggcatgcagcaccatgcctggctaattttgtatttttagtagagacgggatttctccatgttggccaggctggtctcaaactcctgacctcaggtgatctgcccaccttggcctcccaaaatgctgggattacaggcatgaaccaccgcgcccggccatgctaagtcctttcttggctccattgtgctgtccctcctgcttcctctccaggtccatctgccacagtgctacgtgcaccagcgtgccagcaacagtggctggtctctgccccgtgcctcctccactgggctcacacctgtcttattttgtcctttggtggctctgagaagcagcctctgcccctctccctttcccttactctttgtaagatcctcttccttctgccctaccatgttgcttggacaccagggtggaatagcagagaacggctgcttgtgtttgaattccagctctgccacttcgatagatttctgaactgagacatgtgactccctaggcctatttctgcatgggtcggagagtgggcgggactgctttactgagttatagtgaatgtagttttaacctaagcgcctcacatgactaactcctcatccatcaagaatgagctcagctctcacttccccactcctcacccccctgtaaagtaacctttctccaaggttatgcttcaacaggaatagctaacatttattaaattgtggcacgtaagtatcttggatatattggctcattgaatcctcacacctactattttacagagatgccagtggggcttgagattgaatcacttgcccaggctcccactgctggtaaacagtagagggggctcctgacccataagtctggcttgacaacccattccctcaactgcggatcccggattcccttatcaccctgttgatttctccatagctgtggtaacatttgttgcatgaatggaccgttgaaatagggcctggcagggagaaattcaggaaatgatgaatgaatggttcttccctggcagcctcgatgacttacgagccctcaaggggaagcattttctcctggaccccttgatgccggagctgctggtgtttcccgcccagacagatctgcatgaacacccactgtaccgggccggacacctcattctgcaggacagggtaggcaagaggaatagaaaagggaagaatgtgtaggcacgggaagggcctagcctggggtctctgtttacccggcccctgtgttctgcctgccaggccagctgtctcccagccatgctgctggacccccgccaggctcccatgtcatggatgcctgtgccaccccaggcaataaagaccagtcacttggctgctcttctgaagaaccaagggtgagtgccacaggaggaggaggaggacatggggtttgattttgtgcctttcagtgggtaatgaaggctgaaaggatgactttcgcttaactctttcctgctgcaccaaagtagttcacggtatttgccccaagctaagctttccccactgcaggtgtgagatgtggatcccttagcccttggggcagagaccccaggccagttacctctgaccctgggccctttaaatataggctgtttcaatattgtgtgtcctggcttaacctgcatgttctggttgtctgtgtcagctgtgacaggcccttagctgctccatgcatgctcagctcacccctgctctgccctctgccctaggaagatctttgcctttgacctggatgccaggcggctggcatccatggccacgctgctggcctgggctggcgtctcctgctgtgagctggctgaggaggacttcctggcggtctcccccttagatccgcgctatcgtgaggtccactatgtcctgctggatccttcctgcagtggctcgggtgagatggtgagaaggcgtggctgagggactcagaggtccacagcagcttagacctggagtcatctgttttggtcttagttctgacactttaatgggcttgggaccctggagcaaaagttctcctctgtgaagcgaggatttcaggagcgaggatttcaggactgaggcagcctgtgaagctgtgtaaccgagacacgcttttccttaggtatgccgagcagacagctggaggagcccggggcagggacacctagcccggtgcgtctgcatgccctggcagggttccagcagcgagccctgtgccacgcgctcactttcccttccctgcagcggctcgtctactccatgtgctccctctgccaggaggagaatgaagacatggtacaagatgcgctgcagcagaacccgggcgccttcaggtacagggcgtgcgccagggtcgtggagggggggatggggtgaactgctctcttacccagcattggggctgtttctcttgcaggctagctcccgccctgcctgcccggccccaccgaggcctgagcacgttcccgggtgccgagcactgcctccgggcttcccccaagaccacgcttagcggtggcttcttcgttgctgtaattgaacgggtcgagatgccgacgtgagtgagtgggggcatgcttgggaggcgcaggatggtactggcacatctaacatctacatttctctagctcagcctcacaggccaaagcatcagcaccagaacgcacacccagcccagccccaaagagaaagaagagagcaaaaagctgcagccggtgcttgcacaccgccttgcacatagcagaggctccgggctcactccttcctggtgggaaaggaagatgcctgtcctctccgtggaagaccctgggccctcaccgcaggcagcagtttgcgttttgaaaggttattgggtcccttcctcgggctgtgttcttgctggtgagcaaaagtgttgcctgcagaaataaaatgcagaacgtactctacgatagatcacagttttttattcttaatgtcacaagcaggagaaaaatctcacattcatactaaaaattccaactagactcaacaggaatgaagtctctatttgtaatggaaagtcccagcctcccgctgccgtccagtgcgtgtactgtacacatccacactcattctcactcagggttcccggaccggctgtcctgcctgcggaactgaggtaaactagctcaggtactgacactaggagggtctaccttacataaggtacaggtagaagcttgattgctaggcccaggcccacccagaccctccaatcctaacaggtatttaggcttgaggttcactccctcctcagctgcacacgcagccaggtattaacgaggatcagagctgttctgaggggtgggaaggagcagccccgccaccactcactcaccctcagtcacatcggggagggggcaccagttacatttacatcacattatttataaaataagaattacatttcatataacatggccagaaggagctctagtcccccaggaaagctgccggggacagcatttgagcctcttctttgcacaggcataacttaactatacagctaattcctagttaatagcatttatacttaaccacctcaatgaaccaagcttgaaggaatttaaaaggcaatttagcttaaatacaaaaataaatttttgttaaaaaacgtttaaatatttttttcttttaatttagacacacgcattcatacttctcccaaagaggttgggcgtggcagcaaggcgcttgggcctggggtatgtggtttcagaaggacggaaggaaaggatgggctgcagagggccctgtttgggaaaaataggattttaaaaatatggttcattaatttaggttttctaacatctactttgggtgatgtagcctccagtgaggtcagttaagtgggacagaaacggcagagggaagaggtctttgcttcccctgggcccattctccctggctgccagcccttgaagtcagaacaccatgggaaaattcaggagtcggcacttgtagccgtcaagtggtgctactttccacattcaattagcgaggccccagaaaacttgaaacaggaagtccggcactaccaacatgccgccactcatacaactcaactcttcctccaaactcgattcaaagagcaatacacagagcgtcagacaaaggaacacaggacaaggcttgaaacatacaatcctggagaggcagacgagggcccaatggggccaaagggtagctgggcgaggaggcagctgaagcagcggtgggcatcctgcctgctccaagagcttctcccttcacccctggctctgccaggctaacagtcttgagccaccaagctctgaggggccaaactggcagagggttggagatgaaacattgattcaggcttggcaggaagaaaacggcaggagcagcacccactggggtctccaaggcaaagctagattcaagggcatttaaaaacgaaggaatcctgcaaggaactggtgagggacacagcagcaagaaatggggaaacagagtccccagaagggaccagaggaagagaaccacttctcacagctaagccaagcaagataaagctttacggatagcccatttcccaaatcccatcaggtgcacaccaccgatccaggcgggctggaccctgccccctccagcgacgacggtctcggggaaaggtggaaggggcgcctgcctaagggtgtgctaagcgggagtcagggcagcggacactatgtacaggtgtttccttagttctccagcctccccagtagaactgttcaagtagaggtcccgggctttggccctccgcatcctgcttccccttccctgaggcttgtgcttcctccagaagggaaagggccccagggctgccactgccccctggcggctgaagccagagatccggggtaggtttgctttacgcaactggaagggtccaaggctcttcctagcaggtgccaaggtccagatttagggaaggggtggggggaacagggacaggggacaaaggctactttttgcgggtgtgctgccttcgggcctgcagtcgctgtcgagcccctggggtcttggatcccgcaccaatggaaaatgaaagggccgccgatcctggaaagattcaacaagacctcatcagggcagctgctacctgagactctgactctgggtgcccaaatctctggaaggccaggccagtaataaaacacagggtgcctcaatagggctttccccgctgcatcagaaacactgtacgggagaagcctcctgaaatgcaaactcccagagagtctcagagcgaggcccaagaatccatttttacctggcttcccatgggaggcaaacttccaccccggacagctcctctctgatctctgccatccaactcccatccctgggttgtgctggactcctaacccgaaatgtctttcctgtgctgaacctgatcttcacggggcctcagaggaccaggaacctgccaccccgcccaacccctcctcagacagatgagcagggccacagggtggcttgctgcttaccgaaaggtgcaacaccaacaaagccttgggcgggtgctgaggatgccccaaaggagaggctgctgcctgatgtgcccactccaggcgcaggggtgttcagaccaaaggtgggggtggcggtgcctggaatgaagagaacagagagctggccagtgagcagagggcagaggcaagcgaggagccgggcaggagcctgtgctccgcagggcacttcccacgggaccctcagccccacttctgcttctggggcactcctccatcagcagctgagccagacaaccgagtcttcatgcctggtgccccagctcagcctgcttctcccacccgctaatggccacgccagggcagagaaaaagcccccctgccccgcagccacctcgtgggcctcctgaccatcgctgcagaggggagtactctggggcccccgcctcctagcgtacctgggttggctacctcctctgttcaggccttttaccccagccaccgtcccctcccctctgaagcctggtttgtccgtcccgcgtcttttgtgatgccccgtggtcccctcccttccccggccttgccctgactggctctggctgcctgcccgaggccctctctggcagcccctctgcagggatggctgctctcagggcttggcctccggcccggacaagaggaagctccctgtgctcccacgctgcttccacactgtttctcttccttccctaaataccgtaactcaagttcagatcactttaatctgccatgtcctcatgtcacctgtcaactgccaggtcactccctgattcacagaggacccttggctcactggcttccttcccatcaccactcacggtgacttcgccctgtgaggctgactgatggtcctctcagcccctcaaccctgccacccccatgacctcctctccccgacccctgccaccactcctgcagccacactgtcaccacaactgctccggctcccgaatctcctgtaggcaccacccctcctgcagctgacttcacccgctctccactcctgcaccccctgagctgcatcggggcactgacccgctgcccctcctgctgtgcttgctggggtctccatggccgggtggcaccagctgtccgctgaccttaggtctacacccacagtgtcgctgggaaacacatgccatgctaactggcctcactttaacttcacaatcacaattttccagcccacaaactgcctggaaactgatcacactttttaatatgatgttcctttcccccactgtccaaaatgactatttcaaaagacccctttttttatacactttatcctgaccctctctctcccagattttctctacttcacgaagcaaacagaagccatgggatctacattcatcttccacatgggaggaaccatcactgcatccttctgcctgattctgcaatggttttcctgaacacttaagacccaaacacccaaccctggccacaaacaatccttgcctcttggcctccttccacaccactgctttagctcctgccctcctgccatgcttgtctttgttctgctcttcaacataccaaacatgtttctgcctctgggcctttgcatgcgccatcctgggcctgaaagtcatgtccacttgtgctgtgcccacccccatattcagcttacggtttgttttttgagacagagtcttgctctgtcacccaggccggagtacagtggcatgatcttggctcactgcaacctccaactcctgggttcaaaccattcttgtgcctcagcctcctgagtagctgggattacaggtgggtaccaccacgcccggctaattttttggtatttttagtagagacagggtttcgccaagttgtccaggctagtcttgaactcctggcctcaagtgatgcaccctccttggcctcccaaaatattgggattacaagcgtgagccactgcgcccaaccttcagcttacaattgttaactactcagaaggcctttgaccagttaaatccacaatggctcctccagtcattactacgttagcaaaacatgtatcgttccctggcatctcactgagttctatattcagtgcctgtctcttcactgccacagcataagctccccgagaccacaggcttcgcaggcacagcttttcagtgtccggcccggtagcccaagtccacgcccctccttacctccaaacacaggtttgctctcagttgtgctgctcacgttgaaggcaaacggtgtgctctggccggtggtgcccagggcgttctgacctaagccccctgcgaagggggtggaggtggctgtgctcccactctgtcctgctccaaagctgaaagctccggtggtggtgctggagcctggggtggccacattgatcccaaagctcccactgccagcgggggctgccgaacccccaaacgtgaagggtgatggtgttgtgctgccaaacaccgagctgctgctcccgctgctggcggtctgggtggtggctccaaagccggagctggtggctgcaccgaagaagacagcagtggagccgccaaaggcgggctgtgagctggcgggagcgccgaaggccgaagccgtggctttcaacccaaacgccgagtgcgtggcaccgccaaagataggatggatgggcgtaggcacgtacgcaggcacgaccttgatcatggacggaggtgcaggtgtgggtgcagcagccggggctgcagagtttccaaaagtgaaagagctgccaaagctgggggcaagggccggcttggcggcccccggtggctgcccctcagcggccccaaatgcgggctgggggttggctcccggatatgatgggagcggggacttggcgcttgagccaaagggaatgttgaacgtgggggtgctcgtgttactgaacgtcagagtgggctggctgctggtggccggggcggaggtggcgagggtgctgccaaaaccactaaagtcggcagcgctgctgctggtggccgttggcacggcagtgtgcagggactggctgaaggtggtgactgtggtggttgtgggcaaggcaggaggtttgccaaactggaatatggagcccatggccggggtgaagctggcagcagaggcctggggcgccccgaagaggaaaggctgtgaggcggcagtggcggtgctggtcgtggtactcacactgctgctgctcacactgtttatgccaaagccaaacgcaggcttcgaagcagagtctgtggatggactggcagaggtgatgggagccacagcagaggtggcgctggccaggccagtgaagagcggggcagttgtggtgggagcagtggcgggagtagttgtctgcttgaagaagggagcaggcaagggcacagatgcaggtggccccatgctgctaaagacaggctggaaggtcggggctgtggtgctggtggtcgtggggagggaggagctggagggcgctgtggctgtgactgaagggccaggcggtgtggggccttccttctcactcttgggtggagccgtgaaaatgggcttgaacatgggaggtgctgaagatgcagcaggggcggcagggctggaaggtgaggtgttctgtgttccaaacaggaagctttgcttgggggcgggggacggggcagatgtggcttggggtttggtagccgtctctgcctgaagggttggaggtgccttggtgtcagtggctggtaccatggatggagcagggatcagccccagcaaagtggtcgggggtttggagtcaaaggaggggctggggagcagccctggcggccctgactgtgataaacccagcgggggtaggaggctgggtgtctttggaggtgagagggcctcagtggttgctgctccagcagattctggaagaagaatagaaaatgtgaaattggaataaacacttcaaagatgatggtattcagtatttcagtgtcctccccacgcctaccacagagcctgggatccaagagtcagtcaataaactcagctaagtctacactacaggcctgtacagtaaatcaaggaagtgttatttctacctcacagatcatcagacagaaggggataaaatggggcctaaatgggggcctaatgtgtagagactaagacagtccaattgtctgaactctgaagttcacgtatgaatctagatatactttatttgcctactaagctcacctgccaggcgctaagagcacacaactatgaatggggaagtctctgcccttgagcagggagggtgcgtacgaaccccaggttaccgtctgataaagaggtgtgcgcgcgcagtgccgtgaaggcctgggccgggaacaccagcagccctcgaagtgctggagggaaaggaagcagtgctgttctggaccagtggttctgacaggcaaggatatcctgaccacgccaccacattcacacttcagaggtgccgcacagggaagatcattctcatctgacagatgaggaaggcgaggctcagggcagctacgagccaggcttcagatcctgagcgtcgcagcaccccttctctaacacttcctgatgcgggctctggcgctgttaaacgtgggcccgctccggtgtgctgagccagggtgcgttcggcctgcagagcaatctccagcgactgacaggcacgacgcccttattccaactcaagccggggatgctgctcagaaggctggatccacggccccactccagctcacctgggcagggtggcaggctcgggggagtctgcatcttcttcaagctctctaacagtgggttggtgcttggggccaggagggaggtgggtggggaggcaggtgcagcagcaggcagggtaaaggtaaatgaaggctgagtgataggtggggtctcagtgacagagttcgaggcagcatctaagaaagaaagaaaggtgaagcagtcctggcttgtctgggacttctttccacatgcctgtcggagagcaggctctcagcacagctcatggaggaatgcctgccctcaattgcagtggtccctgctgtccagttcccgtgaagaccaacacggatatctcaggtgagaaagaccacaagaaaacatggaaccctacttgggattttcccagagaaacccattttttcaaacaccaaaataaaaccaaagaaaacagacacctgaaacctctccagtgtgcaacaatctgtgctccttaccgctcttgtcctccaaggcctggttgaaccactgtaatgaagccttcttctctaagtctaggtcctcggcagtgatcgaatagccaagctggggaggtggaggctaccaaagtgaaaaagaagaagtcaggccaatcagaaaaaacgggaaggctaggcatggtggctcacaccggtaatctcagcactttgggaggccaagccagctggatcacttgaggtcaggagtttgaggccggcctggccaacatggtgaaaccccatctctactaaaaacacaaaaaatcaaccaggcgtggtagcaagcacctgtaatcccagctacttgggaggctgaggcaggagaattgcttgaactcaggaggcagaggttacggttagccaaaatcgagccactgcactccagcctgggtgacagagggatgttgtctcaaaaaacaaaaacaaaaataaattagaaaaaaaatcagaagaaacttgtccttagcgttcctaatacttaggagagctaagccggggagggcaggagtagatggacaagaccataccaaggtcagctgttcccctcgccgagaaggcagcagctgaactttccgcttacgctgcccagagctgccaggtgtagactgagaattcgagttttgtttcttccttggggttgtatctgcagctaaagaaagaaatcaagactcgtttgcttccttccctcttccagaaatggatggttgtgtctacccacttcgcatttcacattgagttttcaatgggtatctctgaaaagattcaatcttctatggtttggttgcttggatggtgtttgcaagattaaggcgcgcacacaaaccgcttactgtgcagtaattactgggatcacccacaggtgactcaaactgagcttacctctatccaatcgttagtccctgtctgtagcctttctccctcatcagactataaacttctgaaggagaggaaatctctctctttgtatctaacatgccttagacatagcaatgctcaagaccttttttcaataggtattaatctctacatcctccacaaacacctccaccaccaacagcagcccctcctcctggctcagcaacctacccttttctccctgggactccctgtctgctgccaatggagttgaagaactggaatgatgacacagctcctcttctctgtcaggaaaaaaggaacaatttagtctagaaaggcttcttggctgaagtattaaataatttctcacaccctcctaactaccaagtggccaatgtctaaaacaaccatcatttaagatctcagtatgccaggataaaaaaagtcaacaggaaattccaacagaatgaagggaggctgttcacagaggccatgaagacagcttttgtcttaaaacaagcacaaaacaataatcttcaaaccttacttacaacctatcaagtccctgggagttctagacacagatgtgatccctgagggagtggcattccagccaactgcaagcacctagggggtcagctcgagtcaagaacctgaaggcgactgcccgctgacttgactctctctgctctccactctgcatggcctctgtgcttgcacccgatccctcatgctggagtgggaggcgacagccagaggccactggagtcagtatccaagactgtagggatgacagcacttcgggtgggtactgcattgtacctctcagggacttaagtttctttgattctccaagtcacagcagcacaaagcctaagagccaggttcgtttcccacctttcctcacccccgcctgtccacgcagcaaatgaaaactgcaggagaatgccaagtaccttattttctttgctggcctctccggtgtctgggagcgggaggaggctgggctagagaagggtgatgaactggggccatttctcttccagagctaaaaatcaagagggacatgactgagcctgctgataacttagcatctgaccctcaacacgacaaagtctcttttcaagtgactaaaaaaacattctttatggttaaatggttagtcatgcctgtaatcccagcatgctgggaggccaaggtgggaggatcgcttgagcccaggaatttgagcccagcctgggtaacatagcgagacccctgtctctacaaaaaaaactgaaaaatcagttgggtgtggtggtttgcatctgtggtcccaactactcaggatgctgcagtgagctgagattgccccactgcactccagcctg

SEQ ID NO: 6643 - DNA, 34488 bp, Homo sapiens
taatttttatttttattttgtagagatggggtttcactatgttgccccggctggtctaaaattcctggcctcaagcgatcctcctgcctccgccttccgaagtgctgggattataggcttgagtcaccaccgtgcccagcatacatctgctttctgaatatttgagaggcggaaggcacaaggcgtgacaattgatgggatttgggatgtaaagagcaagagaggactcaagcacagtcgcctcgaggtttctagccccggctgctgtcaccaaccactctcaggaaggtaggcagaaggttacgcaggagaaaccgtaggggtagttctgaggccctggaaggggtagttctgaggccccgggggtgcggagctgcaggtccagggaggagtggtgaggctggaggaaggtgaggctggaggaggaggttcaggaggctctgaggtaaagatggaggctggggccttgggagtcgaggagtttacccaagacgaagcatctgtgtggaagaaaagataaggctgggcgcagtggctcacgcctgtaaaccaagcgctttgggaggccgaggtgggcggatcatctgtggtcaggagttcgagaccagcctggtcaatatggtgaaaccccttctctactaaaaatacaaatattagccgggtacagtgcacctgtaatcccagctactcgggaggctgaggcacaaggatcacttgaacccgagaggcagaggttacagtgagccgagatcatgccactgcactccagcctgggtgacagagcaagactccatctccaaaagaaaaagaaactataaacatcattgaaagaaactaaagaagacctaaataaatggaaggaaatcatgttcatggattaaaagacttaatattattaaaatttcattacttcagaagtgatctacagattcaacacaatccctatcaaaatcccagctgtggctgggtgtggcggctcacttctgtaatcctggcacaaggtgggaggattgtttgagccgagaaatttgagaccagcctggcaacatgatctctacaaaaaatatagaaattagccaggcgttgtggtgccagcctgtagtcccagctacccaggaggctgaggaaggaggatcgcttgagtccaggagtttgaggctgcagtgggctatgatcacatcactgctctccggcctgggcaacagtgcaaggtcatgtctcaaaaaaaaaatcccagctggctttttttttttttttgagatggagtcttgctctgttgcccatgctggagtgcagtggcggacgatcagcctcagggcaggccatctagaagaattaccaaaaacaccaacccatttgtctctctataaagtgctgacatttgtgctctgcaacgtacagctgagagagcacaaaacttgtctgactcagcacagtctaggaagtcaagcagctcaatcttgaacaggacagtggtgtttggggggatcaagggaggggagcccagcgttccataggcgtagttcggtttgaacagaaacctggccagctctcctctctgcatgctcagaaggcccagctccatgccccacaatgtaatatctgtaagaagggacaaagaaggtgggtgaagcttgctcagtatcctgcttaatgctatcagtttcttccccctctaagtcagcagtactctggcctccatgtctccctcacacagttccctcttcctgcaatgtcttcctcctgagcctgtgcccagcttctagtgatagaaattttattcaaacttccgggctcagttcaaatgccccctcttccaggaagccttccctgaacttcccagctagaattaatcatgccttcattaagcacacccacaacactgctttcacctcccaggcactcatccgattctaccaagtgagctgagtgcaggtcagtctcctctactacattgtgaggtccttaagggtggagatgttctaatcttctgagtacaacctctcttttcaccatgtattgtgggaagtaagcattcgtcgatttttacttaataaatgaacaaagaaacattcccagtggtgagttaagtcagagtgcaaagattataccttgcccattaagccatctcccaaatgcctaggtctcaaggggagagaacatggctgttttaccaaaacccagcctcagcaaagtcaactcaaagaacctgcgctctgagcagtcttcccagcctgaggcatggtgcctcatctcgctcctaaacaatcccttcttctccagctcctactctgaatttaccctctccaagtttcattagccgaggagttttcctaaagtaattagaatcgaagggtctgtccaagtgttccaggtatccatagtatttcactagaatagaggaaagaatgtaaggaaaatggacccaaaacacccacgccaccataatatcgagtctctcatgatcacacagaaacaatgcgatcagatgagcttaagctgcccgacaccacgaggtacaggaataaatctctctgcattttaggagcctacccttcggctcagaggttcaagagcttcatggaagcatcacgcaaaggggacatagggttccttagctttcctcttaaaaaaactaattcatggcagaagcagcggctcacgcttgtaatcccagctactggggaggctgaggtgggaggatcacttgggaccaggagtctgagaccagcctgggcaacatagaaagtgccccatctctacaaaaatattaaaaattagccgggcatggtggattgcgcctgtaaatctcttatttgggaggctgaggctggagaatcacttgagcccaggaagcagaggctgcagtgagctatgttcgcaccactgcactccagcctggggaactgagcgagaccccgtttcaaaaacaaaaatccacttcaaacaaagcatttccaaccccattaaatgctttttgaaaatgaggcctctctcttcccaacagagtgcgatgacatggatcctgcggacaaaccgccccagggcgtacctagcaccgaagcatcaggcgccactaggtctccagctccttctcggatgacgtccttcagcacgccccggtcccccgagatgtccagcatcctctgacttaaccgctcgtacagggactgatggagaatgaaagccaggcctcagagccgcagacccacccggccacccctcagcgtctacgcccccgaaacgtctgggccctcacctggccgggggcgtcgtcccttccaggactccctggtttaacgcgcttccccccatgtcctagctgccctccctgtggcgtgacgtcggcctggtgcgccccgctgcccttcctggctgtgactctggtggggttccgaaggcccctttatgcccggcagacccctaccgacggcggcattacattctggggccacgaggaggcactcatcgtttcgttccaaccgccgccaacggccctggccctcgcgagctctggaactacagaggtcgcacggtgagttgccaggtgtggcccgtaatcggagcgcacaaaacatgatgggacacgtaacgggaccacacagggcacattgggcacttgcaggggcgcgaggtggcggcacgtaatgggagcgcgctgagcatgatggggcatgtgcgggagcgccaggcggggcatgtaaccagagcgtgcggggcatgatggggcacggacatggggggttaggtggggcacgtaattggagctcgcggggcaggatggggcatctaactggagcgacagagagcacgatggggcacttacaggggccggaggctgggtacgtaatgagagcgagcgggaaatgatggggcacctaacgagcacgcagagcatgatggggcacgggtgcgaggtggggcgcacagtgggagcgcgtggggcgtgatgggacacatggcgaggccgtcagggcacaggggaagcacttttggaacacgtgagtgacagggctgccgcccttgaaggagccctcggagtggctgcgtggtggggcacgtggggcaggttcaggaaaaaggatgcagcatgtgattgcagggcaacctggtgaggacacgagagccacctgccaccagcagggttcagggctcccagctgtgggttacttccaccttctttcactttccctcttccattgtattctagagaatttaggcccagacaagacactgattgattgattgattgattgattgacagaggctcgctctgagcccaggctggagttcagtgatggatctcagctcactgcagccgccacctcctgggctcaagagatcctcctgcctcggcctcccaagtagctgggattacagacgtgcaccaccaggcccagctaatttattttttagtttttaatttgctggtaagatggtttgtagctttgttgcctaggctggtcttgaactcctggcttcaagcgatcctccagtcttgacctcccaaagtgctgggattataggcgtaggctacagccaactttcaatactgccccattgggggttacgtttccaacacatgaaattaggaggatacattcaaaccacagcagtatattatgaccataatattcattaactgtgtaacaggctgggcgcggtggctcacacctgtaatcccagcactttgggagaccagagtgggtagatcactcgaggtcaggagtttgagaccagcctggcccacatgatgaaaccgcctctctactaaaaatacaaaaaattagccggtgtggtggcaggcgcctgtaacctcagctacttgggaggctgaggcaggagaatcacttgaatccgggaggtggaggtggcagtgagcctgattgcaccactgcactccagcctgggcaacaagagcaaaactctgtctcaataaacaaacaaacaaacaaaacctgtataacagagtgtcattgaatttctaaacgttgaaagacttcacattaaaaaaaaactcacaatttaatattattgagtgaaagaaaccagacacaaaagggtacattctatatgatgctgtttatgtgacattcaaaaacaggccacatgacaacatggtaataaggacagtggctgtccttgttaggagttatgactggaaggaggcaggagggagctttctggaaacactgtacatcttgctcttgagagtgcacgtatatacatcaagtgtttatcaagctgtgtggttaagatttgcacacttgtatatgttatacctcgatttaaaaaatctaaataagtaaataaagataccttcaaatcttttaaaaaaaaaaaaaaaagaggccaggttcggcggctcacacctgtaatcccagcactttgggaggctgaggtaggaggattgcttgaggccaggagttcaaaaccagcccaggcaacaaagtgagacccctgtctctactaaagtaaataaaacaataaaataaaaaaaaaaattcgagagatcgaaccatcatctgccagtttgtattagaaaaaaagagagagagaaggaagactgcgtgcaataaggctcatgcctgtaatcccagcactttgggaggccaaggtgggaggattgcttgagcccagaagttgaagaccagcctgggcaacaaagcaagacccggtatctacaaaaaaaattttaaaaattagcttggcatggtggcatgtgcctgtagtcccagctactcaggcagctaaggtaggaggatggcttgagcctaggagttggaggctgcagtgagctgtgaccacgccactgcactccagcctgggcaacagagcaagacactgtcttcccctgccccccagccccccacccccccaaaaaaaggatataagagcaagagattgagattcagaaagaactgtttcccagcacctgtctgctcctgtcggggtcgtgaggtgtggacagtgtgcctagtccctctgtttctgcccctcctccacagtggccaaggccagcacttgaatgttatcagagcaggcccaacaaaggctgcctccccagtcctgtgatgtaacccagtttccacctgattctggtgaccttggggacacaggggtgttgctggggaaggggaggagagaaggggcagagaccaggcagtggtgcaggcgtccagctgcacttcccacttctgactctgtgcctgctgttccctgctgggaagaagaaaagccagtgatgctggcttgaggccatagtgggaggcccagtggatcctgagaagctaggtattccaatgtcgggctctcgctgggggcttctggtgcttcttctgtctcactgacaagctttcataggggagcaggtgggagatcagggtagaggccttgtaggttccaggctctctagaattacctgggagtgtcacctataagtgtagagttctgggtctcactggagaccccctgaagcagatcctttgaaggtgggcctctagaatctctattacacctatgctttcaacagtttcctgaaagtttgggaactgatctagaaggtggggagcttgcctaggttttgctgttcagttctaggtccggatgcatgctggggctggaccttgcattattagtgtcactgcaaatgaccctgcagatggcccctttcatgcttgtctccaaatttgagtaaaaaatgtagacacacacacacacacacacacacacacacacacgtatcttcaagggaccagttttttcactgcagtcttttgttttacagctgtggaaactgaggcccaaggtcatgtgggttaggactgggatccaggactcaaagtgtttcttataaaattctggtgctccttagggttgagggtggtgggtgagtgctggacagggggaggggagtggacaggactgaggtcggatgcctgtgtttcagcccgggcagtgagtgtggatggcttggcaggtgagcctgctggagctggaggaccggcttcagtgtcccatcagcctggaggtcttcaaggagtccctaatgctacagtgcggccactcctactgcaagggctgcctggtttccctgtcctaccacctggacaccaaggtgcgctgccccatgtgctggcaggtggtggacggcagcagctccttgcccaacgtctccctggcctgggtgatcgaagccctgaggctccctggggacccggagcccaaggtctgcgtgcaccaccggaacccgctcagccttttctgcgagaaggaccaggagctcatctgtggcctctgcggtctgctgggctcccaccaacaccacccggtcacgcccgtctccaccgtctgcagccgcatgaaggtggggagtgagggtgcaggcggggcggcggggcccgcggggactggatcctgtgctctctggcgctatcaactggcaccaaaacggatccagctatcctcgatttccctgcagccctgccctggcgcattcattccttagtgtttgagcggcagctaaacccaggtgctggggattgaagctacacgcacaggatgggagctccctggtgtcacgtgctcaccccttcctgttttttgtttgcagttctggtttgtttctttttctttttttctttctctctctcccgcccccttcccttcctctctctctctctccccctccctcgcccgccccccctttctttttcttctttctttttggagacagcgtctcactctgttgcccaggctggagtgcagtggtgtgatcatggctcactgcagcctccaactcctaggctcaagcaatccacccacctcagcctcccgagcagctgggactacaggtgcacaccaccatgcccagctcattttttatattttgtagaaatggggtctggttatgttgcccaggctggtgttgaattccttggcctccaacgatcttcctgcctgggcctcccaaagtgctggaattataggcatgcaccactgccctacgccccttgtttgtgtctggacactcccctgtttgcactctctggtgcatgagagtggggacttcattttgtcccctggtgtatttcagtgcctggagccatgcctggcacattgtaaatgtccaaaatgctgaatcagtgaattcctgcctttataggccatcaccaaacctagcagatcattctttaagatgagtaataataatacctgactgggtgttatatatataaaacacctgttataaaacacgtgactgggtggcttatgcctataataacagcactttgggaggccgaggtgggtggatcacttgagtccaggagtttgagaccagcctgggcaacatagtgagaccctgcctctacaaaagtttcaaaattagcctggttggccaggcgcagtggccactcctgtaatcccagcataaagctggagggagcatgggtgggggcgagatagggccagcgaggtaagctgcggctggggcatggagaggccagtgtgacccgggaatggatttggagtttattcacaggatgagggagaaaggcgggggctggagtgttttaagccagtgatgacatgctcagatctctctggcagaggggagctttgagggtgaggcaaaaggacagtgagagatgaaggtgccaggacctaagttggtgggaactgggacaaaggcctggggcagaccaaagacaaatttcaaacagaaaaaaaccctgacaactgtgtgtggcaaggagggtgagggatggggaggttgactccagctctgtaattcccccttgcacagaggaagtgatcgcaggggaggatccggcgtgggcaggtggagcgggaggtgcctggggatgtgcagtcgggttgaggggtgtgcagaccaggacagcggtggggctcagggcaagaggtgtggagggtccttcctcttggtggtcactgaagtcccctttggtggagaagaccaacccaggagagtctacatagtgataagggaagacactgatgatgaccccaaggggtaccaggcttaaaatctggattgagagagagagagccctgaaaaaggaatagaaagaatcctcagagcaggaacaccggctgagtgtggcctcccggaaatcagagagacagactgaaggaggagatcacgtgtgtgaaatgtctctgaggactgaaaagtgttaaatgtagcagtaagaactgattatcttggcaagagcaggtttaggggagtatggaaggtggaagccaactgcaggtgaggaagccgagtttatgttttattagttgatgggaaggagggagggaacaggctgggagattgtctgtcctttgtagttacgatccagcagctcagcttgggtccctgttttagatttgggcttaatttttttttttttggtagagacagggtctcactattttgtccaggctggactcaaactcctggcctcaagtgatcctcccgtctcggcctcccaaagtgctgggattccaggcatgagccactgttcccggccagatttgggttttgatgatcctgaggctcttctctgttgcaacacagaatacaactaaattgcactcctttattgccctctttaaggtgttcccgttgcctcctgtttattgagatcttgagatgctcgattgatgggtgcattgatttgcataacttagttcttctcacggggaaggaatgagtcccgtctgtctgcctggggagggtgacattggaatgctgttcttaggcctctgtgagatgttctgatgcctcattctccagagcaaggactctgtccgtttatgccagcaagtgcttgattctttacccaactcccttcctgaaagccccttgcagctctctggtgcttgggcacgatccaagccaaaaattctgtacattgcatgggtataaaccgacgggggctctggtcaagtcatggagtagatggtggtccaggagtcctggttggcacccccaaggctaggtcagatttggggcccgggcagtccaggagaagtgcatttatgtcagcttggggaggtcgcaaatccgtgctgtgtccaagcccaccaggaatggattcaggtgtttataggtgtggggattcaccaggttaaacccaggcccgtgtgagcaccactggccctagaattagcctcacctggcgccggcctttttgtgatggctcctgattaaatacccactaattctggatctgctggtgaccacagagttcacctgatgggtcccctacaggcagcattcaatccaggaagtgccagcatcacatggtgacttctggtagctgtaacatttagtgactgtctccatgtcatgcacaggggtgacattgagaccctcttatgcctgggaagttcctgctgtcaatgcagaatattctctttttttttttttttttgagacggagtctcgctctgtcgcccaggctggagtgcagtgggcgatctcggctcactgcaagctccgcctcccaggttcacgccattctcctgcctcagcctcccgagtagctgggactacaggcgcccgctaccacgcccggctaattttttgtatttttagtagagacagggtttcactgtgttagccaggatggtttcgatctcctgacctcgtgatccgcccgcctcagcctcccagagtgttgggattacaggcgtgagccaccgcgcccggcccagaatattctttgaagaaaaaaaaaacattagagatgggatttcactgtgttgcccagtctggtctcaaattcctagcctcaagtgatcctcccatcttggcctcctaaagtgctgggattacaggcatgagccactgtgcccagcctagaatattcttttttttttttcttgagatggagtcttgctctgttgcccaggctggagtgctgtggcgcaatctcggctcactgcaacctcctcctcccaagttcatgccattctcctgactcagcctccggagtagctgggactacaggtgcccgccaccatgcccggctaattttttttgtatttttagtagagacagggtttcactgtgttagccaggatggtctcgatctcctgacctcgtgatcagccagcctcggcctcccaaagtgctgggattacaggcgtgagccaccgcgcccggcccttagaatattcttgaattatcttattttttatttttattttttgagacagagtctcactgtgacacccaggctggagtgcaatggcatgatctcagctcactgcaacatcaatctcccaggttcaagcgattctcgtgcctcagcctcccaagtagctgggactacaggtgtgtgccaccacacctggctaatttttgtattttcaatagaaatggggtttcaccatgttggccaggctagtctcaaactcctgacctcaagtgaagtcccacctcagtctcccaaagtgctggaattacaggcgtgagctactgcgcccagactattcttgaacaatttaacctgttttggactcaagggtacctgggtggctctggttcccgccctggtttccctgggagtgcttgtggccattgggatactcccaagaaggtgatccaaggagctgagaaggggagggatcagctgctcatggggccatggcctgttgcctccaggaggagctcgcagccctcttctctgagctgaagcaggagcagaagaaggtggatgagctcatcgccaaactggtgaaaaaccggacccgaatcgtcgtgagtgccccttccctctgcccctgcctgggaccggccaccttcactttcctgtagagctcagttctcattggtcctttacagaaaaccatgccttccatataaagccagaactcaaagcattccggggcggggtggggaaagcgcaaatcctctcaggggaattcaacccagttgtcgttaggactggctccaagttggcttttgccctctgtgtccttgagactgagataacccaggacttgagtctcgggggtaaacagctgaaagcatgggcgtgactcctccgcccctgtgccacctgtgtctgcttgaccttgccagcctgtcatggtgccctcccagtacctgggtgcgcaggcgtggagaggctggcagccctgggccctggctgatctcctgaactgagaggcacatggggctgggacgcatagtgccccggccctggaggtggctgtgaaacagaaacaggagccgagcaagatccagaagcacttggcctccctcatttaccctcctcacccttgcgcggcaggcggtatcagccctgcctggtggaggcggagctcagggttctgcagggagttctggctccctcacagcaaagcccgctcgcccagggccttcctgctttccttcagttgtggaactctgggatatgcacatttaatagctgaaataggcaaagtggggtgtggtggcgtgcatctgtaatcccagcaactcgggaggctgaggcgggaggattgcttgaggctgggaggtcaaggctacagtgagctatgatcgtgccactgcgctccagcctgggcaacagagtgagaccctgtctgttaaaaaaaaaattaaaaattaaaacaggccaaagcagagcctctccatttgaaatgggagctggggccaccctccccacggccaccgccagggctccccatgcatggggtgaactccctgcccggcgccaggccatgcagcctcccctgagactcaggtcccaggaccaacccggtcaggaaggccctggggacaccgaggccagccagacagagcctggcagctcggctgtgactctgcagtgagcagccctccctgtcccagaatgagtcggatgtcttcagctgggtgatccgccgcgagttccaggagctgcgccacccggtggacgaggagaaggcccgctgcctggaggggatagggggtcacacccgtggcctggtggcctccctggacatgcagctggagcaggcccagggaacccgggagcggctggcccaagccgagtgtgtgctggaacagttcggcaatgaggaccaccatgagttcatctgggtgagtggacagggaggcgtcccatccccatacccgccagggccttccccttcccaacagtgccctggcttcccaccttctagccttaacctccctctctcttgccttccagaagttccactccatggcctccaggtaataaccttggagagagctcagccagggtctggtggctgcgggcacgggcatctcagctccactggttcctccattcagcttaaccagcgcctcccaagcagctgcctatagctggctctataactgagcctggggaagatagaggaaagtcacgtccctgccttcaagggtctcgcagacaggtggggaggcagatggtgaactgtgggtacctagaacagcagaagttcactcaagctacagaaatactagaggagggtagctcatgcctgcaatcccagtactttgggaggccaaggcaggagtattgctggaggccgggagttcgagaccagcctggccaatgtagtaacacccccgtctctacaaaaaatacaaaaataaaaaaattagttgggcatggtggcatgcgcctatagtccctgctactcataaggctgaggtgggaggattgcttgagcccaaagtttgatgctgcagtgagtcatgatcatgctactgcatgatccagcctgggtgacagagcgagaccctgtctcagaaaacaaaacactagaggaggagcaggtgtctgggaggcctggcagaggggcacacgcctgatggctgagaagggcccaggacccgagtttgccaggcaagccgagggaacagtcctgtaaaagggggagtggcgtgcggactctggttatgagaagttcagggtggctggatgtaaggcaggatatcaggaggagtgggagctgggagaggtgggaaatggccagaagcaacatccaggagcaccaggcatcccttgcttaccgtcctcacccttgcgcagcaggcagtatcagccctgcctgaaacttgctctgcagattgtgggaagagagcggatccatgttctagacccaacaaacgaacacgtgcagttcccaagccttcctcactccctgtttatgggagactccttgtttctcacatttcttttagtcttagagacaatttggtcaggagacatgggtttaaatgaaggcacagagcctgggcacagcagcttacacctgtaatcccagcactttggaaggccaaggcagaaggatgacttgaggtcaggagatcaagaccagcctggccaacatggtgaaaccctgtctctatgaaaaatacaaaaattagctgggtgtggtggcacatacctgtaatcccagctactcgggaggctgaggcacgagaatctcttgaacctgggaggtggaggttgcagtgagctgagattgctccactgcactccagcctgggtgacagagcaagactccatctcaaaaaaaaaagaaaagaaaacaagaaaaaaaaaagtccgggcatggtggctcatgcctataatcccagcactttatgctcaagtctgctttttttttttttttttttgagatggagtctcgctctgtcacccaggctggagtgcagtggacgatctcagctcactgcaacctacacctctcaggttcaagtgatctcctgcctcagcctcccgagtagctgggattacaggtgtgcaccccatgctcagctaatttttttatttttaatatagatggggttttgccatgttgaccatgctggtctcgaactcctgacctcaaatgattcgcctgcctcggcctcccaaagtgctgggattacaggcgtgagccaccgtgcccagccttgagtctttatttttagagacaggatcttgctctgtcacccaggctggagcgcagtggtgcaactgtagctcactgcagccttgacctcccaggctcaagtgatcctcctgcctcagcctcctgagtagctgggacgacaagtgtctgctaccatacccagctaatatttaaatttttagtagagatgggatcttgctatgttacccaggctggtctgggcctcaagcaatcctcccaccttggcctcccaaagtgttgggattataggtgtgagccactgtgcttagcctcccataaccctttgattcacgatactcataggctaagtgggtcctggaagctccggggtagccttctaaccaagatgctggctctggccactggaagtcaaactgggtgcacagaccagtgagagggcatgagggagcctagcaggggtgaacagcaaccctcagcctccccacagccctgcctctcctcctgcctctcctcggtctcctttgaggattcagcctctcgtcctcaccacttatggtctgagggcctccaggctcctcttctggctgtctacccctccacacccatagctccagtcatcacttccacagggatgactcagaagttccctctccgggagacccgtcccttacaggccacatccagtagcgctccagccattcagcagctccgcctggacgtcaagggcatgtccaaaaccgcgctcatgatcttcctactcccccatccctgagatttatcctgtggctgtggtgtcctgtggctactgtaacaaatgaccacaaacttggtggcttcaaacaaatttaatctctcatggttctgaaggccagatgtccaagatcacgatgacggcaaggccgcgctccctctggagactgtcggggaaaacctgcccctttcctcttcagcttcaggtggtggctgccatgccctggtgtttcctggcctgtgaccgcatcattccaatctctgcctccatcttcacgtggccttttctgtatgtgccggtctaatcttcctctgcttctctcttattttttgttttttgagacagagtctcactctgttgcccaggctggagtgcagtggtgtgatctcggctcactgcaaccgccacttcccaggttcaagcaattcccttaacttagccccctgagtagctgggattacaggcgtgcactcagcaaatttttgtatttttagtagagacgtggtttcaccatgttggctaggctggttgtgaactcctgggctcaagggatccaccagcctcagtctcccaaagtgctgggattacaggtgtgacccactgcgcttctccctataagagaggccttcctctgcctctctcttatagggatacttgtgatgccatgcaggacctgcccagataatccaggataaccttctctccaaatccttcccctgatcactcctacagatctcttccatagaaggtgacatttccaggctctaggaattaggacctgctctctctgggtggccgttgttcactccaccaccccaggtttccccatcctaccaaaagacacagcagcattgtgtcaactgcccaaactgaaaacctatgagttattctcgacctgacctttttcctgagcaagttctgtggatttaacttagcggtcacactgccaacttcaaccgaactccactgccaccaactcagtccaggccaccagttcttgtttaggtgactgccatgacccccattggtctctccctgcctcaactctgtcccctccatcctatatccccacactgtaaccagactgattatttatttatttatttattttttggggaaagaagcttgctctatcccccaggctggagtgcggtggcacaatctcagcttactgcaacctccgcctcccaggttcaaacgattctgcctcagcctcccaagtagctgagattacaggtgtctgccacaatgcctggctaatctttgtatttttagtagagacgggttttgtcatgttggccaggctggtctcaaactcctgacctcaagtgatccacctgccttggcctcccaaagtgctaggattacaggtgtgagccaccgcacctggccagactgatctttaaagaagtatacatgaacacagcactccatgacttaaaacccttaagaggactaccatttatctcaagataaaagaacaaaatcctcgctgggcacagtggttcatgcctgtaatcactgctttgggaagccgaggtgggaagatcactttaggccaggagttcgagaccatccatgggcaacatggtgagaccgcatttctacaaaagataaaattagctgggtgtggtggtgcacgtctgtagtcccagctacttggagggtgaagtgggaggatcacttgagccctggagttcgaggctgcagtgagctatgacggtgccactgcactccagcctgggtgacggagtgggacctcatcaaaagcaaaaacaaaaccgttattgtggctttgaggcctggatcataactacatcatttaatttggccaaaccggcccatttcaggtacccaaataccccacgtgctttcttgcttggctctgggactaatgtggttactggtgcagggtgagtggcaggtatcatgaaccacattgtggacctggagttgctaggaccttttctgccattacacagaaaaatcctccctgagaacacagccattggaggacacatggcagaggaagataagacaataaacagagacacataattatggccagcgtgggggctcacgcctgtaatcccaaaactttgggaggccgaggtgggcagatcacctaaggtcaggagttcgaggccagcctggccaacatggtgaaaccccgtctctactaaaaatacaaaaattagccgggcgtggtggcacgggcctgtagtcctagctactccagagggtgaggcaggagaattgcttgaacctgggaggcggaggttgcagtgagccaagatcgcgacactgcgcgacagagtgagtctttttgtctgaaaaaaaaaatatatatatatatatatacacacacatacacacatatatatatacacacacatatatatatgaaatgaccaatacacatgtgaacatattcaacgcaataactgcggttaaacagcagtaaaatcccattatttatccatcagattgacaaagactgaagaactggagaagaagtggcgaaacgggctcgcagcgtcgcattccctaccccagcaggtgcgcccgcagcgtcgcactccctagcccggcaggtgcgcgatcacacacacaccctgcagggggacttcgaccggcacttccggtcccggaagggcatgcccttggaccccggaagtccgggcgggggcagagccgggtgcgctttgcgacagagccgtaaaggcgcgcgggaacatggggctgtacgctgcggtggcaggcgtgctggccggcgtggagagccgccagggctctatcaaggggctggtgtactccagcaacttccaggtagcgggcccgggcgccacaagtaggggtggggggtgaggaacccggggtggggtgggacgggcccggatggggtcgggaggtggggcccggcgaggagggccgggggagcccccgacccagcttgtctccctcggccacacagaacgtgaagcagctgtacgcgctggtgtgcgaaacgcagcgctactccgccgtgctggatgccgtgatctccagcgccggcctcctcagtgcgaagaagctgcagccgcacctggccaagggtaggggcggggcggggaagtgaaccccgacggtcagcgctttgtcatctggtttcagccccgctgccgtgcacggcgggactggagcaagtcgctcacctgaaatgagtatgagcagaccttccctgggttacgaattgagatgggatgaaaatgctttaacttcgagtgttttgaaggattaaataaccgaagtacaaagtagtagtagcggagacagtaaggaagtcgggcgtggcggcgcgcacctgtggtcccagctactcggaaggctgaggggggaggatcacttgagcccaggagttcgaagctgcagtgagctgtgatgtggccactgcacttcagcctgggcgacagatctagaccccattctaaaaaaaaacaaaaaccccaaacccacacccacgaaagggtaatgttggcaagaagttgggtgcagaggtctactggtgaacatctgtggggaaagggtctaaggctgggaagcgagacgccaggttccgatcctgttgtgtagttaatttctggtgtggtcttgagtaaggtaccccacctttatctgtaaccatctagtcaggtgatctctttagccattccagtgcccgggctctattagagttagttctaaggcattcatacttcttgcttagggcgtttctgtctttgatccctcatccccaggtgctagtgtatgagttgttgggaaagggctttcgagggggtgggggccaatggaaggctctgttgggacggcaccaggcgaggtgttgagttggctcggctcaaggttcttcggggtgtgagctggcatgaggacctgttggaagtgggatccaggcctggtccaggtgagctggaaggagttgaggggcgggggaggtggggaactttgctcctgcctactcactgctcattgcgtcctacctagcctcccagctgcctcgatttgtgcgtgtgaacactctcaagacctgctccgtttatgtagttatttcaagagacaaggtttctcctatcagggtcgggcttccaggtgagagcttagagccctggctgtcctcatctagggaggtgtctggggtactgggaagagaagtggttggatagttgtgactttgctctctgggctttgttcctacctttccagcagtttctccatctccaaggtttgttttcctcgcatcccttaaacatcgaactcctaggagccccatcctacattcttccggagctctccgttttttctctaactttagctcctgcctcccacctggtgattctcaccgcccagtgtagacttcccttttgcattcttccctccttaggttcacatgaatgcaccacagatgccacagtcgctgcattcatctttcctctcagactttacacttagtacatccccagtttaatctaacagatgtcaccgttttccacccatttggtcaagccagaaaccgagtcatcctaggtgcttccttcccctccctccaatcatttactcctccaccttgagcatctttctcagctccactcctttttttttttttttttttaggactgagtcttgctctgtcactctcaccgaggctggagtgcagtggcatgatcttggttcactacctccaaggttcatgcaatgctccttcctcagcctcctgcgtagctgggattagaggctcccaccaccatgtccagctaattattgtatttttagtagagatgaggtttcaccatgttgaccaggctggtctcaaactcctgacgtcaggtgatctgcccatcttggcctcccacagtgctgggattacaggcgtgagccacagtgcccggcctccactcctttctcttaattcccccggacactgcctaggttaagcactcatttcttattgggatgaccacaagaacttcccagactggtctctctgcttccagactgtctcactgcattttccttgaggttgactgtaggaagctctaaaggcagatctgatgcattactcctctgctaagcctttttttttttttttttttttgagagagttttgctcttgtttcccaggctggatggagtgccctggcgcgatctcggctcaccgcaacctctgcctcctgggttcaagcgattctcctgcttcagccttctgagtagctgggattatgaaggggtggcctgcccctccacatctgtgggatatctcatcaggtgggacaagagactgagaaaagaaataagacacagagacaaagtatagagaaacaacagtgggcccaggagactggcacttagcataccaaggacctgcaccagcactggtctccgagttccctcagtttttattgattattattttcattatctcagcacaaggaatgcggtaggagagcagggtgataataaggagaaggtcagcaaaaaaacatgtgagcaaaggaatctatgtcataattaagttcaaagggaggtactatgcctggatgtgcacgtaggccagatttatgtttccctccgcccaaacatctgtggagtaaagcataacaaggcagcattgctgccaacatgtctcgcctcccgccatagggtggtttttctcctatctcagaattgaacaaatgtacaatcgggttttataccgagacattcagttcccaggggcaggcaggagacagtgcccttcctctatctcaactgcaaggctttcctcttttactaatccacctcagcacagaccctttacgggtgtcgggctggggcacagcctctcatcccatgaggctatatttcagactatcacatggggagaaccttggacaatacctggctttccagggcagaggtccctgcagcttttcacagtacattgtgcctctggtttattgagactagagaatggcgaagacttttaccaagcatactgcttgtaaacgttttattaacaaggcatgtcctgcacagccctagatcctttaaaccttgattccatacaacacatgtttttgtgagctcaaatttggggcaaagtcacaaattaacagcatctcagccaaccaattgttcaaggtacaggtcaaaatggaatttcttatgtcttccctttctacacagacacagtaacagtctgatctctctttcttttccctacaggattgcaggcatgcagcaccatgcctggctaattttgtatttttagtagagacgggatttctccatgttggccaggctggtctcaaactcctgacctcaggtgatctgcccaccttggcctcccaaaatgctgggattacaggcatgaaccaccgcgcccggccatgctaagtcctttcttggctccattgtgctgtccctcctgcttcctctccaggtccatctgccacagtgctacgtgcaccagcgtgccagcaacagtggctggtctctgccccgtgcctcctccactgggctcacacctgtcttattttgtcctttggtggctctgagaagcagcctctgcccctctccctttcccttactctttgtaagatcctcttccttctgccctaccatgttgcttggacaccagggtggaatagcagagaacggctgcttgtgtttgaattccagctctgccacttcgatagatttctgaactgagacatgtgactctctaggcctatttctgcatgggtcggagagtgggcgggactgctttactgagttatagtgaatgtagttttaacctaagcgcctcacatgactaactcctcatccatcaagaatgagctcagctctcacttccccactcctcacccccctgtaaagtaacctttctccaaggttatgcttcaacaggaatagctaacatttattaaattgtggcacgtaagtatcttggatatattggctcattgaatcctcacacctactattttacagagatgccagtggggcttgagattgaatcacttgcccaggctcccactgctggtaaacagtagagggggctcctgacccatcagtctggcttgacaacccattccctcaactgcggatcccggattcccttatcaccctgttgatttctccatagctgtggtaacatttgttgcatgaatggaccgttgaaatagggcctggcagggagaaattcaggaaatgaatgaatggttcttccctggcagccttgatgacttacaagccctcaaggggaagcattttctcctggactccttgatgccggagctgctggtgtttcccgcccagacagatctgcatgaacacccactgtaccgggccggacacctcattctgcaggacagggtaggcaagaggaatagaaaagggaagaatgtgtaggcacgggaagggcctagcctggggtctctgtttacccggcccctgtgttctgcctgccaggccagctgtctcccagccatgctgctggacccctgccaggctcccatgtcatcgatgcctgtgccgccccaggcaataagaccagtcacttggctgctcttctgaagaaccaagggtgagtgccacaggaggaggaggaggaggacatggggtttgattttgtgcctttcagtgggtaataaaggctgaaaggatgactttcgcttaactctttcctgctgtaccaaagtagttcacggtatttgccccaagctaagctttccccactgcaggtgtgagatgtggatcccttagcccttggggcagagaccccaggccagttacctctgaccctgggccctttaaatataggccgtttcaatattgtgtgtcctggcttaacctgcatgttctggttgtctgtgtcagctgtgacaggcccttagctgctccatgcatgctcagctcacccctgctctgccctctgccctaggaagatctttgcctttgacctggatgccaagcggctggcatccatggccacgctgctggcctgggttggcgtctcctgctgtgagctggctgaggaggacttcctggcggtctcccccttagatccgcgctatcgtgaggtccactatgtcctgctggatccttcctgcagtggctcgggtgagatggtgagaaggcgtggctgagggactcggaggtccacagcagcttagacctggagtcatctgttttggtcttagttctgacactttaatgggcttgggaccctggagcaaaagttctcctctgtgaggcaaggatttcaggagcgaggatttcaggactgaggcagcctgtgaagctgtgtaaccgagacacgcttttccttaggtatgccgagcagacagctggaggatcccggggcagggacacctagcccggtgcgtctgcatgccctggcagggttccagcagcgagccctgtgccacgcgctctctttcccttccctgcagcggctcgtctactccatgtgctccctctgccaggaggagaatgaagacatggtaccagatgcgctgcagcagaacccgggcgccttcaggtacagggcgggcgccagggtcgtggaggggggggatggggtgaactgctctcttacccagcattggggctgtttctcttgcaggctagctcccgccctgcctgcccggccccaccgaggcctgagcacgttcccgggtgccgagcactgcctccgggcttcccccaagaccacgcttagcggtggcttcttcgttgctgtaattgaacgggtcgagatgccgacgtgagtgagtgggggcatgcttgggaggcgcaggatggtactggcacatctaacatctacacttctctagctcagcctcacaggccaaagcatcagcaccagaacgcacacccagcccagccccaaagagaaagaagagacagcaaagagccgcagccggtgcttgcacaccgccttgcacatagcagaggctccaggctgactccttcctggtgggaaaggaagatgcctgtcctctccgtggaggaccctgggccctcaccgcaggcagcagtttgcattttgaaaggttattgggtcccttcctcgggctgtgttcttgctggtgagcaaaagtgttgcctgcagaaataaaatgcagaacgtactctacgatagatcacagttttttattcttaatgtcacaagcaggagaaaaatctcacattcatactaaaaattccaactagactcaacaggaatgaagtctctatttgtaatggaaagtcccagcctcccgctgccgtccagtgtgtgtactgtacacatccacactcactctcactcagggttcccggaccggctgtcctgcctgcggaactgaggtaaacaagctcaggtactgacactaggagggtctaccttacataaggtacaggtagaagcttgattgctaggcccaggcccacccagaccctccaatcctaacaggtatttaggcttgaggttcactccctcctcagctgcacacgcagccaggtataacactcgccctcagtcacaacggggagggggcaccggttacatctacatcacattatttataaaataagaattacatttcatataacatggccagaaggagctctagtcccccaggaaagctgccggggacagcatttgagcctcttctttgcacaggcataacttaactatacagctaattcctagttaatagcatttatacttaaccacctcaatgaaccaagcttgaaggaatttaaaaggcaatttagcttaaatacaaaaataaatttttgttaaaaaacgtttaaatatttttttcttttaatttagacacacgcattcatacttctcccaaagaggttgggcgtgacagcaaggcgcttgggcctggggtatgtggtttcagaaggacggaaggaaaggatgggctgcagagggccctgtttgggaaaaataggattttaaaaatatggttcattaatttaggttttctaacatctactttgggtgacgtagcctccagtgaggtcagttaagtgggacagaaaccgcagagggaagaggtctttgcttcccctgggcccattctccctggctgccagcccttgaagtcagaacaccatgggaaaattcaggagtcggcacttgtagccgtcaagtggtgctactttccacattcaattagcgaggccccagaaaacttgaaacaggaagtccggcactaccaacatgccgccactcatacaactcaactcttcctccaaactcgattcaaagagcaatacacagagcgtcagacaaaggaacacaggacaaggcttgaaacatacaatcctggagaggcagacgagggcccaatggggccaaagggtagctgggcgaggaggcagctgaagcagcggtgggcatcctgcctgctccaagagcttctcccttcatccctggctctgccaggctaacagtcttgagccaccaagctctgaggggccaaactggcagagggttggagatgaaacattgattcaggcttggcaggaagaaaacggcaggagcagcacccactggggtctccaaggcaaagctagattcaagggcatttaaaaaggagggaatcctgcaaggaaccggtgagggacacagcagcaagaaatggggaaacagagtccccagaagggaccagaggaagagaaccacttctcacagctaagccaagcaagataaagctttacggatagcccatttcccaaatcccatcaggtgcacaccaccgatccaggcgggctggaccctgccccctccagcgacgacggctctcggggaaaggtggaaggggcgcctgcctaagggtgcgctaagcgggagtcagggcagcggacactatgtacaggtgtttccttagttctccagcctccccagtggaactgttcaagtagaggtcccgggctttggcctccgcatcctgcttccccttccctgaggcttgtgcttcctccagaagggaaagggccccagggctgccactgccccctggcggctgaagccagagatccggggtaggtttgctttacgcagctggaagggtccaaggctctttctagcacgtgccaaggtccagatttagggaaggggtggggggaacagggacaggggacaaaggctactttttgcgggtgtgctgccttcgggcctgcagtcgctgtcgagcccctggggtcttggatcccgcaccaatggaaaatgaaggggccgctgatcctggaaagattcaacaagacctcatcagggcagctgctacctgagactctggctctgggtgcccaaatctctggaaggccaggccagtaataaaacacagggtgcctcaatagggctttccccgctgcgtcagaaacactggacgggaggagcctcctgaaatgcaaactcccagagtctcagagcgaggcccacgaatccatttttacctggcttcccatgggaggcaaacttccaccccggacagctcctctctgatctctgccatccaactcccatccctgggctgtgctgtactcctaacccgaaatgtctttcctgtgctgaacctgatcttcacggggcctcagagggccaggagcctgccaccccacccaacctctcctcagacagacgagcagggccacagggtggcttgctgcttaccgaacggtccaacaccaacaaagccttgggcgggtgctgaagatgccccaaaggagaggctgctgcccgatgtgcccactccaggcgcaggggtgttctgaccaaaggtgggggtggcggtgcctggaatgaagagaacagagagctggccagtgagcagagggcggaggcaggcgaggagccgggcaggagcctgtgctctgcagggcacttcccacgggaccctcagccccagttctgcttctggggcactcctccatcagcagctgagccagacaaccgagtcttcatgcctggtgccccagctcagcctgcttctcccacccgctaatggccacgccagggcagagaaaaagcccccctgccccgcagccacctcgtgggcctcctgaccatcgctgcagaggggagtactctggggcccccgcctcctagcgtacctgggttggctacctcctctgttcaggccttttccccctagccaccgtcccctcccctctgaagcctggtttgtccgtcctgtgtcttttgtgatgccccgtggtcccctcccttccccggccttgccctgactggctctggctgcctgcccgatgccctctctggcagcccctctgcagggatggctgctctcagggcttggcctccggcccggacaaggggaagctccctgtgctcccacgctgcttccacacagtttctcttccttccctaaataccgtaactcaggttcaaatcactttaatctgccatgtcctcatgtcacctgtcaactgccaggtcactccctgattcacagaggacccttggctcactggcttcctccccatcaccactcacggtgacttcgccctgtggggctgactgatggtcctctcagcccctcggccctgccacccccatgacctcctctccccgacccctgccaccactcctgcagccacactgtcaccacaactgctccggctcccgaatctcctgcaggcaccacccctcctgcagctgacttcacccgctctccactcctgcaccccctgagctgcatcggggcactgacccgctgcccctcctgctgtgcttgctggggtctccacagccgggtggcaccagctgtccgctgaccttagatctatacccagtgtcgctgggaaacacacgccatgctaactggcctcactttaacttcacaatcacagttttccagcccacaaactgcctggaaactgatcacactttttaatatgatgttcctttcccccactgtccaaaatgactatttcaaaagaccccttttttatacactttatcccgaccttccctctcccagattttctctcctacttcacgaagcaaacagaagccatgggatctacattcatcttccacacgggaggaaccatcactgcatccttctgcctgattctgcaatggttttcctgaacacttaagacccaaacacccaaccctggccacaaacaatcctcgcctcttggcctccttccacaccactgctttagctcctgccctcctgccatgcttgtctttgttctgctcttcaacataccaaacatgtttctgcctctgggcctttgcatgcgccatcctgggcctgaaaggcatgtccacttgtgctgtgcccacccccaccccacccccatattcagcttacgcttgagacagtcttgctctgtcacctaggccagagtacagtgtggcatgatcttcgctcactgccacctccacctcctgggttgaaacattcttctgcctcagcctcccgagcagctgggattacaggtgggtaccaccatgcccggctaattttttggtatttttagtagagacagggtttcgccaagttgcccaggctggtcttgaactcctgtcctcaagtgatccaccctccttggcctcccaaaatattgggattacaagcatgagccactgcgcccaaccttcagcttacaattgttaagtactcagaaggcctttgaccagttaaatccacaatggctcctccagtcattactacgttagcaaaacatgtatcatgccctggcatctcactgagttctatattcagtgcctgtctcttcactgccacagcataagctccccgagaccacaggcttcacaggcacagcttttcagtgtccggcccggtagcccaagtccacgcccctccttacctccaaacacaggtttgctctcagttgtgctgcccacgttgaaggcaaacggtgtgctctggccggtggtgcccagggcgttctgacctaagccccctgcgaagggggtggaggtggctgtgctcccactctgtcctgctccaaagctgaaagctccggtggtggcgctggagcctggggtggccacgttgatcccaaagctcccactgccagcgggggctgccgaacccccaaacgtgaagggtgatggtgttgtgctgccaaacaccgagctgctgctcccgctgctggcggtctgggtggtggctccaaagccggagctggtggctgcaccgaaggagaagacagcagtggagccgccaaaggcgggctgtgagctggcgggagcgccgaaggccgaagccgtggctttcaacccaaacgccgagtgcgtggcaccgccaaaggtaggctggatgggcgtaggcacgtgcgcaggcacgatcttgatcgtggacgcaggtgcaggtgtgggtgcagtagccggggccggggctgcagagtttccaaaagtgaaagagctgccaaagctgggggtaagggctggcttggcggcccccggtggctgcccctcagcggccccaaatgcgggctgggggttggctcccggatatgatgggagcggggacttggcgcttgagcaaagggaatgttgaacgtgggggtgctcgtgttactgaacgtcagagtgggctggctgctggtggccggggcggaggtggcgagggtgctgccaaaaccactaaagtcggcagcgctgctgctggtggccgttggcacggcagtgggcagggactggctgaaggtggtgactgtggtggttgtgggcaaggcaggaggtttgccaaactggaatatggagcccatggccggggtgaagctggcagcagaggcctggggcgccccgaagaggaaaggctgtgaggcggcagtggcggtgctggtcgtggtactcacactgctgctgctcacactgtttatgccaaagccaaacgcaggcttcgaagcagagtctgtggatggactggcagaggtgatgggagccacagcagaggtggcgctggccaggccagtgaagagcggggcagttgtggtgggagcagtggcgggagtagttgtctgcttgaagaagggagcaggcaagggcacagatgcaggtggccccatgctgctaaagacaggctggaaggtcggggctgtggtgctggtggtcgtggggagggaggagctggagggtgctgtggctgagactgaagggccaggcggtgtgaggccttccttctcactcttgggtggagccgtgaaaatgggcttgaacatgggagatgctgaagatgcagcaggggcggcagggctggaaggtgaggtgttctgtgttccaaacaggaagctttgcttgggggcgggggacggggcagatgtggcttggggtttggtagccgtctctgcttgaagggttggaggtgccttggtgtcagtggctggtaccatggatggagcagggatcagccccagcaaagtggtcgggggtttggagtcaaaggaggggctggggagcagccctggcggccctgactgtgataaacccagcgggggtaggaggctgggtgtctttggaggtgagagggcctcagtggttgctgctccagcagattctggaagaagaatagaaaatgtgaaattggaataaacacttcaaagatgatggtattcagtatttcagcgtcctccccatgcctaccacagagcctgggatccaagagtcagtcaataaactcagctaagtctacactacaggcctgtacagtaaatcaaggaagtgttcattatttccacctcacagatcatcagacagaaggggataaaatggggcctaaatgggggcctaatgtgtagagactaagacagtccaattgtctgaactctgaagttcacgtatgaatctagatatactttatttgcctactaagctcacctgccaggcgctaagagcacacaactatgaatggggaagtctctgcccttgagcagggagggtgcgtacgaaccccaggttaccgtctgataaagaggtgtgcgcgcgcagtgccgtgaaggcctgggccgggaacaccagcagccctcaaagtgctggagggaaaggaagcagtgttgttctggaccagtagttctgacaggcaaggatatcctgaccacgccaccacattcacacttcagaggtgctgcaccgggaagatcattctcatctgacagatgaggaaggcgaggctcagggcagctaagccaggcttcagatcctgagcgtcgcagcaccccttctctaacacttcctgatgtgggctccggcgctgttaaacgtaggcccgctccggtgtgctgagccagggtgcgttcggcctgcagagcaatctccagcgactgacaggcacgacgcccttattccaacccaagccggggatgctgctcagaaggctggatccacggccccactccagctcacctgggcagggtggcaggctcgggggagtctgcatcttcttcaagctctctaacagtgggttggtgcttggggccaggagggaggtgggtggggaggcagttgcagcagcaggcagggtaaaggtaaatgaaggctgagtggtagttggggtctcagtgacagagttcgaggcagcatctaagaaagaaagaaaggtgaagcagtcctggcttgtctgggacttctttccacatgcctgtcggagagcaggctctcagcacagctcatggaggaatgtctgccctaaattgcagtggtccctgctgtccagttcccgtgaagaccaacacggatatctcaggtgagaaagaccacaagaaaacatggaactctacttcggattttcccagagaaacccatttttccaaacaccaaaataaaaccaaagaaaacagacacctgaaacctctcgagagtgcaacgatctgtgctccttaccactcttgtcctccaaggcctggttgaaccactgtaatgaagccttcttctctaagtctaggtcctcggcagtgatcgaatagccaagctggggaggtggaggctaccaaagagaaaaagaagaagtcaggccaatcagaaaaaacgggaaggctgggcgtggtggctaacgccggtaatctcagcactctgggaggccaagccagctggatcacttgaggtcaggagtttgaggctggcctggccaacatggtgaaaccccatctctactaaaaatacaaaaaattagtcaggcgtggtagcaagcgcctgtaatcccagctacttgggaggctgaggcaggagaattgcttgaactcaggaggcagaggttacggttagccaaaatcgagccactgaactccagcctgggtgacagagggatgttgtctcaaaaaacaaaaacaaaaataagttagaaaaaaaaccagaagaaacttgtccttagcgttcctaagacttaggagagctaagccggggagggcaggagtagatggacaagaccataccaaggtcagctgttcccctcgccgagaaggcagcagctgaactttccgcttacgctgcccagagctgccaggtgtagactgagaattcgagttttgtttcttccttggggttgtatctgcagctaaagaaagaaatcaagactcgtttgcttccttccctcttccagaaatggatggttgtgtctacccacttcgcatttcacactgagttttcaatgatggtatctctgaaaagattcaatcttctatggtttggttgcttggatggtgtttgtaagattaaggcgcgcacacaaaccgcttactgtgcagtaattactgggatcacccacaggtgactcaaactgagcttacctctatccaatcgttagcccccatctgtagcctttctccctcatcagactataaacttctgaaggagaggaaatctctctctttgtatctaacatgccttagacatagcaatgctcaagaccttttttcaataggtattaatctctacatcctccacaaatacctccaccaccaacagcagcccctcctcctggctcagcaacctacccttttctccctgggactccttgtctgctgccaatggagttgaagaactggaatgatgacacagctcttcttctctgttgggaaaaaaggaacaatttagtctagaaagacttcttggctgaagtattaaataatttctcacaccctcctaactaccaagtggccaacatctaaaacaaccatcatttaagatctcagtatgccaggataaaaaaagtcaacaggaaattccaacagaatgaagggaggctgttcacagaggccatgaagacagtttttgtcttaaaacaagcacaaacaataatcttcaaaccttacttacaacctaccaagtccctgggagttctagacacagatgtgatccctgagggagtggcattccagccaactgcaagcacctaggggatcagctcgagtcaagaacctgaaggcgactgcccgctgacttgactctctctgctctccactctgcatggcctctgtgcttgcacccgatccctcatgctggagtgggaggcgacagccagaggccactggagtcagtatccaagactgtagggatgatagttgttcaggtgggtgctgcattgtccctctcagggacttagtttctttgattctccaagtcacagcagcacaaagcctaagagccaggttcgtttcccacctttcctcacccccttctgtccacgtagcaaatgaaaactgcaggagaatgccgaataccttattttctttgctggcctctccggtgtctgggagcgggatgaggctgggctagagaagggtgatgaactggggccatttctcttccagag

SEQ ID NO: 6644 - DNA, 16472 bp, Homo sapiens
cagagccgtaaaggcgcgcgggaacatggggctgtacgctgcggtggcaggcgtgctggccggcgtggagagcgccagggctctatcaaggggctggtgtactccagcaacttccaggtagcgggcccgcgcgccacaagtaggggtggggggtgaggaacccggggtggggtgggacgggcccggatggggtcgggaggtggggcccggcgaggagggccgggggagcccccgacccagcttgtctccctcggccacacagaacgtgaagcagctgtacgcgctggtgtgcgaaacgcagcgctactccgccgtgctggatgccgtgatctccagcgccggcctcctcagtgcgaagaagctgcagccgcacctggccaagggtaggggcggggcggggaagtgaaccccgacggtcagcgctttgtcatctggtttcagccccgctgccgtgcacggcgggactggagcaagtcgctcacctgaaatgagtatgagcagaccttccctgggttacgaattgagatgggatgaaaatgctttaacttcgagtgttttgaaggattaaataaccgaagtacaaagtagtagtagcggagacagtaaggaagtcgggcgtggcggcgcgcacctgtggtcccagctactcggaaggctgaggggggaggatcacttgagcccaggagttcgaagctgcagtgagctgtgatgtggccactgcacttcagcctgggcgacagatctagaccccattctaaaaaaaaacaaaaaccccaaacccacacccacgaaagggtaatgttggcaagaagttgggtgcagaggtctactggtgaacatctgtggggaaagggtctaaggctgggaagcgagacgccaggttccgatcctgttgtgtagttaatttctggtgtggtcttgagtaaggtaccccacctttatctgtaaccatctagtcaggtgatctctttagccattccagtgcccgggctctattagagttagttctaaggcattcatacttcttgcttagggcgtttctgtctttgatccctcatccccaggtgctagtgtatgagttgttgggaaagggctttcgagggggtgggggccaatggaaggctctgttgggacggcaccaggcgaggtgttgagttggctcggctcaaggttcttcggggtgtgagctggcatgaggacctgttggaagtgggatccaggcctggtccaggtgagctggaaggagttgaggggcgggggaggtggggaactttgctcctgcctactcactgctcattgcgtcctacctagcctcccagctgcctcgatttgtgcgtgtgaacactctcaagacctgctccgtttatgtagttatttcaagagacaaggtttctcctatcagggtcgggcttccaggtgagagcttagagccctggctgtcctcatctagggaggtgtctggggtactgggaagagaagtggttggatagttgtgactttgctctctgggctttgttcctacctttccagcagtttctccatctccaaggtttgttttcctcgcatcccttaaacatcgaactcctaggagccccatcctacattcttccggagctctccgttttttctctaactttagctcctgcctcccacctggtgattctcaccgcccagtgtagacttcccttttgcattcttccctccttaggttcacatgaatgcaccacagatgccacagtcgctgcattcatctttcctctcagactttacacttagtacatccccagtttaatctaacagatgtcaccgttttccacccatttggtcaagccagaaaccgagtcatcctaggtgcttccttcccctccctccaatcatttactcctccaccttgagcatctttctcagctccactccttttttttttttttttttaggactgagtctcgctctgtcactctcaccgaggctggagtgcagtggcatgatcttggttcactacctccaaggttcatgcaatgctccttcctcagcctcctgcgtagctgggattagaggctcccaccaccatgtccagctaattattgtatttttagtagagatgaggtttcaccatgttgaccaggctggtctcaaactcctgacgtcaggtgatctgcccatcttggcctcccacagtgctgggattacaggcgtgagccacagtgcccggcctccactcctttctcttaattcccccggacactgcctaggttaagcactcatttcttattgggatgaccacaagaacttcccagactggtctctctgcttccagactgtctcactgcattttccttgaggttgactgtaggaagctctaaaggcagatctgatgcattactcctctgctaagcctttttttttttttttttttttttgagagagttttgctcttgtttcccaggctggatggagtgccctggcgcgatcttggctcaccgcaacctctgcctcctgggttcaagcgattctcctgcttcagccttctgagcagctgggattatgaaggggtggcctgcccctccacatctgtgggatatctcatcaggtgggacaagagactgagaaaagaaataagacacagagacaaagtatagagaaacaacagtgggcccaggagactggcacttagcataccaaggacctgcaccagcactggtctccgagttccctcagtttttattgattattattttcattatctcagcacaaggaatgcggtaggagagcagggtgataataaggagaaggtcagcaaaaaaacatgtgagcaaaggaatctgtgtcataattaagttcaaagggaggtactatgcctggatgtgcacgtaggccagatttatgtttccctccgcccaaacatctgtggagtaaagcataacaaggcagcattgctgccaacatgtctcgcctcccgccatagggtggtttttctcctatctcagaattgaacaaatgtacaatcgggttttataccgagacattcagttcccaggggcaggcaggagacagtgcccttcctctatctcaactgcaaggctttcctcttttactaatccacctcagcacagaccctttacgggtgtcgggctggggcacagcctctcatcccatgaggctatatttcagactatcacatggggagaaccttggacaatacctggctttccagggcagaggtccctgcagcttttcacagtacattgtgcctctggtttattgagactagagaacggcgaagacttttaccaagcatactgcttgtaaacgttttattaacaaggcatgtcctgcacagccctagatcctttaaaccttgattccatacaacacatgtttttgtgagctcaaatttggggcaaagtcacaaattaacagcatctcagccaaccaattgttcaaggtacaggtcaaaatggaatttcttatgtcttccctttctacacagacacagtaacagtctgatctctctttcttttccctacaggattgcaggcatgcagcaccatgcctggctaattttgtatttttagtagagacgggatttctccatgttggccaggctggtctcaaactcctgacctcaggtgatctgcccaccttggcctcccaaaatgctgggattacaggcatgaaccaccgcgcccggccatgctaagtcctttcttggctccattgtgctgtccctcctgcttcctctccaggtccatctgccacagtgctacgtgcaccagcgtgccagcaacagtggctggtctctgccccgtgcctcctccactgggctcacacctgtcttattttgtcctttggtggctctgagaagcagcctctgcccctctccctttcccttactctttgtaagatcctcttccttctgccctaccatgttgcttggacaccagggtggaatagcagagaacggctgcttgtgtttgaattccagctctgccacttcgatagatttctgaactgagacatgtgactccctaggcctatttctgcatgggtcggagagtgggcgggactgctttactgagttatagtgaatgtagttttaacctaagcgcctcacatgactaactcctcatccatcaagaatgagctcagctctcacttccccactcctcacccccctgtaaagtaacctttctccaaggttatgcttcaacaggaatagctaacatttattaaattgtggcacgtaagtatcttggatatattggctcattgaatcctcacacctactattttacagagatgccagtggggcttgagattgaatcacttgcccaggctcccactgctggtaaacagtagagggggctcctgacccataagtctggcttgacaacccattccctcaactgcggatcccggattcccttatcaccctgttgatttctccatagctgtggtaacatttgttgcatgaatggaccgttgaaatagggcctggcagggagaaattcaggaaatgatgaatgaatggttcttccctggcagcctcgatgacttacgagccctcaaggggaagcattttctcctggaccccttgatgccggagctgctggtgtttcccgcccagacagatctgcatgaacacccactgtaccgggccggacacctcattctgcaggacagggtaggcaagaggaatagaaaagggaagaatgtgtaggcacgggaagggcctagcctggggtctctgtttacccggcccctgtgttctgcctgccaggccagctgtctcccagccatgctgctggacccccgccaggctcccatgtcatggatgcctgtgccaccccaggcaataaagaccagtcacttggctgctcttctgaagaaccaagggtgagtgccacaggaggaggaggaggacatggggtttgattttgtgcctttcagtgggtaatgaaggctgaaaggatgactttcgcttaactctttcctgctgcaccaaagtagttcacggtatttgccccaagctaagctttccccactgcaggtgtgagatgtggatcccttagcccttggggcagagaccccaggccagttacctctgaccctgggccctttaaatataggctgtttcaatattgtgtgtcctggcttaacctgcatgttctggttgtctgtgtcagctgtgacaggcccttagctgctccatgcatgctcagctcacccctgctctgccctctgccctaggaagatctttgcctttgacctggatgccaggcggctggcatccatggccacgctgctggcctgggctggcgtctcctgctgtgagctggctgaggaggacttcctggcggtctcccccttagatccgcgctatcgtgaggtccactatgtcctgctggatccttcctgcagtggctcgggtgagatggtgagaaggcgtggctgagggactcagaggtccacagcagcttagacctggagtcatctgttttggtcttagttctgacactttaatgggcttgggaccctggagcaaaagttctcctctgtgaagcgaggatttcaggagcgaggatttcaggactgaggcagcctgtgaagctgtgtaaccgagacacgcttttccttaggtatgccgagcagacagctggaggagcccggggcagggacacctagcccggtgcgtctgcatgccctggcagggttccagcagcgagccctgtgccacgcgctcactttcccttccctgcagcggctcgtctactccatgtgctccctctgccaggaggagaatgaagacatggtacaagatgcgctgcagcagaacccgggcgccttcaggtacagggcgtgcgccagggtcgtggagggggggatggggtgaactgctctcttacccagcattggggctgtttctcttgcaggctagctcccgccctgcctgcccggccccaccgaggcctgagcacgttcccgggtgccgagcactgcctccgggcttcccccaagaccacgcttagcggtggcttcttcgttgctgtaattgaacgggtcgagatgccgacgtgagtgagtgggggcatgcttgggaggcgcaggatggtactggcacatctaacatctacatttctctagctcagcctcacaggccaaagcatcagcaccagaacgcacacccagcccagccccaaagagaaagaagagagcaaaaagctgcagccggtgcttgcacaccgccttgcacatagcagaggctccgggctcactccttcctggtgggaaaggaagatgcctgtcctctccgtggaagaccctgggccctcaccgcaggcagcagtttgcgttttgaaaggttattgggtcccttcctcgggctgtgttcttgctggtgagcaaaagtgttgcctgcagaaataaaatgcagaacgtactctacgatagatcacagttttttattcttaatgtcacaagcaggagaaaaatctcacattcatactaaaaattccaactagactcaacaggaatgaagtctctatttgtaatggaaagtcccagcctcccgctgccgtccagtgcgtgtactgtacacatccacactcattctcactcagggttcccggaccggctgtcctgcctgcggaactgaggtaaactagctcaggtactgacactaggagggtctaccttacataaggtacaggtagaagcttgattgctaggcccaggcccacccagaccctccaatcctaacaggtatttaggcttgaggttcactccctcctcagctgcacacgcagccaggtattaacgaggatcagagctgttctgaggggtgggaaggagcagccccgccaccactcactcaccctcagtcacatcggggagggggcaccagttacatttacatcacattatttataaaataagaattacatttcatataacatggccagaaggagctctagtcccccaggaaagctgccggggacagcatttgagcctcttctttgcacaggcataacttaactatacagctaattcctagttaatagcatttatacttaaccacctcaatgaaccaagcttgaaggaatttaaaaggcaatttagcttaaatacaaaaataaatttttgttaaaaaacgtttaaatatttttttcttttaatttagacacacgcattcatacttctcccaaagaggttgggcgtggcagcaaggcgcttgggctggggtatgtggtttcagaaggacggaaggaaaggatgggctgcagagggccctgtttgggaaaaataggattttaaaaatatggttcattaatttaggttttctaacatctactttgggtgatgtagcctccagtgaggtcagttaagtgggacagaaacggcagagggaagaggtctttgcttcccctgggcccattctccctggctgccagcccttgaagtcagaacaccatgggaaaattcaggagtcggcacttgtagccgtcaagtggtgctactttccacattcaattagcgaggccccagaaaacttgaaacaggaagtccggcactaccaacatgccgccactcatacaactcaactcttcctccaaactcgattcaaagagcaatacacagagcatcagacaaaggaacacaggacaaggcttgaaacatacaatcctggagaggcagacgagggcccaatggggccaaagggtagctgggcgaggaggcagctgaagcagcggtgggcatcctgcctgctccaagagcttctcccttcacccctggctctgccaggctaacagtcttgagccaccaagctctgaggggccaaactggcagagggttggagatgaaacattgattcaggcttggcaggaagaaaacggcaggagcagcacccactggggtctccaaggcaaagctagattcaagggcatttaaaaacgaaggaatcctgcaaggaactggtgagggacacagcagcaagaaatggggaaacagagtccccagaagggaccagaggaagagaaccacttctcacagctaagccaagcaagataaagctttacggatagcccatttcccaaatcccatcaggtgcacaccaccgatccaggcgggctggaccctgccccctccagcgacgacggtctcggggaaaggtggaaggggcgcctgcctaagggtgtgctaagcgggagtcagggcagcggacactatgtacaggtgtttccttagttctccagcctccccagtagaactgttcaagtagaggtcccgggctttggccctccgcatcctgcttccccttccctgaggcttgtgcttcctccagaagggaaagggccccagggctgccactgccccctggcggctgaagccagagatccggggtaggtttgctttacgcaactggaagggtccaaggctcttcctagcaggtgccaaggtccagatttagggaaggggtggggggaacagggacaggggacaaaggctactttttgcgggtgtgctgccttcgggcctgcagtcgctgtcgagcccctggggtcttggatcccgcaccaatggaaaatgaaagggccgccgatcctggaaagattcaacaagacctcatcagggcagctgctacctgagactctgactctgggtgcccaaatctctggaaggccaggccagtaataaaacacagggtgcctcaatagggctttccccgctgcatcagaaacactgtacgggagaagcctcctgaaatgcaaactcccagagagtctcagagcgaggcccaagaatccatttttacctggcttcccatgggaggcaaacttccaccccggacagctcctctctgatctctgccatccaactcccatccctgggttgtgctggactcctaacccgaaatgtctttcctgtgctgaacctgatcttcaccgggcctcagaggaccaggaacctgccaccccgcccaacccctcctcagacagatgagcagggccacagggtggcttgctgcttaccgaaaggtgcaacaccaacaaagccttgggcgggtgctgaggatgccccaaaggagaggctgctgcctgatgtgcccactccaggcgcaggggtgttcagaccaaaggtgggggtggcggtgcctggaatgaagagaacagagagctggccagtgagcagagggcagaggcaagcgaggagccgggcaggagcctgtgctccgcagggcacttcccacgggaccctcagccccacttctgcttctggggcactcctccatcagcagctgagccagacaaccgagtcttcatgcctggtgccccagctcagcctgcttctcccacccgctaatggccacgccagggcagagaaaaagcccccctgccccgcagccacctcgtgggcctcctgaccatcgctgcagaggggagtactctggggcccccgcctcctagcgtacctgggttggctacctcctctgttcaggccttttcccccagccaccgtcccctcccctctgaagcctggtttgtccgtcccgcgtcttttgtgatgccccgtggtcccctcccttccccggccttgccctgactggctctggctgcctgcccgaggccctctctggcagcccctctgcagggatggctgctctcagggcttggcctccggcccggacaagaggaagctccctgtgctcccacgctgcttccacactgtttctcttccttccctaaataccgtaactcaagttcagatcactttaatctgccatgtcctcatgtcacctgtcaactgccaggtcactccctgattcacagaggacccttggctcactggcttccttcccatcaccactcacggtgacttcgccctgtgaggctgactgatggtcctctcagcccctcaaccctgccacccccatgacctcctctccccgacccctgccaccactcctgcagccacactgtcaccacaactgctccggctcccgaatctcctgtaggcaccacccctcctgcagctgacttcacccgctctccactcctgcaccccctgagctgcatcggggcactgacccgctgcccctcctgctgtgcttgctggggtctccatggccgggtggcaccagctgtccgctgaccttaggtctacacccacagtgtcgctgggaaacacatgccatgctaactggcctcactttaacttcacaatcacaattttccagcccacaaactgcctggaaactgatcacactttttaatatgatgttcctttcccccactgtccaaaatgactatttcaaaagacccctttttttatacactttatcctgaccctctctctcccagattttctctacttcacgaagcaaacagaagccatgggatctacattcatcttccacatgggaggaaccatcactgcatccttctgcctgattctgcaatggttttcctgaacacttaagacccaaacacccaaccctggccacaaacaatccttgcctcttggcctccttccacaccactgctttagctcctgccctcctgccatgcttgtctttgttctgctcttcaacataccaaacatgtttctgcctctgggcctttgcatgcgccatcctgggcctgaaaggcatgtccacttgtgctgtgcccacccccatattcagcttacggtttgttttttgagacagagtcttgctctgtcacccaggccggagtacagtggcatgatcttggctcactgcaacctccaactcctgggttcaaaccattcttgtgcctcagcctcctgagtagctgggattacaggtgggtaccaccacgcccggctaattttttggtatttttagtagagacagggtttcgccaagttgtccaggctagtcttgaactcctggcctcaagtgatgcaccctccttggcctcccaaaatattgggattacaagcgtgagccactgcgcccaaccttcagcttacaattgttaactactcagaaggcctttgaccagttaaatccacaatggctcctccagtcattactacgttagcaaaacatgtatcgttccctggcatctcactgagttctatattcagtgcctgtctcttcactgccacagcataagctccccgagaccacaggcttcgcaggcacagcttttcagtgtccggcccggtagcccaagtccacgcccctccttacctccaaacacaggtttgctctcagttgtgctgctcacgttgaaggcaaacggtgtgctctggccggtggtgcccagggcgttctgacctaagccccctgcgaagggggtggaggtggctgtgctcccactctgtcctgctccaaagctgaaagctccggtggtggtgctggagcctggggtggccacattgatcccaaagctcccactgccagcgggggctgccgaacccccaaacgtgaagggtgatggtgttgtgctgccaaacaccgagctgctgctcccgctgctggcggtctgggtggtggctccaaagccggagctggtggctgcaccgaagaagacagcagtggagccgccaaaggcgggctgtgagctggcgggagcgccgaaggccgaagccgtggctttcaacccaaacgccgagtgcgtggcaccgccaaagataggatggatgggcgtaggcacgtacgcaggcacgaccttgatcatggacggaggtgcaggtgtgggtgcagcagccggggctgcagagtttccaaaagtgaaagagctgccaaagctgggggcaagggccggcttggcggcccccggtggctgcccctcagcggccccaaatgcgggctgggggttggctcccggatatgatgggagcggggacttggcgcttgagccaaagggaatgttgaacgtgggggtgctcgtgttactgaacgtcagagtgggctggctgctggtggccggggcggaggtggcgagggtgctgccaaaaccactaaagtcggcagcgctgctgctggtggccgttggcacggcagtgtgcagggactggctgaaggtggtgactgtggtggttgtgggcaaggcaggaggtttgccaaactggaatatggagcccatggccggggtgaagctggcagcagaggcctggggcgccccgaagaggaaaggctgtgaggcggcagtggcggtgctggtcgtggtactcacactgctgctgctcacactgtttatgccaaagccaaacgcaggcttcgaagcagagtctgtggatggactggcagaggtgatgggagccacagcagaggtggcgctggccaggccagtgaagagcggggcagttgtggtgggagcagtggcgggagtagttgtctgcttgaagaagggagcaggcaagggcacagatgcaggtggccccatgctgctaaagacaggctggaaggtcggggctgtggtgctggtggtcgtggggagggaggagctggagggcgctgtggctgagactgaagggccaggcggtgtggggccttccttctcactcttgggtggagccgtgaaaatgggcttgaacatgggaggtgctgaagatgcagcaggggcggcagggctggaaggtgaggtgttctgtgttccaaacaggaagctttgcttgggggcgggggacggggcagatgtggcttggggtttggtagccgtctctgcctgaagggttggaggtgccttggtgtcagtggctggtaccatggatggagcagggatcagccccagcaaagtggtcgggggtttggagtcaaaggaggggctggggagcagccctggcggccctgactgtgataaacccagcgggggtaggaggctgggtgtctttggaggtgagagggcctcagtggttgctgctccagcagattctggaagaagaatagaaaatgtgaaattggaataaacacttcaaagatgatggtattcagtatttcagtgtcctccccacgcctaccacagagcctgggatccaagagtcagtcaataaactcagctaagtctacactacaggcctgtacagtaaatcaaggaagtgttatttctacctcacagatcatcagacagaaggggataaaatggggcctaaatgggggcctaatgtgtagagactaagacagtccaattgtctgaactctgaagttcacgtatgaatctagatatactttatttgcctactaagctcacctgccaggcgctaagagcacacaactatgaatggggaagtctctgcccttgagcagggagggtgcgtacgaaccccaggttaccgtctgataaagaggtgtgcgcgcgcagtgccgtgaaggcctgggccgggaacaccagcagccctcgaagtgctggagggaaaggaagcagtgctgttctggaccagtggttctgacaggcaaggatatcctgaccacgccaccacattcacacttcagaggtgccgcacagggaagatcattctcatctgacagatgaggaaggcgaggctcagggcagctacgagccaggcttcagatcctgagcgtcgcagcaccccttctctaacacttcctgatgcgggctctggcgctgttaaacgtgggcccgctccggtgtgctgagccagggtgcgttcggcctgcagagcaatctccagcgactgacaggcacgacgcccttattccaactcaagccggggatgctgctcagaaggctggatccacggccccactccagctcacctgggcagggtggcaggctcgggggagtctgcatcttcttcaagctctctaacagtgggttggtgcttggggccaggagggaggtgggtggggaggcaggtgcagcagcaggcagggtaaaggtaaatgaaggctgagtgataggtggggtctcagtgacagagttcgaggcagcatctaagaaagaaagaaaggtgaagcagtcctggcttgtctgggacttctttccacatgcctgtcggagagcaggctctcagcacagctcatggaggaatgcctgccctcaattgcagtggtccctgctgtccagttcccgtgaagaccaacacggatatctcaggtgagaaagaccacaagaaaacatggaaccctacttgggattttcccagagaaacccattttttcaaacaccaaaataaaaccaaagaaaacagacacctgaaacctctccagtgtgcaacaatctgtgctccttaccgctcttgtcctccaaggcctggttgaaccactgtaatgaagccttcttctctaagtctaggtcctcggcagtgatcgaatagccaagctggggaggtggaggctaccaaagtgaaaaagaagaagtcaggccaatcagaaaaaacgggaaggctaggcatggtggctcacaccggtaatctcagcactttgggaggccaagccagctggatcacttgaggtcaggagtttgaggccggcctggccaacatggtgaaaccccatctctactaaaaacacaaaaaatcaaccaggcgtggtagcaagcacctgtaatcccagctacttgggaggctgaggcaggagaattgcttgaactcaggaggcagaggttacggttagccaaaatcgagccactgcactccagcctgggtgacagagggatgttgtctcaaaaaacaaaaacaaaaataaattagaaaaaaaatcagaagaaacttgtccttagcgttcctaatacttaggagagctaagccggggagggcaggagtagatggacaagaccataccaaggtcagctgttcccctcgccgagaaggcagcagctgaactttccgcttacgctgcccagagctgccaggtgtagactgagaattcgagttttgtttcttccttggggttgtatctgcagctaaagaaagaaatcaagactcgtttgcttccttccctcttccagaaatggatggttgtgtctacccacttcgcatttcacattgagttttcaatgggtatctctgaaaagattcaatcttctatggtttggttgcttggatggtgtttgcaagattaaggcgcgcacacaaaccgcttactgtgcagtaattactgggatcacccacaggtgactcaaactgagcttacctctatccaatcgttagtccctgtctgtagcctttctccctcatcagactataaacttctgaaggagaggaaatctctctctttgtatctaacatgccttagacatagcaatgctcaagaccttttttcaataggtattaatctctacatcctccacaaacacctccaccaccaacagcagcccctcctcctggctcagcaacctacccttttctccctgggactccctgtctgctgccaatggagttgaagaactggaatgatgacacagctcctcttctctgtcaggaaaaaaggaacaatttagtctagaaaggcttcttggctgaagtattaaataatttctcacaccctcctaactaccaagtggccaatgtctaaaacaaccatcatttaagatctcagtatgccaggataaaaaaagtcaacaggaaattccaacagaatgaagggaggctgttcacagaggccatgaagacagcttttgtcttaaaacaagcacaaaacaataatcttcaaaccttacttacaacctatcaagtccctgggagttctagacacagatgtgatccctgagggagtggcattccagccaactgcaagcacctagggggtcagctcgagtcaagaacctgaaggcgactgcccgctgacttgactctctctgctctccactctgcatggcctctgtgcttgcacccgatccctcatgctggagtgggaggcgacagccagaggccactggagtcagtatccaagactgtagggatgacagcacttcgggtgggtactgcattgtacctctcagggacttaagtttctttgattctccaagtcacagcagcacaaagcctaagagccaggttcgtttcccacctttcctcacccccgcctgtccacgcagcaaatgaaaactgcaggagaatgccaagtaccttattttctttgctggcctctccggtgtctgggagcgggaggaggctgggctagagaagggtgatgaactggggccatttctcttccagagctaaaaatcaagagggacatgactgagcctgctgataacttagcatctgaccctcaacacgacaaagtctcttttcaagtgactaaaaaaacattctttatggttaaatggttagtcatgcctgtaatcccagcatgctgggaggccaaggtgggaggatcgcttgagcccaggaatttgagcccagcctgggtaacatagcgagacccctgtctctacaaaaaaactgaaaaatcagttgggtgtggtggtttgcatctgtggtcccaactactcaggatgctgcagtgagctgagattgccccactgcactccagcctg

SEQ ID NO: 6645 - DNA, 1951 bp, Homo sapiens
acagtgggttggtgcttggggccaggagggaggtgggtggggaggcaggtgcagcagcaggcagggtaaaggtaaatgaaggctgagtgataggtggggtctcagtgacagagttcgaggcagcatctaagaaagaaagaaaggtgaagcagtcctggcttgtctgggacttctttccacatgcctgtcggagagcaggctctcagcacagctcatggaggaatgcctgccctaaattgcagtggtccctgctgtccagttcccgtgaagaccaacacggatatctcaggtgagaaagaccacaagaaaacatggaaccctacttgggattttcccagagaaacccattttttcaaacaccaaaataaaaccaaagaaaacagacacctgaaacctctccagtgtgcaacaatctgtgctccttaccgctcttgtcctccaaggcctggttgaaccactgtaatgaagccttcttctctaagtctaggtcctcggcagtgatcgaatagccaagctggggaggtggaggctaccaaagtgaaaaagaagaagtcaggccaatcagaaaaaacgggaaggctaggcatggtggctcacaccggtaatctcagcactttgggaggccaagccagctggatcacttgaggtcaggagtttgaggccggcctggccaacatggtgaaaccccatctctactaaaaacacaaaaaatcagccaggcgtggtagcaagcacctgtaatcccagctacttgggaggctgaggcaggagaattgcttgaactcaggaggcagaggttacggttagccaaaatcgagccactgcactccagcctgggtgacagagggatgttgtctcaaaaaacaaaaacaaaaataaattagaaaaaaaatcagaagaaacttgtccttagcgttcctaagacttaggagagctaagccggggagggcaggagtagatggacaagaccataccaaggtcagctgttcccctcgccgagaaggcagcagctgaactttccgcttacgctgcccagagctgccaggtgtagactgagaattcgagttttgtttcttccttggggttgtatctgcagctaaagaaagaaatcaagactcgtttgcttccttccctcttccagaaatggatggttgtgtctacccacttcgcatttcacactgagttttcaatgatggtatctctgaaaagattcaatcttctatggtttggttgcttggatggtgtttgtaagattaaggcgcgcacacaaaccgcttactgtgcagtaattactgggatcacccacaggtgactcaaactgagcttacctctatccaatcgttagcccccgtctgtagcctttctccctcatcagactataaacttctgaaggagaggaaatctctctctttgtatctaacatgccttagacatagcaatgctcaagaccttttttcaataggtattaatctctacatcctccacaaatacctccaccaccaacagcagcccctcctcctggctcagcaacctacccttttctccctgggactccttgtctgctgccaatggagttgaagaactggaatgatgacacatctcttcttctctgttgggaaaaaaggaacaatttagtctagaaagacttcttggctgaagtattaaataatttctcacaccctcctaactaccaagtggccaacatctaaaacaaccatcatttaagatctcagtatgccaggataaaaaaagtcaacaggaaattccaacagaatgaagggagactgttcacagaggccatgaagacagtttttgtcttaaaacaagcacaaaacaataatcttcaaaccttacttacaacctaccaagtccctgggagttctagacacagatgtgatcctgagggagtggcattccagccaactgcaagcacctaggggatcagctcgag

SEQ ID NO: 6646 - DNA, 199 bp, Homo sapiens
tcaccccatctgaaaaataaagcctgggcacttgggcttggtattggtggcctttgcaaggtgtaagatgcgttcccctccttgggccccccttaagcttgtcctgtacatttcatttacaaaggactttcacaagcatgaatggaggtgaccccaccacaccccaggtttcggataaggaaaccgaggcttcagtagg

SEQ ID NO: 6647 - DNA, 106 bp, Homo sapiens
atcccagcactttgggaggccaaggggggtggatcacgaggtcaggagatggagaccatcttggctaacacagtgaaatcccatctctactaaaaatacaaaaaaa

SEQ ID NO: 6648 - DNA, 156 bp, Homo sapiens
ttttttttttttgagacggagccttgctctgttaccaggctggagtgcagtggcgcgatctcagctcactgcaacctccgcctccctggttcaagcgattctcctgcctcagcctcccgagtagctgggactacaggaacatgccaccacacccag

SEQ ID NO: 6649 - DNA, 199 bp, Homo sapiens; identical to SEQ ID NO: 6646

SEQ ID NO: 6650 - DNA, 199 bp, Homo sapiens; identical to SEQ ID NO: 6646

SEQ ID NO: 6651 - DNA, 106 bp, Homo sapiens; identical to SEQ ID NO: 6647

SEQ ID NO: 6652 - DNA, 342 bp, Homo sapiens
gtgagtggcaggtatcatgaaccacattgtggacctggagttgctaggaccttttctgccattacacagaaaaatcctccctgagaacacagccattggaggacacatggcagaggaagataagacaataaacagagacacataattatggccagcgtgggggctcacgcctgtaatcccaaaactttgggaggccgaggtgggcagatcacctaaggtcaggagttcgaggccagcctggccaacatggtgaaaccccgtctctactaaaaatacaaaaattagccgggcgtggtggcacgggcctgtagtcctagctactccagagggtgaggcaggaga

SEQ ID NO: 6653 - DNA, 144 bp, Homo sapiens
gagacggagccttgctctgttaccaggctggagtgcagtggcgcgatctcagctcactgcaacctccgcctccctggttcaagcgattctcctgcctcagcctcccgagtagctgggactacaggaacatgccaccacacccag

SEQ ID NO: 6654 - DNA, 289 bp, Homo sapiens
gggggtgctcgtgttactgaacgtcagagtgggctggctgctggtggccggggcggaggtggcgagggtgctgccaaaaccactaaagtcggcagcgctgctgctggtggccgttggcacggcagtgggcagggactggctgaaggtggtgactgtggtggttgtgggcaaggcaggaggtttgccaaactggaatatggagcccatggccggggtgaagctggcagcagaggcctggggcgccccgaagaggaaaggctgtgaggcggcagtggcggtgctggtcgtg

SEQ ID NO: 6655 - DNA, 91 bp, Homo sapiens
gaggctgcagtgagctgagattgccccactgcactccagcctgggtgacagagtgagaccctgtctcaaaaaaaaaaaaaaaaaaagaaaa

SEQ ID NO: 6656 - DNA, 2293 bp, Homo sapiens
ccccctgcctggaagagtgactgctcttctgcgtgctagggtgggagaccttgtggaagtcagtttatctttagagtttcagtttccttatctgtagaagggggtaagaatgcccccagggttgacccttcaggttcatgggatgataagaaaggaaaatggtggacgagaaaggtttctgaggctctgctgtgctcctggccctcttgcttgcttctgccctacctaaggcacagacaagttctctgtgtaggaaaaggattcttgttttccacatgtggtatcttccagagtatcctggaatgtctacatgcccgattagaatccagcattagaatgaagtcagactctcagcctcttctttgggaaacccctgcccatctggtcattggtgctgtgcaacaggaaagactcggggtgctggttgcattgctgcagcaggagagactcggggttctggttgcattgctgcagcaggagagactcagggttctcgttgcattgctgcagtaggagagacttggggttctcgttgcattgctgcaagcaggagagactcggggttctcgttgcattgctgcagcaggagagactcagggtactgcttgcattgctgcatctctcaaaagctttgttttgttgttggttagatttggcactgtgtagtcatggccatgtggcttcaggttctcacaggacacagggacatgtgactgatgaggtttcaagagaggaggattggatgagtgggggattgcagcttccctcctcccgacacctgggaccctccactcacagagagaatgagcttctccagcgtttggaggagagaggagaagatgggctcccctgcaagtccatagaagcctccgtggctttctggattaatgcagccacacactcactccttgcacagcctctgcccagtgtccagttttacatatgctttggaaataagaacaactgtcaataacaccatgacctaaagaaagaaacaagtaagcgctgaaaagcactggggaaagccccctggggctcaaaggagtggaagcccgtgccttatcctctgagccccagctatgacagtgacctcctgtaatgcacaaaaagccctggacttccttctcaggcctgggtctaaccgtaggacttagaaactagtgatcagagggttcacaggcaggcagaggtggaatcctacccacccagggggcatcccctgctcggtcctgcagagactcagctcccagcctgcggcatggcagggaggaaaggcagtgggtggaggtaagtttcacagaagaggcacagagatggcagaagagcctcttagctagagtaggagtaagcaagagggccaggggcgcaccaggaactgtgttcttccgttcagctctcattcccaaaggagcagaaaactctgcagcttagacagaagtctgacctcccaaaagggagcagagcccagccctgaggagccgcctccagctggcgggaagcctgtcgggcatcctgtgaagatgaaggcctgctgcacatcgcccggacctttcaggccatcccggagtgggcagggcttcccacacctgcaggaaccagagcgagactggagacgagctccccgccatgccccatggctcattctagaccaggattgattgacctctgccggtttaaaagggcattttttttttaagcctcaaagtcaaaactcaagtatgagcccgtaaaaaagtaataataataataagcactatctatggaaagcaatcctgtcctaaagattttagggcagaggtagctctgaaaatagatctctgcagtaaacagacaatacttttatagaaagtgtctgcttgttggtgtcacagagatggactgcatggccgtgacccaggagccaggaacccaaggtgaggcaggacctggaacgaaggcagacatccaagggttttctgaatgaaatagaagatggatacggagacaccaaagatgtaaaagtagagtttagttgtgtattgggagctgcaaataacataaatataactgcagaaaatcaaaacagtgataaggagactaatcttaaaaccaagagataattcacagaaaaaaaaaaaaaaaagcaaggaaatggaacaaaacagataaagagaagttggtagatctggaggacagaggatgaatatctaactgaagagtcgtggatgctcctgagggggaacctcaatggctccagcagaaggaagaatcacattagagtgaaaaccatagtgttggaaagaaagttactcga

SEQ ID NO: 6657 - DNA, 5566 bp, Homo sapiens
ctgctcctcctgagctgtgtagctgcctgaaggaggccaggacctgggtaattaattactagagaagcctctggtctagcagcaaaaggaggtagttaatttagcctgcctgttaacaatagttatatttgtctccgattccattagagatgcttaggaaaaggtttttatatcctgaaccctgatgtccattttcttaatgcaaaggcctgtacttggggtcttgtaagccccctaatgtcactctttgaagtgaagtaactatacgtgataagtgaataaaatgtgtcagagtgtactacttagaattttcatagattgtaaagattttctatatatttatttgaattggtaattggttatgagcagtttggtgtagctgtttttaattgtacaacaattaagatatcacctatattctcgaagaatgggatcattccttctaggtgagggattatccctttaatatattttctttctctttgtctttgtttatggtggagaataattaaacttttttttttttggaggtaggtcttgctctgtcacccagattggggtgcagtggcatgatcataacttactgcagcctcagccttccaggctcaactgatcctcccactgtagtctcagagtagctgggactacagccgcacaccactatacccagctaacttttttgttctattttttgtagagacaggtcttggctatatccctcagcctagtcttgatctcctgggttcaagtgattcttccgcctcagcctctcaaagtgctagattacaggtgtcagccaccagcacttggccgtcttcctctaatttttaattttttcactttgagaagcctatgatatgacatggaatttgatgtctcatcctgtgtggtcctgtgcaccctgttcctacagaagtacagagggaatcttttgagagggagggataaacttagattcttaaaaataatgcatgtgggtttttcagtgttcattttagattctcttcaaaacagtcagaagccccctaccctaatctcaattcctgtctgctccctcctggctccctgcagtaaccccttctccacctgatcttcctgctgctgctctttgtcccctcagagccgtgtgccacacacaagccagaaccatcatcctaatgagcaaattccccaagtccttattctgccctgcacagtcgggctcagttctctgtccctggtctcccctagactatgccacatcccttcctgcctgagaacttttgcacctgcgcattcctctgcctggaatgtttcttgctctcatttgtgtcctcaatgcccgtccccaagcctcactacagcctacttacactgagggtttccattcaaatattaccacccaagtggccaggcacggtgcttcacgcctgtaatcccagcactttgggaggccaaggtgggcggatcacgaggtcaggagatcgagaccatcctggctaacacggtgaaaccctgtctctactgaaaatacaaaaaaattagctgcgcgtggtgacgggtgcctgtagttccagctatttgggaggttgaggcaggagaatggtgtgaacccaggaggcggagcttgcagtgagccgagatcgcgccactgcactccagcctgtgcaacagagcgagactccgtctcaaaaaaaataaaaataaataaataaatgttaccgcccaagtgagctttccttgcattgattagattcggtctccccaagatgtgctttcatacagagcactctggactcatagaacttacacctgaagttgtagtgaacttggcttcccctgctgtcagctctttgaaagtaaggctcatttttaaaattgtatccccaggacctagcatagctcctaactcaaaataggcactcactcatacttgtttactcagtctttttttttttttttttcccctcagagatgagatcttgctatattgcctgggccagagtgcagtggctattcacaggtgcaatcatagcacactatagccttaaactgctgggcttaagggatctttcccaggtagctgggactgcaggcatatgccactgtgcccagctgctcccttagtcttgactatgtatttttttttttttggttgttttattaggatagagtcctaagaatggcattactgggttaataggtatgaacattagatctttaatacatacagtcgaattacttttcataaagccatatacctttttatattcccaccgatactatccctatcactaagtattaacttattttcatctttgccaatatgatcatccaaagtgaggcagtgggtggccatcagatgtctgagtcagcagggtgtggtggctcacgcctgtaatcccaggattacaaattttgggaggctgaggcgggtggatcacctgaggtcaggagttcaagaccagcttggccaaaatggtcaaacctcgtctcaacttaaaatacaaaaattagccaggcgtggtggtgggcgcctgcaatcctagctacttgggaggctgatgcaggagaatcacttgaacccaggaggcagagggtgcgggggttgcagtgggccaagatcgcatcactgcagtccagcctgggcaacagagtaagactctgtctcaaaaaaaaaaaaaaaaaaaagtctgagttatgaaaacagaaggctcgaaccagccccttgatctagttattctgggcaagcctacatgtgtcctcgaaggtttctgggctctcaggttttacagccttagcaggctaaaggcaacagggaggacagcttgtcttatctgttaggcagtagttttagtaacatggccagcatggttacctgtaagagaggaccctgcttgattgagccacatccagctgtccaaatgtatgtaattaccatttatcattgaaacatatgacagctccatcaaaagagagcaatgtgtagtctggcagaggacagtaggattaaacaagaatggcttcttttatttaaactcaatgaaaatacaagagggaaaattactttgcttactataccctctcacctgttataagctgttctacctttaggttcttgccctattcctagactatttgaagttgtccttttttctagaacgtccacacatgagttgaattttccatgtcagccatgcagctaatttagaaacatgttgctgggttgggcgcagtggctcatgcctgaaatcccagcattttgggaggctgaggtgggcggattgcttgaactcaggagttcgaaaccagcctggacaacatgggaaaaccgcatctctacaaaaaatacaaaaattatccaggcgtggcggcgtgcacctgtagtcccagctactcaggagactgaggtgggaagttcacttggcctaggaggcagaggctgcagtgagcagagattgtgccactgcattgtctagcctgggtaacagagtaagaccctgtctctaaaactgaaaagtaaatagaaacatgtagcggtgaattctgtgtccagctcaaaatcagcaatttcccttatctcacttttttacttatttcctctttatttacacacatagctcccttagctcataaacacttctgagggcagggaccatgccttttattcttattcccttttcagcttcctaacacaatgctttcagtgtagtagacacttgaacaatatctaaagtgcaattcaaaggggcagctactgcaagtcattatgccagtctagtaatggtcagattacaaatctgaggtttttataccttcaccccctttctcaacttttaatagtaaacagaatagggctgggcattatggctcatgcctatagcccagcactttgggaggctgagatgggaggataccttgagaccaggagttccagaccagccttggcaacatggtgagaccctgcctccacaaaaaaattttaaaagtagccagctgtagtggctggcatctgtagtccgagctatttgtgggaagatctgagacgggaggatcacttgagcccgggaggctgaggctgcattgagctgtgattgtgcctctgcactccagcctgggccacagagcaagacccctgtctcaaattttgaaaaagcggttaacagaacagaattgtttggctcttttatagttttcttcttccaagtagttggtagaatttggatactttctgccccataacaaatgtcactttatataaaggagcatgtccttaatgcattccaaaagacatatacaactgattttaggctaatttcagtctgagtcctggtagagaacacctgacacacttaaattgagaggattttaataatgagactatttgcaaggtgttgactccagctggggacctccacactcagcccactcaggctaagtcttggttgcgcaccagctcagctcatggctgggctgggtatgccccagctcacctgtgttatggcttgttcccaggttcagcagttcccaaggtcttgtcctgtgtctgagaagaatgaggttacactggcaatttaagggtgaggagggtggagaagaattttattgagcggtgaacagctttcaggagcggaggaggtagtggttccccacccctgaagtctggtggtttctctcccagtgtggctgggtgggggcttttatgggctcagaacaggggcatgcatgctgaatggtttgtgggcatgcaaagaaaggctaaagcaaaggcaccactcaaagatgggcatggcagtgtagaaaatcaattcggaaagggtaggtagatgtaaaataggtgaagagtggggatcaatcagaggaaagcctaccaaatgggaagatgggttctcagtccggtccatggatttgacctgtagtgtggctttcaggctttcagttgtctttggcttagaggtggggtttcactggagacccgcccctgtgaggcatttgtctgcctcctgccgctatcagtgtgggcgaagtttctctagaaaccacagggataatgcagtgtccacagctggtaatcaggttaccaccatgaggcctacgacagggagaaggaagggggaggagttgcccaaacctggagaaggaaaggacttactttcaattgagagtccaagactgtccacagacactctcagggtgggagctgggagaatgaatgccctgacctgaccctcccttcgtctgaccttctgcaggcctccccattgattaatagcactgggagccagagagtgagggagcctgttgatgtggttcttacagagccaaaaagtcagagcaggctgggcacagtggctcatgcctgtaatcccagcactttgagaggccaaggtgacttgaggttaggagtttgagactagcctggccaacatgatgaaaccccgtctttactaaaaaatacaaaaattagccaggtgtggtaatcccagctgcttgggaggctgaggcaggggaatcatttgaacccgggcggtggaggttgcagtgagccaggattgcaccactgcactcctgcctgtttaaagagtgt

SEQ ID NO: 6658 - DNA, 486 bp, Homo sapiens
ttgagctgcatggttccgcttatacacggatttttttcagtctacatgtgtgtcaaaaagacagtattcacaggatgcacagcccacttacgcagagggccaactgtgggacttgagtatgcacagatttgggtatatgcaggggtcctggaaccagtcccccatgaatacaaggtacaactgtgtcttttttttttttttttgagacggagtcttgctctgtcgcccaggctgaagtgcagtggcgcgatctcggctcactgcaagctccgcctcccgggttcacgccattctcctgcctcagcctcccgagtagctgggactacaggtgcccgccagcacgcccagctaattttttgtatttttagtagagacagggtttcactatgttagccaggatggtctcgatctcctgaccttctgatccacccacctcggcctcccaaagtgctgggattacaggcgtgagccactgtgcctggccaa

SEQ ID NO: 6659 - DNA, 1369 bp, Homo sapiens
gagcagagatcgggcttggtgttttggggggtcctgggtaggtgtgggaggcctcgtttcgggggccacggggctcctgtggcgtgagactccatcacagtgacctcctgtgcccaatagctccgtaagggcagggtttgtggaaggaaggagtgagtgaccgggaatggggtcttgggctccagggacagccatggcgagggctcttctgtgtgggtgcaggtccggaagctggggctgtggttggtgggggaggctgggtggggctgcttcccctgcagaagggctcttccgggctcttggcgcggtttcacgaggcagtcccctctgtgtctctcgtgccccctaggcctggatcgggttctcaggaagcctcggggaagtgagggtcttagcgccttggtttggggctgggcactttgcgagctggtgtcatggaggccaaactgggggcctccgggccaggtggtggcttcaggcttgctgttgggacaggaggccaggctaggcagtgacgcctcactgagctccatgggtggcacgctgagctctgggtgggagaggcctctcccactgacctctctgtgactggcttctctgctggtctgagtgggaagggccctcagagaccctggaggcctttcctgccctggaggagtcaggcccagagagggtgaagaattgcccgagtcacacagctggtgacagggagagctgggactgtaccttacatcacctgacattcagcccagggctctattccctgcactgtggcagatggggaaactgaggcaggtgggccactcctctgcattccatgggagaggcaggaaattcgacaggagccctttgccgggttggcacttggagctgttttcctgcttgcttttccccagggcaaggtgcttcccagctgaaaactgcctagggagggtgctgttgagaccgtgagcacctgagagccctggtctttcactcaggcctctcctctcacctccacctgggaggctaagctcagggtaggtgtcctggcccacaggcaggtgcatgggctggtcccgccagcacctgcaaccttcttgtgcgcagctagcccaacctggggtcaggtggaggtgggtaagtggggcccccagcattaaagagcttcataggctgtcaattaaggggaggctagtgggctctacaggccacagctacccagggagccttcttaggggaggagttcctaggtgggtctcagagactccaaagtcagcatttcccaaaggaggttcattagggattcagtgcaaaaagagtctcattaacaaaaggatggggaaatgttcagctgtgtttaattcagcaggcttctttcctgcaggac

SEQ ID NO: 6660 - DNA, 1369 bp, Homo sapiens
gagcagagatcgggcttggtgttttggggggtcctgggtaggtgtggaaggcctcgtttcgggggccatggggctcctgtggcgtgagactccatcacagtgacctcctgtgcccaatagctccgtaagggcagggtttgtggaaggaaggagtgagtgaccgggaatggggtcttgggctccagggacagccatggcgagggctcttctgtgtgggtgcaggtccggaagctggggctgtggttggtgggggaggctgggtggggctgcttcccctgcagaagggctcttccgggctcttggcgcggtttcacgaggcagtcccctctgtgtctctcgtgccccctaggcctggatcgggttctcaggaagcctcggggaagtgagggtcttagcgccttggtttggggctgggcactttgcgagctggtgtcatggaggccaaactgggggcctccgggccaggtggtggcttcaggcttgccgttgggacaggaggccaggctaggcagtgacgcctcactgagctccatgggtggcacgctgagctctgggtgggagaggcctctcccactgacctctctgtgactggcttctctgctggtctgagtgggaagggccctcagagaccctggaggcctttcctgccctggaggagtcaggcccagagagggtgaagaattgcccgagtcacacagctggtgacagggagagctgggactgtaccttacatcacctgacattcagcccagggctctattccctgcactgtggcagatggggaaactgaggcaggtgggccactcctctgcattccatgggagaggcaggaaattcgacaggagccctttgccgggttggcacttggagctgttttcctgcttgcttttccccagggcaaggtgcttcccagctgaaaactgcctagggagggtgctgttgagaccgtgagcacctgagagccctggtctttcactcaggcctctcctctcacctccacctgggaggctaagctcagggtaggtgtcctggcccacaggcaggtgcatgggctggtcccgccagcacctgcaaccttcttgtgcgcagctagcccaacctggggtcaggtggaggtgggtaagtggggcccccagcattaaagagcttcataggctgtcaattaaggggaggctagtgggctctacaggccacagctacccagggagccttcttaggggaggagttcctaggtgggtctcagagactccaaagtcagcatttcccaaaggaggttcattagggattcagtgcaaaaagagtctcattaacaaaaggatggggaaatgttcagctgtgtttaattcagcaggcttctttcctgcaggac

SEQ ID NO: 6661 - DNA, 408 bp, Homo sapiens
gctgtgtggcctggctggggcaaggtgggctcctgtggactggatggtggctgcagctgcccccgtggggctcataccaatgccatgcccattccgagtaggcatgtgtttgctcagaactgaggaatctgatttttgtttctgctttttatttgtttctcagggggctggggtgtctggattctctgctaagtgccagtgaccttgaacttgagtggctaggtgctgtgtaggcagagttgtcacaatggaggaggggacagagaaacgcatccacccccaccaggttgctcaccacagggccagcgcgctcttcctgctctgggacactcaccgaggctgaattccacgtggctcccgtggctaggcagatagatgcagctaagggcttaaaaatgtttctatccc

SEQ ID NO: 6662 - DNA, 293 bp, Homo sapiens
ttttgtttttgagacagagtcttgctctgtcacctagcgtgaagtgcaatggcataatcatggctcacagcagcctcaacctgcctgggctcaggcgtcctcccacttcagcctcccgagcagctgtgactacaggtgtgcaccacaaccccaggctaatttttttgtattttgtggagatggggttttgctacattgtctaggctggtcttgaattcctacgctcaagtgatccacccacctcagcctcccaaagtgctaggattacaggcatgcaccatcatgccctgccc

SEQ ID NO: 6663 - DNA, 869 bp, Homo sapiens
acacacacacacacatatatatatacacacacatatatatatattccatggcccactctccccaacatacaaacgtatgcctccaagtcccttggggtggtgttgcgggtccatatggtggctgtacagacagtgggttgcagcacagctgaagaactgacctggcatcttttcagcaagcagtgaacacacgagtccccctactccagggatgggcagttgcatggcagtcatgctcaggtgccctgatctacttagtggcctatgtgaatagttacaggacctgctcactgttacaggatgataagccttgaagtttggcacacttagcaaggactgacaggaacactcagcacccatggcagactacctttcctaacagagacatagagattctgcgaggtctaactcacatatacttgtattccaaggatacaagtggaggacagaaatgaggcagaagtgataagttgaagagcacggccaagaattttccaaaacaggtaaaaatcatcaaaccacagttaaacaagaagacttttggaggctggtgcagtggctcacacctgtaatcccagcactttgggaggctgaggagggcggaacacgaggtcaggagatcgagaccataccggctaacatggtgaaaccccgtctctactaaaaatacaaaaaaattagccgggcttggtggcgggcgcctgtagtcccagctactcgggaggctgaggcagaagaatggtgtgaaccaatgggagaagaatgggagaaccaatgacgggaagaatgggaggcagagcttgcagtgagccgaaatcgcgccactgcactcgagcctgggcaacagagtgagactccatctcaaaaaa

SEQ ID NO: 6664 - DNA, 866 bp, Homo sapiens
atacacacacacacacatatatatatacacacacatatatatatattccatggcccactctccccaacatacaaacgtatgcctccaagtcccttggggtggtgttgcgggtccatatggtggctgtacagacagtgggttgcagcacagctgaagaactgacctggcatcttttcagcaagcagtgaacacacgagtccccctactccagggatgggcagttgcatggcagtcatgctcaggtgccctgatctacttagtggcctatgtgaatagttacaggacctgctcactgttacaggatgataagccttgaagtttggcacacttagcaaggactgacaggaacactcagcacccatggcagactacctttcctaacagagacatagagattctgcgaggtctaactcacatatacttgtattccaaggatacaagtggaggacagaaatgaggcagaagtgataagttgaagagcacggccaagaattttccaaaacaggtaaaaatcatcaaaccacagttaaacaagaagacttttggaggctggtgcagtggctcacacctgtaatcccagcactttgggaggctgaggaggacggaacacgaggtcaggagatcgagaccataccggctaacatggtgaaaccccgtctctactaaaaatacaaaaaaattagccgggcttggtggcgggcgcctgtagtcccagctactcgggaggctgaggcagaagaatggtgtgaaccaatgggagaagaatgggagaaccaatgacgggaagaatgggaggcggagcttgcagtgagccgaaatcgcgccactgcactcgagcctgggcaacagagtgagactccatctca

SEQ ID NO: 6665 - DNA, 104 bp, Homo sapiens
ccagcactttgggaggccgaggcgggtggatcacctgaggccaggattttgagaccagcctggccaacatggtgaaaccccgtctctactaaaaatacaaaaat

SEQ ID NO: 6666 - DNA, 6486 bp, Homo sapiens
cccgcgccctgtgcctcctggggctacctgaagccggtgtcctgggagatctgtgagcagttggtatctgtggggcagagagaaacggggtgagagtggggatggagtgtgggattcgatgtagaagacctgcggctgggacggggctcccccagtgttctcattgacttcaaagcaccagacagcaatagctctctatctctagccccctcccagtttctcctccccactacaaggggcagacctacaactgcagaggaggccaaggcagggcgggcccagtagggccctaccattccagaaccaacaaataggttttgtccaaccgcaactccctccctcaccccaaggcctctgcccctgtcccccaccccgggattggcccctaatcctttcttcattccatcccttctccctccagaattttcagctgtgggttctctagctcagaacactttcccttcccaggggatttcttctcctgaacaactacttcctgagtcctcttcttcaccccaacacgggtcatttcctatcttcccccacacgctgtccatccccactatagctgtctcctggaataatctcttgcacctggctacacccgagcactgctgagacgatcccacttctgctcccgtgctcacagcctgctcaccacaacgtctgtgttgacagggtgtttctgcccggagcccccacccagcctccaacactgtttggtacacagaagccatggcaacggcccccacctcatcccctcctcccacgcaagctttggagcttcctgtttgtgtagcctcagctttctcttctgctcctgactctcggtggtgaggggctgccctacggtggttcccttaattgtgggccgccccccatccttgctgctggctgtggcacctcgctctgtgggctggtgccctcactgtgctgctctttgagaacactccctgtcccaaatctgagttgggaagttctcctgtgttccatctgcacggtggatggagagtccctttgtcttcccaattaaacaccctagccaagaaccctgaagtcctccctgcccccacccatgtccgccttttctttggctttggctttggtgaggtaagcttccagcccagggtctgggtggggccgagtgccttgcgtggcccctccccgtttcccgcctattgtaactccagggtgagggtgagggttgttctcacagctgcagtagcgctagggtttaggttgctccctgccagtccatcccccaggttgttcagctgtcaccttcctttggggtccccagctctgggggtcccccacacctgtcttccagctgggcatatctcttctcaccctggtaggcaacttgcttactgttttctttatgtttgagggaaggcaggggcaggtcccctgggtgtccctagggtgggccttcccagctccagcagccgcagcccatcagcttctgcctgcccgtgggggtggggaagagaaacagctgctgaccaggcctggcctggttggaactgccccttctcaggaccccgccctatggctctggcacctcagagcttgagggcaatggccccagagtggagcagatacactgcagctggaggccgtgaccctgccagctgtgtccaggccccagcgttgggcggtggagggggttcctcagcatccactttccacccagtggtgggtctgggaggccaagtttgtcctgccttggggggttggggggcactggaagtgtctggcttcaggcctttctctctgctcttaaccccagtgtctaggttaatcattctcctgccctttctttacctgtgccatggtgatccccgagcctcaggccacttggtccctggaaacagccctgagcacagccactcccaggagagaggtctggaactgggctgcggaaagggggcttactggtggtagtagctcttagccccttcctcttcctacctgtcttccagccattcccctgtgcatcagaggttagaggtttctatggtggagtggcctctgggaagggcagggatgcttctcttggtttctcctcagaactcagccaccccaccccgcctgccttccccaagctgatggtgtgtgtgcctggcgctgtgggtcggggcccagactgacatttatctggcccagctttcgggctgggggaagtggagggggcgggttgctcttaatgaggtttaaaaataactgatttaggggaggatctgctggaaatgtgcagcttgataagctggggtaaaaaggagcagccatgttggagtcgggacgggagggactggcccaagacacagcctctgcggccgagaggtgttgagggtttgaggcaggctggtccccttgtatttcgcagagccccaaggtccattgagagggggtgacgggattgtttaacctgggtgtgtgggagagggggagctggagtgacttcatccctgaaggccaacctggcctggagccagatgtggttagaaggggtggctctctttcttccccttgaacgcagatgcctgtcctgggggtcccctttcgtgagcagcctgacagctagctctgttttggagaagagagaaaagccaaaccagggtggggatgggacagaaaatggggactgtggcccattcttggttcttggctccccttggcatccataccatgcccgggtcttgctcagcccctgagtgtcagacccaggtggtgagtgtggtgggaacacactgccacagtgaggtccgccaactcaggccattggtcgggaaaccacccagttcttgctaatcaagctcctccaacgaagttaaagaaaccctcctgtgtatttccccgtcttgccttctcttctccaggtttccccaaaaatatcacccagggctcctgtattagtttcctatttctgctgtaacaaattgctacaagcttagtgatttaaagcaacacaaatacagcatcttacagttctacagactcaacaggggtctcactggctaaaatacaggtgttggcagagctgtgttccttctgggggtttttgggtgaatctatttccttcccttttctggcttctggaggccacctgcattgcttggttcatggccctgtgtgactctgacttctacttccattttgttgttgttgttacttctcccactctgactcacctatctcccactttcagttagtaaggcccttgtgattacactgggctcatttagatgatgcaggataatctccccatttcgagatcttaatcacatctacgaagtccctttttgtcatataagataacaatatccacaggttctgggaattaggacatggacaccttttgcgggggcatgattctgcctgtcatagctcctagaggggaaagtagaatttgtttttattgcctggtttttcataggaaattcgatttgtttgctgaaatccctcaaggacctattcaagcctacctcttccagaaagccttcccaggctgcttctgcccgtctgcttcttttaactcctacaacatgtgatctgaactgtgcactttagtattctttgtgtgcaatccttacctgttcatatgtactcactttgtctccctgatggcactgtgggcacttgaggaccaaggacttctactatctctttcacaatccctagcacagatagtaggtgctcaattaaaatccagtggtttgcaccaacctagatggttaaaaaaaaagcaaagaaaacccagaggttgagggagggtagatccaaccagtttcctaagctgttccacattcctcctcctctccccaaatcattctctttcccagggctataaagagcagggttgcatttggtaacagttctggtcctcatccttggggctcaccgtgggggaaatggtgtatatccctgcaggcagaattcctgaattccccactccccaggctgcaaggtgttgaccaaaagcccgggtgtgtcctctccctagctccccgcagccaccgccacccattggaatggccaacaggggacctgcatatggcctgagccgggaggtgcagcagaagattgagaaacaatatgatgcagatctggagcagatcctgatccagtggatcaccacccagtgccgaaaggatgtgggccggccccagcctggacgcgagaacttccagaactggctcaaggatggcacggtgagagccgggccccactggcttggaagtgcagggagagcaggactgggtccagtggactggggattgtttaacctgaagaggagaagactgaaggcacacatgtcccagcctcttcctcagcttgaaggcctttgtcaaggatgtgagagggcccatgctttcctcccttcccgtggagtggagggtaagggtgaatgtgcctcccaggcagtggaagactgaggtgacactgaggaagaatgtctctaaggaaagaactgtgggagggtatattagcaaggaaagactaaacactggcttttcactctgggctcggaggaaggaggctggcaagaaggactgtgaggcttactctagtgaaagagtccaagctgtcttcaggcaagacaggagcctctctggttcattgtctctggttctgagggtggtgtacgctgagctgcgataggtaggcatattctcacctttccacccctgctgtcctcatccaggtgctatgtgagctcattaatgcactgtaccccgaggggcaggccccagtaaagaagatccaggcctccaccatggccttcaagcagatggagcagatctctcagttcctgcaagcagctgagcgctatggcattaacaccactgacatcttccaaactgtggacctctgggaaggtgggacagggcgaggggctgggtcctgtcatccaggaggccagagattgggctgggccctcttgaccaggcagaaggggctgttttctggctccctgcagagaaagaggggtgtgtttgtgttccatggagcacttggtcatattggaggctggaatggagaagggtatggaaatgaacagtagaaataattaggaagccaggcctgctgacttagcgatagaggcggaaccctggtatctaggacactgcggaggctgacacattcccattctccttcccaggaaagaacatggcctgtgtgcagcggacgctgatgaatctgggtgggctggcagtagcccgagatgatgggctcttctctggggatcccaactggttccctaagtaagtattgctgggacagccgcagggtccagcaggtgcattgtttctgcccaatcctgtccctaggaaataacttatctcagtagcagctggccctttacaaagcactttcagaaaattcctcatctcacttaatcctcacaacaccctctgggatggcaaatgactgtccctttggacagatgaggaggtggcttcagagagcttatggctctcgagggcagagctggcaccagcccttgagccaacagcaaagcctgtgctctgtccaaggaagggatttactagggcagcctgtgatctcctctaaccaccactcccttgtcacccaggaaatccaaggagaatcctcggaacttctcggataaccagctgcaagagggcaagaacgtgatcgggttacagatgggcaccaaccgcggggcgtctcaggcaggcatgactggctacgggatgccacgccagatcctctgatcccaccccaggccttgcccctgccctcccacgaatggttaatatatatgtagatatatattttagcagtgacattcccagagagccccagagctctcaagctcctttctgtcagggtggggggttcagcctgtcctgtcacctctgaggtgcctgctggcatcctctcccccatgcttactaatacattcccttccccatagccatcaaaactggaccaactggcctcttcctttcccctgggaccaaaatttaggggcctcagtccctcaccgccatgccctggcctattctgtctctccttcttccccctggcctgttctgtctctgagctctgtgtcctccgttcattccatggctgggagtcactgatgctgcctctgccttctgatgctggactggccttgcttctacaagtatgcttctcccacagctgtggctgcaggaacttaatttatagggaggagcctgtggcagctgctgccccagccacagctgcactgactgtgctcaccacacatctggggcagccttccctggcaggggccctcgtggcttctcattttccattcccttcactgtggctaaggggtggggtgaggggatggagagggagggctgcctaccatggtctggggcttgaggaagatgagtttgttgatttaaataaagaatttgtcatttttgaatggactctggctgtgtctggggccactgtgccactgtggggaagggaggaata

SEQ ID NO: 6667 - DNA, 643 bp, Homo sapiens
cagctgcaagtctggcatgggaagtctacagaagatgaaccaaatagccacaaagtctctgagctaattttgaaaggtggggatttgggagtaagtggggactgggagagctggtcagggtgaggaatggctgccagggggctttgaatgcacttgtttgaagtttgtatctgtaccagcagctgtggaatctgcatgccatgaaccagttggcaggtatagacaatgaacctggcattatgaatagcaaggttgggagcaggtggggaaattgggatttgagaggccagcaagcaggagtttgcaatgttctgaagggttttggtgattagaaaagaacaggtcagctgggtgcagtggcgcatgcctataatccctgcactctggagggccaaggaggcaggttgcttgagtccaggagctcgagaccagcctgggcaacatggcgaaacctccatctctactaaaaatacaaaaaaatatatatattcaggagtggtggtgcacacctgtagccccagctactcaggaggctgaggtgaggatcatctgagcccagggagttgagactgcagtgagctttgatggccccactgcattccagcctgggcaacaagagtgagaccctgtctcaaaaaaaaaa

SEQ ID NO: 6668 - DNA, 2779 bp, Homo sapiens
tttatttttagaaaaacagagcaaagtttattgaaatttcaagctacatttggaaaatcaaaatccaaatcctggaaccatacatcaggataaggtgtcaaaaagtggaaagtgttcactctcacaaaacccgctacagacaagctttctgggcacacctcccaggctccattggatcaaagccatccccttgttcatccctcatccacagtaggacaccatccttctgttcacttgaaagttttccacaataattacaaaacaaaacaaaaaacgttttcaaatgacactgtgaagcccaaactgatcttctctcaaccccattctatgtagtcagcaccagtgaatggtgggtttggcattcaaaacaggacttcacgtttcagtggacagctggggaaagggttgcagcagcaaggcatccgtggccgcattcagaggctggcccccctccttgcctttactctcgagtcttacttaacctaaaagacaaactgggtcaacttggtaaatgaacacagtcaaagacttagccataagaggtaagggaccagtcaatactcccaaggctggttaggcccttcaacatgtaggtggatgtgtatatgtatacatcgctacactaagatacagatctagccctatgggtatatatacgcatttatggctatatagaaaaactatgccaatactaaccaaacagaactttgtaagcggtcatcccaaagctgtaatcccacactgggctgtgcacaaagccatgcattataccatattaaccaacagaaggctgacttggctcaatctctcccatctgtgtcccctgccttcacgaaacagaggagaagagagaggttgcctctgcttaaaacacaagtggcttcttcataggaacagtcgttgtcaggtgaagctgttgaagatgtccatggagatgagaaacagaccccttaaactttctggagcaaactggtgtcacacctcaaactacccttctcctttgccagttgcagctaagttgcccaggccctgggagcccccagggcgcagtagcattagaggctcactggcttggtgttactaggccccatgcaactcagcctccagagacctgctcttgtcaggggtctgtcgctggagtggacccaggtggccatgtccttaggacatctcttggcaccagctgtgctaggtgtaaagttctcctcgtgagatgatgcttggggagccaaaaacaaactggaaagaactaggtaaaacaagtttagtggctctgcccaccctgaggacagagccacttacaccgcagaaccaccaggggcctcgggcacttgtggggattcgggagctggctcttcagggctcagacaggactggaacttctccagctgctctgggcttgccagggtcttcaacagggtgttctcacgctctagctgggagttcttctccaccagctctcggatctgctccttcaggatctccacctcctctctcacagcatacatcagatgattcttcaccagatcctgccaatgagggaatcataacaaagccattccttagccatcgtggcccctctgcagcacctttgctctgtcattggtgtgcctgtgctgtccttaatgccagggccctccagccttccctcagtgaactggtctggcaagtccaattcctcgttcacctttctctgaagcacttaaaccctcattcaggagagctacatgatttggcttatgctggagttgagagcccagctttgaactagataggttctcccctgcaagtttctaatgactttcaaagctggctgctgaggggcctttggggtgacacttctgctgtttgccagtggtttgctatgtccccctttttacataagcccctactgctgccgatccagatctgggggaagggtagacctgcaatgcatcccatactgtttgtctgctgtacaaatcttaaccaagagaataaaattggctattttagagtctcctcccctccatatgacccagcacattgaattgcagctgtcctgcagccggccagttagcacacaggacattggccttggggaaaggtacagaactgccgcatcctctctgaatttgatgactgcactgggggcagggaaggtgtccttaagctccagggcacaattaagtggctcccaaccgctgaagccctaaccctctgcagccattgtggctgctccttggagtatgacctctacctggtaaggagagggacaggggtggggtgcttcgcttcctgtttccacccaactcctgaccccagtccaggctctgcagaggcactgcagtgctgttgcatccaatgagctcagccccttgccagctgcacgatgcacacaaatgcaagagtctgagctccctgcccaacaacaggcccaggagagagtcagagcctgcggcaaagacctgagatggaggagggaggaagaaaggagggagcccaggaagggaagactggaaatgccctaaaaggtgccactctaatcagactccacctccagtgcggataggaggcaggctgtcggcttcctcagggttttggctaagggctttttcacccattccctcaatcctgcccagagttacataagcagcagctaagtcaggggatgagaatgacgcagtgatgccactcaccatggcctgttcgatcttgttgtctatggccaccacgctggctccggaggcactgccaagacaaaaagcaaagcgacccattacccactcggttctactct

SEQ ID NO: 6669 - DNA, 165 bp, Homo sapiens
tttttttttttaagacggagtttcgctcttgttgcccaggttggagtgcaatggtgtgatcttgactcactgcaacctccgcctcctgggttcaagcaattctcctgcctcagcctcccgagtagctgggattacaggcatgcgccaccacactcagctaatttt

SEQ ID NO: 6670 - DNA, 304 bp, Homo sapiens
ttaagtagtaccatgtggctgtggaagtttaacttgtcactaatccaccaaactctgagaagacagcatattttccgtcattcccaaaagactatcacaggcaacattgaggaatgctttgttaaactccagggatatattccacatcacacttcccccgtccaccagattagcaactgtccaaggacaaaacaaaacacacactaaaaaggaaatggggttagtccgatatgtctccatctccttatgctggttcttttgtctgcagaagccacggtttctttttctttttgaaaaaaaaaaa

SEQ ID NO: 6671 - DNA, 133 bp, Homo sapiens
cccagcctctctgtgtcttatgataaaaaaaatactggatgagacaagactgaggaggaagacccagggaccctttttagcagagcttaccagcgggtgtccaaggattgaatttcccttcctagacatgttt

SEQ ID NO: 6672 - DNA, 10474 bp, Homo sapiens
atattattgtggttcaggacagaagacttagtagcatgctcacttaagctaaaacctttagcaaggtttctccagttcccctcttaagaaaattgaaagaccagccaaaagaatcaaagggaaacacgttgagctcttaaagctccagtgcatttaattccttagaacaccacagaatcatggcagcttttcatgatgccagaaggtaaagcacgggggaatacagaggtggagtcctgctttttttcaaatcctaccttctattacagggaataaagaagagagaggcaccagcttcttctcaaacaaaggaactgagtgtaactatattaaaattttagcattttccaataaagtttattcaatcttctttaattagtgatttaagatggtctaggtgatgctctcctatgaaggattctgcttgattcaaagcttttattttcaccaaaataagaattatttcttcgacttcatccctgaaaaacaaaacaaatttctccctttaaaaatgcaatgtatgagggaacagcggtcaattcagaacctgatcatcagttgttaatctaaaacaaaagctttaccttaagccaatatctaaagtagcataaaacacagagagatgctgccatctccacttaattataaagttcaaatacagatcattagtggatgtattctggcaaatttcaatgtgaattactgtaaaaggtagaaaagcatatagtaagtctatcagaaatttcagtagtgctgcgttgctattagcttgtatgagacattgtggtggaagcaatggtgggagtatattcacacatcatgacattagcaaataatacaaatctgattttttttttttttaaagggacttggtcttggctctgctggtcagactggagtacagtggcacaatcatagctcactgcagcctcaacctctcaggctcaagcaatcttcccacctctgcatcctcagtagctgggactcaggcgcatgccaccatgcctagctaatttttaaattttttgttctagagacagggtcttgctatgtttcccaggctgttctcaaactcctgggctcaagtgatcctcctgcctcagcctcccaaagtgctaacattacaggcgtgagccaccatgcccggccaaatctgggcttaaaaattttttttggagagggagttaacaggaataccactgtatttaagcccccaaacagctggtgctgtgaacgaaacattcagaacagagagctagctactgctggataaataccaagctggagacctgtacttaacaactgttgagtctctaaaaatggacaggaaaattaaaaacacatttaaaaagtgcttaataaaatgtttttgatttatagttttaattctatattcccctgtgctatagttttttgaatttgcttaatttgggggagatttacattttaaaatatggatatgcataagccatcccaaaggtaaccataaaaatatctactaactctacaaagttttaacaaatttttaaaagtacagtaaaaatacaaatctttctaaaagttgttgagagcatacagaatccatgaactctctttatagaagtgaaaataaaatatgcattacctgaattcacttctagataatttatgtgcagactgcaataaaaactgaatgaagttttctagctgtggaatagatgtcctcatggcagaattttcaaaccatttttctggtagacatgctgctacctgttaatcaaaacacatggctggtttacaatgacagttatctaagaaatcttgctaatataatctcatagtgatactgtaagctgagtatcattctccccattttatagtttatggttaaataaaaatttctaaagatttccctttgtgtccaaggctacatatattttggaattcattctttaatgctaagaacttaaaatacactactctctatgaacactccctggtagtactagtaattctttctatattcttgtatttgtgagtcattaaatctgtacaaaacataatttacaactaaaaaccaaaaatgtctagacacaaaatatttggtcaatacaactctaaaatacatacattcactattattttataaagaaattggatggcctagcatatgatctatatggagttaaggaaccaaatgggtgattctaagatacaaagaatgaaagataaattaattatgtttttaatcttctatcagtgtaatacattgccttaattgtaaagcagcagaatgaatcaatgtaggtgcattcaatttttcttttggaaatggaaattacattttatcattgtcatcctaagagtaatacaagattttgagaaaagttttggtaaaaacagaaaaatgttagaaaaaatttaaaaagtaaaaaaaaaaaaaacttcctcatagcagaaacaagggtaaagaagggagggaaaaggggagaaaggaaaaaaacttgatattgttcccggagagaacaaagtatggctgcctgctcttgaggtccgaaaacgagatgcagacaattgggaaagaagggaggtcagagtaactcaccagaccaactcaaagttctaagcttttttctagtgcttgtatatatttaaagctccgtgctacgtgtgggattgtaactgcaagtgggagtgttgcattcaatctctatctcatctttagctagggactagggtctggaaagctttctcgagagtcttggaaagtttcttaatcttaagacagaatgaggtgtatgtgtaagaatgcttttattattccatcagatttcaggggctgagaaaacccaggcaggttcttaatgggttggtttttgcattccagttttgtactcaggcaccagtttctccagttttttaatgtttagcttacactttcattaacgttatagtaacgggttcttggaaactgatcgttctgtttgctaatggaaacctggcctgtcacaatatcacactattcaaggaaattcctagataatcatacagattatgctacatttggtaacatcaagatcaatatagaaagcagagagttggggaaaaaattaaaatgcaccctatatattatacagtatattaaataaacgttctggaatgcgctctttctaagattggtcagcatttaaaacatggttgaggaaaaagaattctactccttaatcacctgtttcaactattcaggaaaaatactgacacactgactgcctaaggcagaagatcctacaagttttgttatgtaaactctttttaaaagttttaaaaccaccctttactattgaatgtcatttgcacttgttttccccttgttttgtattacaagtctcagtaaaattctcatttaaccatgtagcttttgcgttaatgatcccagcactaaaagtcgattttcttggcctggttttctaaccatatgctgtggaaagaatgctgtgtaaatatatttcctcttctccacttcataatagaccctatggtcaaaggggactaaactaaacctgaacaacattacatggatgatgatttaaatttttaatatataatgcttaaaactatgatataaaaactatagccagaacaatcatggttggctactaattgatatatagttttatggcagactaggtttccattagcaaccagatgaatcaatttccactaacccttttctataattttgatgaatgtgtaagttaaacattaaagagctagagaaactggtgcctgagtacaagaactggaatgcgaaaacaaacccattaagaccctgcctgagttttcccagatcctaaagtctgatcaaataatgaaagcattcttacacatactctttgtaccagggcccacttaagattaaaaaactttccaagactttagagaaagctttacagaccccagacggtagttagattgtacagactgaatgaaacactctcacttgtagatgcactctcccatgtagcatggagcttagaatgcatataagtgctaaagaaaacaaaacaaaacaaaacaaaacaaaacaaaaaaccaaattgtaactttcagttggtctggtgagttgctacaaccttttccctgtaactggttgcaaaaataagctcctttctttcccagtctgtctgcatcttgttattgggctgcaagaacaagcagatggaccctattctatctgggaacagtttagtgtgtatgtgtttttaattataaaataattattttcccatattcttaaaaattcttcaaaaacataacttttgtgaacccaaaagtatctgagacaggttctgagatttattttcctttcacatttttatcttatgagaagaccatcatgtttttagggatatgtaggtgtttccaactattttctattataaataatgctataacaatattctttgtacttaaaatctatatgtgcatctctaatttttgacttaacttactttggctaagtcaaagaatataagctttaaaagttttgtatccatcatgccaaaatactctccaaaagagctgtatccctccttcccccagtgcaggagactgttttccagaaccactgcactgcatacagtgaatggtgcccctgcaatgatggaactgttgttttcctgtgtttataacactggaaatcgtaagtaaaataacaacgccaaaaaatgtttgccaacacaactggtcaagtaaatatccttcctataaataatttccatttctctgattattagtactattaattattttcacatattttaaggttagttttacatatccttttaggtgactttactgttgcacgtgttttggccatttttagtcagaacatttgaattatttactaaattgtaaagagcttttttatttaatgtgaatattaacacttgttacatgttaacaactttttatttcctagattcttaacttttctaactttctattatacaaaatttcaaacacaaacagcagtagaaagaatagtataatgagcccaatgaacacattccccagttttaataataatcaattaatcccaatacctttttgatccactaaagttttatattttttcaaatttattactttttctcataatttcttcttttgcctttaagtttagaaggaactccctcactctcaaatatagtcatttaccatcttagtatattttatagtttcatttttacattttttaaaattttacctgaaatttttttggtgtatagtgagaggtgaggacttaacattctttttgtaaacagccagccatctagcatcatttattaagtaatttttcctttccctactggggatatttcaaaccagtatactctttcttaaatacagaagagcggctctgcattttagctttgttaaattcatttgtcaatttttttttttgagatggagttttgctcttgtcacccaggctggagtgcaatggcggctcactgcaacgtctgcctcctgggttcaggcgattcttctgcctcagccacccaagtagctgggattacaggtgttagccaccgcacctggctaatttttgtatctttagtagagacggagtttcaccatgttggtgaggctggtctcaaactcctgacctcacgcaatccgcctgcctcagcctcccaaagtgctgggattacaggcatgagccactgtgcctggcccatttgtctatatatgagtaccacacatttaattattttgctaaataatagattttaatagctaaattttttagaaatgataaaattagaatcagtcttccttcacaacttacctggttgcactttttaaccacatctggcccaggtgtggcattgagaagtgctataataaggtaacgatttagcagcttccctagtcctagttcttgcaaggtgtcatctgtaaggagtccattccaaagaagaatattgcggaagagctaaaataaaatatcaagtaaatatgtaccttttctccaaagagaaactgtaatagtctctaacaaacatgaagagttggtcaaactaaaattctcactacaattagccctgttggaactgtcaattttagaatacaatatctctgaataaatacttgattctttccaaactccatgtatttgctcatcttattttcattttctaggataaccatccccaaatctatctcaaataacttcactagagcctttccagatcaataatcttccttcccaatccattttctctcaaagccgggggccatcaagtataagaccacaggaccacgtgattcataaagaactactgtcaaaactagggccgccattaccaacatgtgaccttgagaaggcaatcaacgctgagagcttcattcctctgatacataaagatttataatcacctttgagtttgaagataacttggattaagtaaccataataaattctaataaaatattggttgtcctttccctctactaaattcagatctttctgtgaattttaaggtgtttctttttttgcagtactatattcattactctgagtgctgaactacatgctgttttactaaaatgtaatgctttttcacattttatctcattgttgatgttgttccctcttcccagaaagccttttccctgattcaaccacatgacaaatattaattcacactattaaaactactcttggtgaggtcacctatatccttctaattgtcaaatccaataaacagtgtttcagtctttctcttaatactctttggtggcatttaacactcttttcttcattcttgaaaatctttcatttagcttccttgaggccattctcttgtgatcatcctaaggctcataattgattctacagattccctgaagcctccatgttctcctcttctgttagtatttcccgaggttctgtccttggcctacttctcatgcttcatccagtctccttacgcagcttgccattcatgaccatggctccaaatattacctacaggtagtggactcccaaatctctagctcagatctgtctcctgaaattcagacttatgtatccaaccacctcctagacctctgtatctctatttgtcccacatatatcttcattatgtacaaaatagatcttatcttcccttgatcagttatcgactcctttcaatgcttcctcccaaacattgtttgaaccttcttctccttctcatccctactgccactgacttagcaataattttaaggccaggggttagccaactatatagcttgtgggttaaatccatcctgttgcctgtttttatagggtccgtgagctaagaatggttttaacacttttcaaggacgttttaaaactgtctttaaacaaaatattttgtaccatgaggaaattatatgacattcaaatttcagtgttcataagttttattcaaacagccatgttcatttgtttatgtactatgactgtttttgtgctacagcggcagagttgagtaattcgacagagaccatgtgaccacaaagcctaaaatactatctaattcttatagaagaagtttgttgttctttgttctatagtaaacaggatttttacaaaaattgccttttcatttttgcagtttttgctcacctttaggcctgaccagaactgtctttcttggaactttgaatgaggtgatgttttgttttctacagcactaattagaaacaaacgaaagagaagagaaaatgcaaagaactattagtctttcagaaccagagtttaagatcagactttcttttaaaccaaccaaactaagccttaatggaatataaatagagattgtttattttattttataaataaaatatatatttatttataaaatatatatttatatatttataaatatgtttataaaatatatatttatatatttataaatatgtttataaaatatatatttatatatttataaatatgtttataaaatatatatttatatatttataaatatgtttataaaatatatatttatatatttataaatatgtttataaaatatatatttataaacaaataactaatatatcacattcatacatctgaaccatgtgaatgcattatctaaaacattataaacaaagtttaccaaggcagaatttttacatgtagacatctcatgattcaaaatgaatcagaaagctttgaggttcctttcttccccctccataaagctcctccatcctgtcactactcactggattgctacagttcatgcatcattataactgatggcttcttagcaaagttatgatcatacatcaaatactcgttttataatttaaagtgactgcagaatttacaggtgcagtttctcgttcctcagcattgtgcttcctctgtgctaggccctgttgtgttctgagcattctcttcatctccctaatatcctgtgaggtaggcactaattttatccttattttatagatgagaaaacaagtgcataaaaatacctactaacagtggacgtgtgctctttaccactctatatcacctgctatgttcctaggatatatgtaaaaccaaaaccaaaaccaaccaaacaaaattcatctaagcgccaagataaagcacggctttatgtaagtcactgagaaatatttgttgaaatctcaatttgcatcctcatagagtatgtgtacacatgttttgaaaacactatagttggccgggcgcggtggctcacgcctgtaatcccagcactttgggaggccaaggcgggcggatcacaaggtcaggagatcgagaccatcctggctaacatggtgaaaccccatctctactaaatatacaaaaaattagccgggcgtggtggcgggcgcctgtagtcccagccatgggaggctgaggcaggagaatggcgtgaacctgggaggcggagcttgcagtgagccgagatcgcgccactgcactccagcctgggcgacagagtgagactcagtctcaaaagaaaaaaaaaaaagaaacacaaaaaacaaaacaaaaaataaaacactgtagtttcttttgcattgcattcttaaacaaatctgtattctatgatcagctatttccaacaatctagaaattaacagcgcttacctctttggatacagaggaataaaaacatcatcttctactgcctttttcattcttgaaacaatggatttaagtaaatcctattattacaaatttgaaaagcatcagtgatagaagatagaaatgtatttaccaaaaaaaaagtaattttaactgcagtacaaatttatccacactcacataaccagctgttaaaataactatcaattgggtacaaaaaaaaccttatttatccatgttgctacatatgggtatagttggatcaatttcattgctatatagtattttgttgcatgaatactattgatggaacacttaggtgatttctggtttggtggctattataaataatgctgccataaaaattcttgtacatgtcatttagtatgcatggtcatacatttctaatgggtatataaatagaaatggaatggctggagtacagttcatgtccatacgttcaactacgtacaaaaaaccaaacggtttctagaatagtggcatcccatttacatcattcctgcagtataaaataaatcctgtttcactacatacttacgataattggcattttcttgttttttaatgtttgcaattatagtgggtatgcagtcatatttcattttgttgttttaattctcatttaattatcattgagtaatgtgctgttgggcatcttttcatattcctatttgccacttggcaagccgttttgcaaagtacctaattaagctgcttgccaacattgctatttttttgtattaggttctgtctttttattactgatttgtacaagtcttttatatactccagctgtgggtcctttgttggaaaatccacttagggaaatccattttgtttgtacataaaaaaattggaaatgaccaaactattcaatcacagggaattttaaggagatgttacatcgctccagtgaatctatcataaactttagctgaagattatgatgactacagtaacagacaactataaatacgcaatgagataacattaagcagaagtagtatactaacttacatgcctattaggattataactttgaaaaaaaagccaggatgaaaatatcctacgatggtattaatccttgtactaggatgaaagacaatgagtgtttatttttttcatatattagcaatatttatattatttatataatgatattcttattcatatttgaaaaataaaaatggcatactacacattagagtaaaagttaatttttaagtcaatgacaatgtatacagcacaaattcaactgtcacatactatatactaactgaattatccataaatgtagaattcaaatatatttttctt

SEQ ID NO: 6673 - DNA, 4864 bp, Homo sapiens
cttttaaatcatttaggaaataaaaagtggagttagaaaacagtatgatagtaatactgacttttatatttgtcaatatatttatcttattttggatccttatttcattatatagatttgagttactgtctagtgcccttccatttcggcccaaaggattcccttatgcatttcttgcagggcaagtctaattgtaataaactccctcagcttttgttttatctgagaatgtcttgatttctcccttatttttgatggataattttgccagatacatgaatttttggtaacagtatttttctttcagcactttaaatatgtcatcccactaccttctgacttcatggtttctcatgagatattagatgttataaaatttgaggattcctcattcttgatgagtcagttctgtcttattgcttttcggatttgctcagcttttgtcttttgacagtttgattataacgcggctcagtgtgggtctctgagtttatcccacttagagtttgttgagtttcttggagtcatagatttatgtcttttatcaaattttggacatatttggctattatttcttcaatttttttcactgcttctttcttttccttctgaaatattcttaatgtatatgttggtctgtttgatgctgtctcaccagtttcttaggctgtgttctcttttgttcctcagacttgattattgcagttgcccttctttttatttttttcaagtttgttgattcttctccctgttcagatcaactgttgaactcctctagtgaatttatttcagttactgtacttttcagctccaagatttatctttggttcctttttataacgtctgtgtctttattgatattctcattttgttcatatgtctctttcttcctttagttctttgtccatgttttcctttagctctttgggcttatttaagacaattgtttaaagtctttgcatagtaagtccaatgtctgtgtttcttcagggatggttttcattattttgttttcaatgagccatactttcctgtgtctttgtatgctgtctttttgttgttgaaaactgtatgtttgaacatcataacgtggtggccctgaaaatcagatattccccccttcctgagagttagttttatttttattattgaagattgtagcagtctattgctacatgtgcagtcatttccaaactatttttgcaaagactgtattccttctgtgtgtcatcactgaagtctctgttccttagtttgtgtttaatagtttgacatagatttccttgaaaggagttaaaactagcagaaaaatctctctcccagtctttccagtctttgtagattggttctgtgctgggcttttccattaatacttagccaggcttgtactgagcctaacaatcaggcccaaaagcgtagggtctttgcagatcttgtctgagcatgcttcttgctgtgtatgcacgtagttttctaaatctccctgtatgtgctgttgaatattctaatttcccaaagaaactcctttgcagctttttctcacagaacatagatggttttttggatatcttgaccatagtctttcgacccaggtgtttgcggttgttagttcaccttacacttttttcaagcattgcctactgcttacgatgagtgctctgtcaatcctttaagtagccccagacaggctaccagagacttaaacaagaatttgtaagttctgctcagcttcctctagaaatggggatcagggtccaagacagaatgcagttgctgatttcaagactgctgcaacaccagggagcttgtgggggaagggcaagcagaaatgtcacaaagctttcttgccattttaaagttgcctgttcttgactcagcatttgcttcattgctataaactttttactgtttttcagagttctgataaaattggctatgcctgttcctgctttaaaaaatatatatatattttttagggattggggtctcactatactgaccaggctggtcttgaacttctggcctcaagccatcctctcatttcagcttcccaaagtgctgcaattacacgcgtgaaccaccacacccagcccctgcttgtttttcaatgtgcctactccaccatgttgctcaagtatgtatattttctaaactaccttgtagtgttgtgatgggaaataaatccctgagccttttgaataactcagagagatcaaaaacttagtttatcctattcgaaggattagaaaaatgatatatctttcactttttcagggataggctcctcattagaaggctcctatgtgccgatgctgtacaagacatttcatttctcttaatgtttacaacaagcttgttgccaaggctgatcttgaactcctggcctcaaacgatcctcccagctcagtctcacaaagtgttgggatgtctggccaactaatgactatcttaactcttgtgtttcaatgtttatgccttcttttatcttgactgattgtatgactatgtcttctagaacaatgttgaacagaaatggtgagagcagacatccttgctttaatatttcaccattatatatgatgttaggtatagatttttctcacagatgccttttatcagattgaggaatttatattcctactttgccgaaaggtttttgtagtatgagggggtgctgaattttgtcaaacactttttcggtaataattgagatgattggttctgcagtcatcgagatgtggattttctcctttattctgttcgtgagtgattacactggttgactaatgttaaaacaaccttactttccaggaataaaccctattatcttttttatacattgctggatttgatttgctaattattttaaggacttttatttctacattcatgatagatactgctggtattttctcatgatgtcttttgcaggatttgtatcatatatggcatttctgaggtatacctaagtatcatttattcaaggacctaagaaatggaaaaatcaattgaggtgatttttccatcatgaaaaaaatttctttaaagtcatctgtctgattctgtaaaaatttcacattctttatgtgaacaaaaagctgaaagaaattcagggaaagaattaagatgtgatatcaattgccaacccaatgttttgttcttgctagttgtgttccccctccttattccatccatttcatagtaataagaaaaaaaagaattttacattgagatttaggtaaatttttgaattacagtatatgataaaaaccttaacgttcaaactccaggtataatgaaatttaattgaaaattactatagcagtttaagtcaatttgtagttttgaaagcagttttaatattttatcttccacaaaaaggtaggaaagtttctgtgctgaacttaaatatataaaggaacacgtccaacatatttagttaaaaatccaaaagtcagaggataatttccaaatgtgtacttaaatagaaaaaaattacaaatttcatgtgcaataaagtgtctgccacttacgtaaaaaaaaaaaaaaaacccaaaactatgtacacatagaaacacgtaacatttttgtaaatagagaaaaggtctaaaaggataacattaaaatgaaaacagcagttatctctggggacagcggttgtgtggaaatgctaactgcttttcaacaatagtttgcattttctagatgagattctatccttgtataattttgttactaatataaacatcaaaaaattcttcataccagtgaatcacaagtcctcactgcaacagacataacaaatccaactcctaaaataaattatatgtagttttgaaggtagaggtgacataaaagtaggctgtatattcaaatcctacaatatattcaattttttccaattatcttttgaacaacaatttgcaaaatatatttacagtttcccttaagttatttaataagtagacttagaaaaattactagtaaactaacatttttggaaaattttcttaatttcttttgattaaattatcttgcctctgttttattagacaaatattttatcagaaaatgaatcacatgttgtgagtatttaaaatatctgtttccttcttagtcctaccaccaatgacaaaaaaacaaaatagtaacttgctaataagtaatgacttaatgcttcaaaaaacatcaacaaatttaaaagaaaggccaaacatggttgctcaagcctgtaatcccagcactttgggaggtcaaggtgggtagactgcttgagctcaagagttcgagaccagcctgggcaatgtcacgaaaccccatctctacaaaaaattacaaaaatcagctgggcatggtggcgcatgcctatagtcccagctacttgggaggttgaagtgggaggattgcttgagcccagaaggcagaggttgcagtgagccgagattgtgccactactctccagcctgggtgacagagccagaccctgtctcaaaaaatacaattaaaaaaaaaataaaagaaaaatggcaaataaggaaaacttctgccacaagcatgggcaaaaaatcaatatctttaaaaatataaaggtcttaaagtccataagaaaaagatggatatttcagaaataattacaaatggccaaaaccaatatgtttactctctaatagccaacacaaaatacgctattaaaataagatttttacctttcaaattttcaatgcatttttaaaaaggataataactactgctggtagggattcattggcactcacttatgcttatgttggtacattaaattggtacagatttctgaaggataatttgacaatcggcacatgccttaatcatttaatacttagca

SEQ ID NO: 6674 - DNA, 752 bp, Homo sapiens
ctgagttaggtgttcatgatacaaaaaaagctgctttgatttttttcatttaattttaatgattttggatgctggccttgacaaatgttcccatattgtttaaattttgtttcttaaaatagttctattgaaaatgttataaaggacattattgaatcaactggcaaaagtggaatatggatggtagattaagtgttgataaatttactgaaattgctaactactctggttatataacataatatccttgtcttaacaaatatgcaccctgttctcagtactcaggagaaaacatattgtatgtatatatttaaaatggaagggctaatgataaagccaatggggcaaaatattaatgacaagtaaatcttggtaaagggaatatggaaatactactcttattcatgaaagttttctttcaaagtattaatatttccaaataaattgtttaaaacaaaacataaattcactggccggttgccgtggctcatgcctgtaatcctagcactttgggaggctgaggtgggtgggtcacttgaggccaggagtttgagaccagcctggccaacatggtgaaaccctgtctctactaaaaatagaaaaaattagccacacatggtggcacatgcttgtaatcccagctgcttggcaggctgaggcacaagaatcgcttgaacacaggaggtggaggttgcagtgagctgagattgcaccactgcactccagcctgggtgacagagtaaggttctgtc

SEQ ID NO: 6675 - DNA, 102 bp, Homo sapiens; identical to SEQ ID NO: 5404

SEQ ID NO: 6676 - DNA, 105 bp, Homo sapiens; identical to SEQ ID NO: 5457

SEQ ID NO: 6677 - DNA, 160 bp, Homo sapiens; identical to SEQ ID NO: 5619

SEQ ID NO: 6678 - DNA, 15962 bp, Homo sapiens
ccagtgtctgctcttttcgatccgggacggccggtcaggctcgccgccgagctggtaggggctgggggcgaggggtgcgggaaggtgaccggggcactggcgggcggcgccgcgcgcggccgggggccagggtccgagcagcggggtgggggcggggcggtggccgggagcgcggggggtgcgggtcaccaggccgggccggcggcctggaacgtgcggcgccggggagaccgttccgccgtgctccggccgtgcgcgccggcgcgaggggcgtccgggccggccgcgggggcggggaggggaggggccctctctctccccctccccccaccgcattcctctgacgttgggacggagcgaccccgcccttcgtcgcgaccggcccggcctcctcccgtcacgcgggccacgtgcttcagacgcggccccgcccccgtctctgttccgttggcgtggtcggatcttcctggtgtccgggggagctgaccgaggtccccagcaaggccccctcccctaactttatttcccctcaccggcagagccaccaggcctgtcccctcttgtattgccataaaccccattttttctgatagggtctcgctccgtcgcccacgctggagtgcaggggcgcgatcacggctcactgcaacctcgaaatccggggctcaagcgagccttccgccttggcctccccaagtgctgggattacaggtgtgagccaccacacacggcctccatttcaaacttagtttccacccggacctcaactcgaaatcccccatcagccgggcagaaaggtcctggagcacttttggggcgtccgccgcgtttctcacgacgctagcttcgcttttatttcttttcccccctttggcgatatcgtcacttgccaatagcttcgctaaggtgttcccccccacaccctgcgcgggcagccccataatgttaaatgccgtaggacgggatcccgggttaatccccgtttgaccccgctgcctgcgcgtgataactggggcgcgctcctctccaccccccaggctccgccagttgggcttcgccggagtctggagataccctccgacattctcttggtgcagtgcgggtggtcttaccccgcccttgaggaagaaaggcccgacgcaggcacagatcacaagaacgcctcccctgtgcagggggcttgcactgtgccaggtgctgtactgggcgcttggtaggtggccaccctctccagggtcggggccaggacctcctgtggtgctcagaggggtcgagctgtcaggtgaaaaccactggcccgagttatggctttgaagggaatcctgggggtctgggatggcagggacctgttaatttagatcgcacggacaagatgacttggcccttagctcctgcaggaggggtagtggactattgcaggtggaagggactgcatgggcacacatggagagtgcgcggaagagccttctcccaagggaaactgaaaggggttgcggctgaatttagaactggacagggtccgaagacagtcggcagcagcgagtggttttctactgaggaaaaggctcagatttgggattttaacaattcctcctagaggtagaaatgaacacggtatagtgatggcgacagagataccctgggagttcctgtcaatcttggtctagccttccggcgcacacacagcggtcgctccataagggggccccgcctctgggcggtgcctgaaagcgtatttgcgcatgcgttctcgccttcgctcgtttcgtatactgcaccaaagagcgcctaccctggggcggggctccccatttcatccaatcagagcgtatcaacagtcctaccatctggtgagagggtgcgctccactctccattgaccaatcagtggagacgcagaagaatgggcatctgtaaccaccactggagagagaccaaaaaagggcggggcttccttgtctccttgcgaagtggcgcgggaaggtcgtcattgtgactggtgctgacggattagcgaggagaccaatgaaagtgggagggaggcggagattcttgggaggtttagagcgccgttcctatcaggtgcttttagggaggccagcagcgccagaaatccgacctatcaaattggattttattttaaggcggcggggtcgacggaaagactggcagaaagcgaccacctataaggagtgtctcagacaaacaagggcgggccctcctgcagaacggcgtgggcaatgtccaataagcgcgcaaggcgtgtggcggcctaccctccccccgcggcgggaccagtggctccccctatcgggtgggggcggcgggtgacgggcgtgtccctcccccaatgagaggcggggggaggcgggttctgcgccgccatgtcgcggaggctgctgccccgggcggagaagcggcgtcggcggctggagcagaggcagcagccggacgagcagcggaggcggtcgggagcgatggtgaagatggcggcggcgggcggcggaggcggcggtggccgctactacggcggcggcagtgagggcggccgggcccctaagcggctcaagactgacaacgccggcgaccagcacggaggcggcggcggtggcggtggaggagccggggcggcgggcggcggcggcggtggggtgaggccagggccctaggcgctgggaaggccgggaactgggggacaatttcccagcttgagggcattttattttttgaggggggcctctgcgcacgcgcccaggccatcgcgtcgttgacggtgtgggggaggggcggccgttgggcaaacggcggggtttgcgcgaggacaggcgcctgcgcgtgcgcggggtccggagcggggtgtgggggagcgcagaggaagtagctcgtgaggcgaatggcccagtgcgcaggcgccgcgggctggcgtgtgggggccgggcacgcggcccggccggtttttttcccctttatcattttcttcgctggctccatgcgcaggcgcagtgttcccgcccggcctcgtgggcggttaggggagcgcctggtgagcgggaacgggtgggcggcggccttgttctctagagtggggaattccgtctgatggcagcttaatctctaaggcccagccttgtgtctatacagaaatggatgtgtttgagcctagatgctctcatttttgtaggcattgaaaatgggaagaggacttgtgaaatgcacttttagccttttaggagttgagcgaagccttgaaaccatcacaagtttgcttacagtttccggggattcactgggtaccgaggatttgataaaccaaactatttcctggccatgttggaagcatttcgaccccctgtaatcagtccctccgaaaacaccagtcgttgcttttggagtggggcccagtccccactctttccaaaatcttgaagtcttacagggccgcctatttgcagggttttccagggtttaggggttacgagttgctagcgttttaatcttggccttgtcccacacattttaaagacatcttaattgaaaatccttaacgcttcctgaggttgggggagatactgggattcccgatttacaaaggaggaaatgggccaggagagagatgagatgaggtgaattactgtaggtggcacagctagtgaggggcagggctggagttagaactcccatttgtgggagctgctaacctggcgggagtgcctcaccctgtggttcgcgtggatcgctcctgaaatagaatccaattctacccaccttccacgcacttctgcccagtgattctcagacagggggccggccccagagcccaggagaggcggaagagagttaatctttctcctgatgaccagaggcttttgtcggtgggtgtaagatacttctcttaggaaggagcagtcggttcttaatggtatgggttggagtctctggtctttctaaaagactttccatccgggagtgggggctcatgcctataatcccagcactttgggaggctgaggcaggcagattacctgaggtcaggagttcgagaacagcctggtcaacatggcaaaactccgtctctactaaaaatacaaaaaaattagccaggtgtggtggcgagggcctgtaattccagctactcgggaggctgaggcaggagaatcgcttgaacctgggaggcggaggttgcagtggactaagatcacgccatagcactccagcctgggtgacagagtgagactccatctcaaaaaataaataaaagacttttcttgtctggtttttcttagtctgacctaggcagtaatttccaaagcagattttggtgggagggcgattcaagactagaaggggtcaagactggcctggctgccccagtttctggggcatgtgttgttttttgccctgactgaacctgggtgtgagtggtggggaacaggtgtgcttagctagatgatggtggctcagccagttaaagggcaaggaatttggggcacatgcaaaggggatgtcctcattcaaactgtagcagatagctgttagagcccttgctgccagtgtatctccttttccagctactcttttcccatgtttccttggtcgagtggaccagtgggaagagaggggggtccctggaagaacgtaagatttgggacttgtgtggccctccctccgttataccttcctcagaagctacagcaagagccagtgggcaagtgatcacccactcaggaccactgttctgctgacccagaatccttctgggctgattggcttcaattgctgcccctagtctttcctgtgcatccttcacggatgacctccaactgttttatctgactgggtctacaacagtacagaggccagtggggcgtcatcttgtacagcaagaaaataattcttgtttttgcttcctttctcaggagaactacgatgacccgcacaaaacccctgcctccccagttgtccacatcaggggcctgattgacggtgtggtggaagcagaccttgtggaggccttgcaggagtttggacccatcaggtactgggctcagaggccaggtgttgggcttccaaagttgactcctgggtgtccttgtgtgtccacgatttctggttggaaatagtgattttgttgccatcctggtctagattctgtggccgctctgcttttgggttggccattgtactttgtgtcagattacagcaagttccatgaccctttttccttccttcgtttttcctctgccttgtagtttctagtcagtgttctctttttcagacagagcaaggtctcgctttgtggcccaggctggagtgtagtggtgcagtctcacccaggctcaggcagtccttctgcctcggcctgctgagtagctgggactataggcatgcgccaccatgcccggctaatttttacatatatatattttttgtttgtttgtttgttttgagacagtctcttgctctgtcgcccaggctggagtgcagtgacaatctcagctcactgcaagctttgtctcgtgggttcacgccattctcctgcctcagcctcccgagtagctgggaccacaggcgctggccaccccacccggctaattttttgtatttttagtagagatggggtttcgctgtgttagccaggatggtctcaatctcctgacctcgtgatctgcccgcctcggcctcccaaagtgctaggattacaggcgtgagccactgcgcccggcctaatttttatattgttctgtagaggtgaggttttgccatgttggccaggctggtctcaaactcctaggcccaagcagtctgcccacctagccctcccaagttttagggttacaggcatgagctactactgctcctggccagtgttctttcattcagcaagtagttactgaatatttggtgcatgctatatactgcaaatacagtagtgagctgtatctggatgcttctcttagaaagttgccctcctagagtgatttgcactgtcatagtgtaagctcaagaagccgtctgtgggtggcatctgacagtctggtgaggagaggtcaggaaggcttcccagagggacatgatggctcagctagacctctttggcttttggtactacttgtggcacagggtgttcaggtcggggaaccatgatagggttgcagaggagttcagaggccatggaggagtcagttctcaaaaaatcaaatgataccctcctcctgtctacattttcctgagaggattgaaacctgtgttctctctgccagctatgtggtggtaatgcctaaaaagagacaagcactggtggagtttgaagatgtgttgggggcttgcaacgcagtgaactacgcagccgacaaccaaatatacattgctggtcacccagcttttgtcaactactctaccagccagaagatctcccgccctggggactcggatgactcccggagcgtgaacagtgtgcttctctttaccatcctgaaccccatttattcgatcaccacggtacgtgccagcaggcatttcttgtgaggtctcccttccttttctccccttattccctcccccaagccagactgatctgccagtgccccttcatcttgcctgtgtttgcttttgcaggatgttctttacactatctgtaatccttgtggccctgtccagagaattgtcattttcaggaagaatggagttcaggcgatggtggaatatcctttgctggaaaacaggtgttccttagggtagggactcttgcagggcttgacagtggccattctttgagccagcatgtgtctgctgaccacgggagtggctgccatgtgccagatgccttcacagagcccagtgactgagtagggaggcagttaaaggaccaggcatatcgtgtggacgtgcagatcttaggggagagagcagtgtgttgggagatacaaaggaatttatttttctttttgttttctttctgttatttacttatttatttattgagatggagtttagcccttgttgcctgggctggagtgcagtggtgcgatctcagctcactgcaacctctgcctcctgggttcaagcaattctcctgcctcagccttcctagtaggattataggcgcctgctaattttttttatttttagtagagatctggtttcgaactcctgacctcaggcaatccacttgcctcagcctcccagattacaggtgtgagccaccgcgcctggctaggaatttatttttaaagatgtttattctaagttcaaatatgagtgacaaagatttggggaacatagtctcaagaggtcctgagaaaatgtgcccctgggaaaaggaatttatttaaaaggggatatggggccgggcacagtggctcatgcctgcaatcccagcactttcggaggccgaggtggacagatacctgaggtcaggagttcgagaccagcctagccaacgtggtgaaaccctgtcgctaataatacaaaaaatagccaggcatggtggtgaacgcctgtaatcccagctactctggaggctgaggcaggagaatcgcttgagcctgggaggcggagattgcagtgagccgagactgtgccactgtattccatcctgggcaacacagcgagactccatatccaaaaaaaaaaaaaaaaggtggggcatgtgtgaaggttgctgaggaggtgatgtcctatgagcaaataggagcttatactcaaggtggaggaaacagcctctgcaaaggttgtaaagtcagaaggagcttgtgttggatggagaaattgaaagacctgaggattgcaaagtggctggcaagcagacgggtttggaatagacattggaagaagcttttagggcatcctagacagcgttgcgatgcttggggcaggggcaggaaaaagccactgatggactttcagggcagagctgtaatcgagttgatgtttcagatttagtcgaagggtgtgagagggctgagacggagaaagtggtgtggcagaagaggttgctggtggccatgggtcggggtgcagattatgagagaactctggccagtgactgctcacccggggcagcgttgagtccatcaacaccgttttggtctcttaacctgaggctagtggctgggcagtgagctaatcccaaagcttccgtctgtaccacagtcttggggtgctaccttgtccttatcacactctggggtaacttgaagcccttctcaaagatctcctgtgatgggactttccttaacttgactcacatttgactcagttcaaagtgcccagcgggccaaggcctctctcaatggggctgatatctattctggctgttgcactctgaagatcgaatacgcaaaggtacatctgggaggtgactgactgccccttgtcagcttccaggtgagctggggcatggctgacctcaagtcttgtcttgtcctgtccttgcagcctacacgcttgaatgtgttcaagaatgatcaggatacttgggactacacaaaccccaatctcagtggacaaggtaatcttgacgaccactttgttctaaacatacccgccttgctttcactcgactagtgcacttaataggcctgggctcagggttatgtaatgccattgggccccccatggacatgggagggccttggggtcagcacttggacaccctagtgggatgggggagtgagaggcctccatgggtcttcactgctgcttggggccctccgatgctgctcaggatacagaggcaaggcagaagcctggatgggcggggagcagggcctcactgaggatgaggcgtgggggcggccttagaaaccagcagtggctcctttgagagtctggtgagggtcactcactccattcttgctggaccaggaattgtcctcttgttctgcgctgttgagagggtctgatttgggggagtgacagtgttggggggcgatgaggtctcctgggctcttgcagtgagccttgtgagcaagctgaccctgtggaggtgagacactctggattggaccagggcggacatgcctcacatcatttgtagaggggacgcaacatctctgcaggtggcccaaatggacaactcccttcctagtgtctgtcaagaatggtttgcctttggtagcagggagaggtggaggattgcctatgagaaacagcggcagccccccaacaagaccatccatctcggtgtctgtcttggtctgatacgtcggaccaggccatgggctgagggaggaggctcgatgctgacatcgcacaggccctgagaggccagagccccccattcctaggcaggcctgtcttgctcgcccttgcatctgggaagcagtgggcagggtgggctagactcttccccaggatcctcacagtgggccctgtgggcctggctgctccctccaaaggtcagaggcaaattggtgaccaagtgaatgtaccagagcgggcaatggcattacatgactgctaacagaaacatggcaacaaccatttcttctccaaggaacataaatagaagatgtgcagaccggcaggggctagtggcagggggctggctgtgcattggttttgatgcctctcagctttggcagccccaaggctggggcccaaaaaaaaacgagggctgatgaggtgacctggagtgagggcggtgcttcgccacccctcaggaaccatacttcagcggctctgcctctgcacattgctcaccaacacacagggtagaaaaccactagctcttcctggagagaacagaacatgcagcctccaccacgtccccagaaacagccgcagacttgagctcactacatcaagaacaccacaccgcgctccaaggaacagctacaagcacagagacagaggcatacagagacaaagagagaaagagacgcaacatggcagcagacactgctttttttattaaacattaaaaaaaaggtcaaaatccaagcaaacttgaacccgagaatgtacacagaagtaggaaacacagagaacagagctgtcccagccagccagcgagcgatgctcttttcggagaacgtttcatagacggaagtagattccatgggcctccaagacaataggatcctctctccattcctcgccatatgggttttgttttttaagtcatttggtttggggagggccttgttttttttctgttttgatatttttattttttctgcagtcaccggctgccaacataatctgcaccaactggagatcagaaaccaaaaaaaaaaaaaaaaattttaaccacaacaaaaaaaaaatcaaaaaaaccaaaacagacctaaaaccagacagccaaacagctcagaggcacacagttacctgctgccgggtaaccaggcgcgctcccaaggccaaaagcgcgagcgtagtggggccactggcacacctcataccaggagacacgcacacggagcgctacacagccagaagcaccgcaccaccgcactgcagcacatatgtgaggaggtgacaacatggagggacactacccacttcatacacctttatttccacttttctgatatcttctgaggacagaacatctgtgagccatttttgatttaatcaaaatattgacttttaaaacaattctttaaaaaaattgtagcggatgtgtaccgtgacttgtatttatgactgtaaaaccatgtgatgcagggtcgcagtgtatgtttgatgggacgccatctttcagaactgtgctaactcactgttgaagcgtccaatggtaagagaaaatacagatttgttttttgtgacaaatggacattgtactctgtacttctgctgtaagtagtccttttccattttgtaatgactggtaacaaaacccaggccgggtggcaggaaagggcagtggtttcgagccctgggttttggagtcagccagacctgggttcaaatatggctcagccactgtcttgctttgtgactttgggccaaagtgtcttttaactgctcagttaaaagttaacaactcagtcttcttatctgtaaaatggggctgaaatatcagaacctacctcatagggttgttgtgaggaatttcagaagctgtgatgtctgtaaagcgcttagcccagtgcctgccacttaagcgctaagttaaaggcagtgattacgaactgctggggtcggggtggatctgcgccattgctgggtgtgggaatgtcgatgccttgtacatgattgcttatttgaactgattctgctgttgccctgcttgtcagctacagtcagtccctcttgggctggcgggactgggagggaggggggactgggattaagaaagaagggatctaacagagacagtctggagctcctagaactttgggggctttgggggtcaaacttgcttgcttccctctggggttattttcctcttaatctactctcccttcattgggagtcactttagaaagctgcttttggcccgccataatatatcagcttctgtagcagctgcacattccccagagggcctgggagctgggctttctcccagggccagggtaggtgagagcacagaatctggccttgtccttcacagaacaaggccagccctttggtatgagcaggggaaggagagtgggcaccagctttgaggctcgggcttcatgcccgccgtaggtcagatcacaaaaggaggccccacagccctcgaggaagggagggcttgcagttggcaggagctgggggctcagatcagcctgtgcagtcaggagggagggagagaccccaatttctgagtgagactcctaactgttttctctctccacaggtgaccctggcagcaaccccaacaaacgccagaggcagccccctctcctgggagatcaccccgcagaatatggtgagggcagggggttcccctccgtggactcccgtggctcatgtgcccctgcccgccgcccgccgtgcaaattctcacccgtcctccctctctttccttcccaccccccaggagggccccacggtgggtaccacagccattaccatgatgagggctacgggccccccccacctcactacgaagggagaaggatgggtccaccagtggggggtcaccgtcggggcccaagtcgctacggcccccagtatgggcaccccccaccccctcccccaccacccgagtatggccctcacgccgacagccctgtgctcatggtctatggcttggatcaatctaagatgaactgtgaccgagtcttcaatgtcttctgcttatatggcaatgtggagaaggtgagctgctgccgggccccctgggttcctcgctgagcctcgtatcttgccagtcagcacgggaaagaaccaggggggagcctggtgtggcgctgggcgggcagacgccaatgagtgactcagtgagctcaggcagcctgcttgcagacgggttttgtttggtcctcactgtatgtgggtgttgtgtttttgaattaccaatgtttaaaaaaaagattttatcacataaaagtactaataccagtacatgaacatagagatttataaaacataaaaatgaatccattatagtgaaacaccatcgtttaaggatttcctcctgaaaacttaagacctggcaacaccgggccttctgccttcccatgggacagttgactggggctagcggtggctgagtgtctacctgagaccaggcggcattttgcttaacattaaacccgtctgggtcttgggggcctttgtgcagctcatgacttggcccattacttagagtagttcgtaacacaggtgaagtgttgttagttaccaggcactgttaaagatgctttacatgtagtgacctgtgtaatttctcacattaatccttaatgagatggacaggggaagtggaggacggggcttaaataacgcgcccaggttcacatagcctttatgtgaagcaggactcagagccagactgcctggctccagagccggcactgctctgttgtaacccagctgaaggagtattttaccttgtgactgtagacacagccatccatagatcacacacgtctgtgtgtaacagacaaaatggtgaaaatggctgatttgatttctgattcctgtacagttttctgtcatgcttcactaaatgatttactggtgggttatgtcccacagttaaaaacatggcccaggctctgcttctcactatgggttgagcacttggtgtgggccaggcatgtttttctagtggtcccgattaactgtgaggacatgggaggccagagcaggggttattatcactaacttgggaggggcaggagaggggaccctggcagctggacagaggtgctgactgcagctactctccccaaggtgaaattcatgaaaagcaagccgggggccgccatggtggagatggctgatggctacgctgtagaccgggccattacccacctcaacaacaacttcatgtttgggcagaagctgaatgtctggtaggtgctcaggctcgggagggcagcagaggtacaggggagagaaaaggaggggaatggggcccagcagaggagcacagtgaggccgaggtgttgactcacacagaaatgggatgtggcaggtgtgttcccagacgtgtctctgacaccacaggagaaagtgagtcagccttgcctcaggtgtagagcaatgccccaaggcacacagggcaagctaagcctctggaggccacaggggaaagcttcagggacaactttgggtatgacaaaggctcccctttcttccttgctgcagtgtctccaagcagccagccatcatgcctggtcagtcatacgggttggaagacgggtcttgcagttacaaagacttcagtgaatcccggaacaatcggttctccaccccagagcaggcagccaagaaccgcatccagcaccccagcaacgtgctgcacttcttcaacgccccgctggaggtgaccgaggagaacttctttgaggtgtgtgccgtggagctgcgcaggcagtcgggtccttgccacggccgtctgagtaggccattcatttcagtcttttctgcaaatagctgttgaactcctgtcctgcctggccctgggttgagtgctagggacacagcagaggccaggacagataggaatctgtgctctcaaactggacagggtgagaatggcaccaagtttctagcaacaccatttgccgcgttccttccttttacatttttggcaagcagggcaactgctcgtttgctgggaaagctgcttcacaggcccagtgatgagggcccaatttcacaagaaccgcattggcgtaggcttcgggtgccatcaccctgataccatcagaaggtggggccctgtaaagctcagtcagggggaactgaggcagcggaagggaggaggaactcaagtggatctggctgtggtctgaaatgttgaccttgcattcagcaaacagtgttcagcaaacagccgggtgcagatatccacatagctgttgaagttgggaacgaaaaagcagcttcccagtctcaggcaacttaataattaaagagcattgttgctggcctttttatgacacagggatgccttagggtatgtgataaaatctacaagccttttctcctgaaaacttcaagtactgagtcatgcagggcctggtctgcttgaatcctgtgtggcggcccttttgtttcagagttcatttactacctgttttcttttgcagatctgcgatgagctgggagtgaagcggccatcttctgtgaaagtattctcaggcaaaagtgagtcgagtgtgcccacctccttgccctaattgcatggtggttggtgggcagctgcctagttcctattgggtgagtctaaaacctttacttttccccttggtttgcaatcaggtgagcgcagctcctctggactgctggagtgggaatccaagagcgatgccctggagactctgggcttcctgaaccattaccagatgaaaaacccaagtgagtatctgtgtgtcctgcaggcatcaacctggtgacctaatgggttggctggcttcaggccagggatgtccttcctgcccttgagataggaccccgggatcttcgcactgttggtgacacaggcaggtgggacctgctcatcaggagagcagcctgtgctcctcttgggagagccagcctgactgcctgctgccactcactctgccagcttgggagttgctcaggcttgtcctccagggaggtggcattctcttctttgcatcagagactggcttaggtaggaaagccactctgttacctaggaaagaggcaacactatccagcaggtaaaacttgcccacccagttgctgggagaggcccattgccttgggctggcgaaggagataggaatgggattctctatgggaatgaaggaagagaaggagaaacgccgtgcataattggtaattggctcatcttgaagcctcacgttgggcagtcactccttagacccctgccgttgacctgcagaaaatgggagatgggtacaaacttgaggggacctgggtttggggagcctccaaagacgggaaccaaccaaacttgtctctcctttgcagatggtccatacccttacactctgaagttgtgtttctccactgctcagcacgcctcctaattaggtgcctaggaagagtcccatctgagcaggaagacatttctctttcctttatgccattttttgtttttgttatttgcaaaagatcttgtattccttttttttttttttttttttttttttaaatgctaggtttgtagaggcttacttaaccttaatggaaacgctggaaatctgcagggggagggagaggggaactgttatctcccaagattaaccttcacttttaaaaaattattgtacatgtgatttttttttttcctgttcatacatttgtgctgcccatgtactcttggcacatttcaataaaattgtttggaaaataaacacagca

SEQ ID NO: 6679 - DNA, 180 bp, Homo sapiens
tgtcacccaggctggagtgcaatggcataatcttggctcactgcaacctctgcctcctggttcaagcaattctcctgcctcagcctcccaagtagctgggattacaggcatgtgccaccatgcctggctgatttttgtatttttagtagagatggggtttcaccatattggctaggctgg

SEQ ID NO: 6680 - DNA, 261 bp, Homo sapiens
tttttacttttatttatttatttttgagacggagtctcgctctgtcgcccaggctggagtacagtggagcgatctcggctcactgcaagctccgcctcctgggttcacgtcattctcctgcctcagcctccccagtagctgggactacaggcgcctgccaccatgcccagctaattttttttttaattttttttttatttttagcagagacggggtttcaccgtgttagccaggatggtcttgatctcctgacctcgtgat

SEQ ID NO: 6681 - DNA, 776 bp, Homo sapiens; identical to SEQ ID NO: 5231
  SITE (709): n equals a,t,g, or c
  SITE (738): n equals a,t,g, or c

SEQ ID NO: 6682 - DNA, 878 bp, Homo sapiens; identical to SEQ ID NO: 5232
  SITE (741): n equals a,t,g, or c

SEQ ID NO: 6683 - DNA, 150 bp, Homo sapiens; identical to SEQ ID NO: 5233

SEQ ID NO: 6684 - DNA, 845 bp, Homo sapiens; identical to SEQ ID NO: 5234

SEQ ID NO: 6685 - DNA, 10714 bp, Homo sapiens
ggccacaacgccactggattggtggtagggcggggcgggccacagtctccagcctgaagcggaagtggaggaaagatggaggtgtggggacaggagctgggtgtgctggggactggccgcggacccctaacctgtgtctccggtctccctccgggagcggctcaacccagcccatcgctctggccccgttctggccctgcagggtggtggttgggacgttgaaatgagcgcgcgagtggtacgtcctctctccgcgctcacgcccccctcctcaccgtgtttcccgccaggaccatcagcacgtgcccatcgacatccagaccagcaagctgctcggtaggagggggcgccaccgcgcagctggctgtcggggggaggcctgtgcgttgccccctgtgtccaatagccgggagctctgacgcctgaaagcctgagtcgagatgctgaccactggcctcgttctatgccccatctgtggccagacctgcttccctgatagcagcgggaacgaaccatatgtacagtctgtttgacctgcgttttctcctttaataacatatgttatcgtatcattcagggacaggataaatgactcgctttaaaaacagtcaaccactgccgggcgcggtggctcatgcctgtaatcccagcactttgggaggccgaggtgggcgaatcacctgaggttgggagttcgagaccagcctgaccaacatggagaaaccttgtctccatgtctccatgactaaaaatacaaaaaaataaaaataaaaagtagccgggcatgggagcacatgcctgtaatcccagctactcgggaggctgaggtgggagaattgcttgaaccccggaggcagaggttgcggtgagcagagatctcactattgcactccagcctgggcaacgagagcgaaactccatctcaaaaagaagacaaaaaacagtcaaccactaagtggcacatctgaattggaacttaagtctgtctgacccactgtccatgccttttgcattatgccaggaaaaaaaaaaaaaaacctcatttaaaaagcttccacctcccccttgattttaggaggaagagggacctaagacccagttgcaaatgaaaaccttttagtgtccaggccatctccaggttgtctgtatggggcttacatacttcctccccagttcatagtcagggaaggcctcttcatctgatcacacagctcctggcattttaaaatgcttattggattcatggatttgatgccaatcttgtccttaagatggtgtctgtttgactaccccagtccgttgcttctagttctgtgacatcaacagaatttttctttctgaaaactttacaggaatatagcagagagagtataactgatactagtgtgggaccccagcgtttgaccggttggcagagttcaagttctgaattcaccactctgtagtgccatttagtcagtcctgcttggtggtcacgggggaagcttctttagcctcccttcagatttgtactggcccttcagcccatgtgcagtcttggtgtgtgagcttgttcttggtcatgaaaaggaccaataaaatgaccaccattcattgagggttttttttttgtaccaggtgctgttttaggcacttgacatgataaaaatgatcactgtcattttttgagtccttgccgtgtctcaggcacactgttcagtgttttacctgcattcccttttctagtcagtgtcttattattccccattttacatgtgggaaaactgaggcacagaatagtagacttgctcaagaaacttgataacgagaacccaggaccatctgaccacaaagctcagctcttagctctcactgaggaaatatgcatggctctgaagccacaaatctgggcccagactttgagaggtcagtcccattggtattcacatgtacagggtggtacttcactgttcacaacagagtcatgttatctagtccttagggcgctgtaggtattaggggctttgcagctgttcattcatccagtacttggcataaccatcttgtattttccattgtcatggttaaccccagccctgaggaaatggaagttgagcagcatcctcttgtcaggaagaaagatataattacccatagaagcaaaaatattatggggaattgagaatggtcaaaagtggcactttcaggaccaatttaaaccttttgttatccctgtgttgaggcaattgctctataaaaatcacactgctaatgaagtcagattgtcagagcctggtttagccccaggcatctctttgggcttgtctttattcccatcttcccatgacccccatactttaaccaatgtaaagaaaacttttagactaatttcagtgtatttcactcgaattagtgatggaattttggtgatgtgaatgggaatgctctaatttgggtgcttctcatgtagattggctggtggacagaaggcactgcagcctgaaatggcagagtctggtgctgacgatccgcgagaagatcaatgctgccatccaggacatgccagagagcgaagagatcgcccagctgctgtctgggtcctgtgagtgcttaggggctgtcactggagtcccctctttgctgaggtagtatgtatcagctgagctactctcttgttatttagccaccagggctggcctttagagagggagcgatttttatttgaggtatagatgctggcttcttccactatgaaatgatttagggaaaagctacacactaaagttactggcagtatattatacatgaatcagccacctgcagtgcccagagtaggtgaagaagatactttagttctcgaaatcccgtctcttgctttctagacattcactactttcactgcctaagaatcctggaccttctcaaaggcacagaggcctccacgaagaatatttttggccgatactcttcacagcggatgaaggcaagtgtgggccaagggccggtagtatgtggttggggacatccaatccgaggagtcatagcctctgtggtctctctgaggctccagtggggatgcctacatagaatatttcctgaactttcactctgtctctatagtttactccaaaagtggatcctatccctgagtttaattttcaaacccactgctttagggattgcctgcactcttaaagtgggtggtccagccagcagagttgaaagaaggacaaggagtttgtgtttgatgtgatgtaaaggctgggagaacttaccctgtttagggattgagctgggatgtggctgtcgagtgcttttctggcttaacattgtttttctgttcttactcaggattggcaggagattatagctctgtatgagaaggacaacacctacttaggtaaagtggcccggcctgggagccctggtatccatggggaagcccactctcagagttctgagataccaggcttataggaggcacagtctgtgagtgggaagagactggagtgtagatgttgcccatttgtaggtggtaaaatcaattgtttttgatggaattgattttccctgagtggagtgctgggggaaggaggaggtccaggccggtagtggccattcgccgtgcctcagcgagcaggtgtgtgtgggtcctccaccactcacctcttggttagcgggagtgtgctgcccccacccccacccccgcacccccattctacacaaggcagaagaggcacgggttttcctgggagcgaatatcaagtgcctgagagcaactacaggactaactgtgtttgggttgggtgtagtataaataataataatggctaatatttcctgagcatctactaaatgcaaggaattgtgcttggtgtgtcatgtggattctctcttgcatcttcatgataaatgttattgtcgctgttttaccgatgagggttggattagaggggttaaacaacttgtcttaggctccacagctgggaacaagtggggctgggaagctgacttcgtgctcttcaccaccacaaaggatgtgtgtgcatcctggggcatgcctgcctcatgtgggggtgtcctgggctgaatttcctgggcacttctcagtggaactctctagcctcctggttcggaatgtcaactatgagatcccctcactgaagaagcagattgccaagtgccagcagctgcagcaagaatacagccgcaaggaggaggagtgccaggcaggggctgccgagatgcgggagcagttctaccactcctgcaagcagtatggcatcacggtgagcggcggcagcctcttcgcagccagaggacacctgggcccctgcttgtcttcctctgaccccgtctgacccctcagcctggttgcgccccctttgggccagtgtcttacttttcttcggtctttggatgttttcttcaatctgttggactccacctcttctcccctctctagggcgaaaatgtccgaggagaactgctggccctggtgaaggacctgccgagtcagctggctgagattggggcagcggctcagcagtccctgggggaagccattgacgtgtaccaggcgtctgtggggtttgtgtgtgagaggtagagaggcctcagcttctcctggtgggggtgctttgcctgtgttccccagctcatgacccttctccagttgtcttgttcccatataacatttgaactctttacacacctgaacctgtgggggccttgcccatttgaccatgtggcccaggccaaagcccagtgttggccttacgcatggtcggcaggagagtcagttgtgtgctctgttgaagccccacagagcaggtgttgccaatgctgcggttcgtgcagaagcggggaaactcaacggtgtacgagtggaggacagggacagagccctctgtggtggaacgaccccacctcgaggagcttcctgagcaggtggcagaagatgcggtaagatgggccttgtgatgagctgtaggagtggagtgggagctgcttgtcccctccccacccccaacagcccaacccaagacccagagagaagaagggaggatttctgtgagagtgactgtaggtagaagggcccaggaggccctactcctttatttttctgagtataggtgagtgagtgccacagaggctttgcaaggtggttcgctttgaactcggaacctccatcatgtgagctctctgaagatgggctttctttggggtagcttagaggccactgcatttgaacagtgtgctctctacagaagcagctgaggcctgtgggaaggcagccccaccctcctttttaaattaatttatttttgagactgggccttgctctgttgcccaggctggagtgcagtggcatgatccttgctgactgcaacctctgcctctcagcctcaagcgatcctcccaagtcagcctccaagatagctgggattacaggtttgcaccaccactcctagctaattttttattaacatctttgtagggacaggattttgccatattgcccaggctggtctcaaactcctgggctcaagcaatccactatcctcggcctcccaaagtactggggttacagacatgagccaccatgcccggccctttttaaatccatcttccatgagctaacactctctttccctttccagattgactggggcgactttggggtagaggcagtgtctgaggggactgactctggcatctctgccgaggctgctggaatcgactggggcatcttcccggaatcagattcaaaggtgaggaggccttctcagtctgtctctctctgatcactactctaaccataagaaaagtgtcatttgtgtctgtaaaggcatcacttgaagttcatagctctaagaccaggtatagtccaagggaggcagagtttcacacgtcacatgtcagagttttgttttgttttttgagacagagtctcattctgtcgcccaggctggagtgcagtggtgcaatctcggctcactgcaacttccgcctcccgggttcaagtgattctcctgcctcagcctcccaagtagctgtgattataggcgcccaccaccacacccctctaattttttattttgtttgtttgtttgttgagacagagtctcactctgtcgcccaggctggagtgcagtggcatcatcttggctcactgcaacctctgcctcccgggttcacgccattctcctgcctcagcctcctgagtagctgggactacaggcgcccgccaccacgcccggctaattgttttgtatttttagtagagatggggtttcaccatgttagccagatggtctcgatctcctgacctcgtgatccgcccgcctcagcctcccaaagtgctgggattacaggcgtgagccaccgcgcccggctaatttttgtatttttaatagagacagggtttcgccgtgttggccatgctggtaactcctgacctcaggtgatccacctgcctcggcctcctgaggtgctgggattacaagcgtgagccactgcgcccagcccatgtgagagttaaattttgatgtcctttttcttggtgtttggtacagggtgtaggggtaaaggcaggtgggaacactacagagcagggatgatgggccatactgccatttttggcacctaagtcagggctgcaaatccttaatagagttggaatgtgcagtcattgacctcatcaagggctttggtttattctggctccttggctcaggaaaattctccccccattgctgtggttctttgctctccttccaggatcctggaggtgatgggatagactggggagacgatgctgttgctttgcagatcacagtgctggaagcaggaacccagggtaagtgcaccatcccctgcagccctggcaaaagtggggtgctcaagggcccccacgtgtctagaaacaagaaatgcagcgctaagatgaggcttcttgcacatttaactgtttctcaaaaccttgatgaggatgtgagctgagggggaccaagagaggttttttttttttttttttggagacggagtttcgctcttgttgcccaggctggagtgcaatggcatgatctcagctcgctgcaacctccacctcctgggttcaagctattctcctgcctcagcctcccgagtagctgggattacaggcatgcaccaccacgcacagctaattttatatttttttagtagagttggggtttctccatgttggtcaggctggtctcgaactcttgacctcaggtgatccacctgcctcggcctcccaaatgctgggattataggtgtgagccaccgtgcctggcccaagagaggttcttaaaagttgagagtttagaaactctcaactttttagagaccacatgtgggccagctgttatggtaggagggctctagggggatcggggccctggagtgtgacatgacccccgccccaacagcagagaagacgtagtggtgtctgagccactagagggcggtgcaggatgaaactttacctcctgcggtccaccagagcagagagccggcctttctacccctctgaacccagctctggtcctcctctcagtctgggagttggaaagtggtacctgattagagctgagacacctgggacaaggtagccttcccccttggattagaacaagaagtggctttagcacagtgagtctgtccgtattaatcctccagggcttctcacacttgagggtcttttccttctccagtcctctgatcctttatcacttctctgtctcttcctggcagctccagaaggtgttgccaggggcccagatgccctgacactgcttgaatacactgagacccggaatcagttccttgatgagctcatggaggtactgtcatctctggaagatgcaggggggaggcatggcaccagcacaggtggcttcactccagatgcctgacctgacccctcctgtttgtgtgaagggtgtgagtgctatttgtgtcctacagcaggagcctcacgtattagatgcctcctattcatccagttacttatcaggtacctcctaggcacctggcactaccttaggcaccagaacttgggtggtgaataagacagtcaaagtccttgacctcatggagcttatattctaatggggaatgcagactggaaagaagataaataaataaaatatgcaggatgctagatggcaccaaatgccacggagaaagagaaagtaggggaggatgacgaggatgttggaaagggctatggttttgtatctggtggtcagggaaggcctcattgagaaggtgacctgtaatcaagactgcaggcggtgcagagagaaccatgcagatgtctggcagaagggcttcccaggcagagagagcaagtgcagaggtcccgaggtgggagcagaccttgcacagttgaccagcaacatggaggctggtgtggctgaggagagagagctggtggggagtagaagagctcagagatgtagcgtctgaaccttggtttgcctctgagtgaactgggaagctgttggaggtttcgagcaggttaggaacatgatctcatttgtgtttaaggatgatccctgtggctaaggtgttgagcagcccagcataaggagccagcgttcttggacctttgttgtaaggctgggaggacggggtcctgtctttgttaatctctgtatctgctcccttcccagtagcctgctggttcggagagcctcctgaaagttctgtcctcacccagttctctcctctttctgcccagaggctcctcccagcctcaaggggagaggacaaaagatatctgtgaagttttaacggcagaataggattgataagttaatatggctggctcttgtattcttttcagccttgccttaatccagtgcttctcaaacatgtatttctgttccctgaatctcattcctcccatggagacaaaataaataccttccctgggcagagagaaccctttgagtctctgtattctcagttatctgatcccaggctggggagaaaggacagaggtctggggttaggatgagataggaggtggggactgaagggtgacagtagtctctcctagcgcttacagtgttcagaggaaactccttacccagagtctagccctcatgtctcatttttgcatttcgagtagtccgagggcttagattctgagttcttctctcagtttgaaccaatttatcttctttttttctttcttcctttttttttaaaaagagtttctctgtcgcccagtctggagtgcagtgcagcaatcatagctcactataacctcaaactcctgggctcaagtgatcctcccgcctcagcctcctgagtagctgggactacaggcatacaccaccatgtttggctaattttaaacatttctgtagagacagggtctcatcgtttcccaggctggtcttgaactcctggcctcaagcgatcctcctgccttggcctcccacagtgctggaattgcaagtgtgagccatcatgtacagcctgaaccaatctttcttctgtcctcagcttgagatcttcttagcccagagagcagtggagttgagtgaggaggcagatgtcctgtctgtgagccagttccagctggctccagccatcctgcagggccagaccaaagagaagatggttaccatggtgtcagtgctggaggatctgattggcaagcttaccagtcttcagctgcaacacctgtttatgatcctggcctcaccaaggtctggcttccccttgatgcaaggctctgccatcttgagcagctctgcctccttgtattcctcctcttgttccatgaccccttaaaccccatccctgcctcctggccattgccatccactggggataggggttctctttgggacaagagggggaggtttcacatatacaggaagaatctgcttgcttcctgagtaggacaggggaactgggagtgggttttccttaaaaggaaagggtttaaggatgtgagggtaagcggccagttgggggtttggtttcccgagcctctcacctccccagcagctgaatgggaatgctcaggatgcacagctaacccagcactcacctgagtgccccgcacaggtatgtggaccgagtgactgaattcctccagcaaaagctgaagcagtcccagctgctggctttgaagaaagagctgatggtgcagaagcagcaggaggcacttgaggagcaggcggctctggagcctaagctggacctgctactggagaagaccaaggagctgcagaagctggtgagatgggaaagggaggcctgccagtgggaggactcccagtctgtgcaaaatgaggccctgagcacccctgcttctgcccacttggtatcactctttcagattgaagctgacatctccaagaggtacagcgggcgccctgtgaacctgatgggaacctctctgtgacaccctccgtgttcttgcctgcccatcttctccgcttttgggatgaagatgatagccagggctgttgttttggggcccttcaaggcaaaagaccaggctgactggaagatggaaagccacaggaaggaagcggcacctgatggtgatcttggcactctccatgttctctacaagaagctgtggtgattggccctgtggtctaccaggcgaaaaccacagattctccttctagttagtatagcggacttaataaaagaggaaaaaactcttgcttcagta

SEQ ID NO: 6686 - DNA, 320 bp, Homo sapiens
agggccgggcgcggtggctcacgcctgtaatcccagcactttaggaggctgaagcgggagaatcacgaggtcaggaaatcgagaccatcctggctaacacggtgagacctcgtctctactaaaaatacaaaaaaattagcctggcgtggtggcgggcgcctgtagtcccagctactggggaggctgaggcaggagaatggcgtgaacccaggaggcagagcttgcagtgagccgagatcgtgtcactgcactccagcccgggcgacagagcgtgactccgtctcaaaaaaaaaaaaaaaaaaaaaaaaagaaaaggcata

SEQ ID NO: 6687 - DNA, 1353 bp, Homo sapiens
ctgcagctccactcctgaagaccttcagcttcttgggctttgagattgtacgtccaggccatccctgtgtcccctctcggccagatgtgatgttcatggtttatcccctggaccagaacttgtccgatgaggactaatagtcatagaggatgctttacccaagagccacagtgggggaagaggggaagttaggcagccctgggacagacgagagggctcctcgctgtctagggaaggacactgaggggctcagggtgagggttgcctattgtgttctcggagttgactcgttgaaattgttttccataaagaacagtataaacatattattcacatgtaatcaccaatagtaaatgaagatgtttatgaactggcattagaagctttctaaactgcgctgtgtgatgtgttctatctagcctaggggaggacattgcctagagggggagggactgtctgggttcaggggcatggcctggagggctggtgggcagcactgtcaggctcaggtttccctgctgttggctttctgttttggttattaagacttgtgtattttctttctttgcttcctgtcaccccaggggctcctgagtataggcttttcagtccctgggcagtgtccttgagttgttttttgacactcttacctgggcttctctgtgtgcatttgcgtctggcctggagtaagcaggtccgacccctccttctttacagcttagtgttattctggcatttggttaagctggcttaatctgtttaatgttatcagtacattttaaataggggcattgaaatttactcccaccaccagggcttttttgggggatgcctgggcctttaaaacactagccaaactctaattaattctcaaatcactgccaggagttcttgctcctggctgcaggcccaggccccaaggtctccttcttggggtcacaaacagcagtaaggaagaggaatatatagcaactcagggcctgggaattgtggggcaatccgttcttagggactggatacttctggctggctgagtatagtactagctgcctccccaccaggttccgagtagtgtctgagactctgctctgcagggcctagggtagcgctgggagtgtagaagtggcctgcccttaactgttttcactaaacagctttttctaaggggagagcaagggggagagatctagattgggtgagggggacggggatgtcagggaggcaagtgtgttgtgttactgtgtcaataaactgatttaaagttgtggttggtctattctttatttctgaactaggaccaactccctaccaaactgttttgactccagagcctaataaatagaggtgtggtgc

SEQ ID NO: 6688 - DNA, 4183 bp, Homo sapiens
gggcaggtaattcctagaggcagctggcagtttaggatgcagatattaaacaaacacaaggaatcgacaagacagatgaaaaagaaccaagacaaaactcagtcccttactttttcccaagaaacatgcttgagattctgctgccacctattggtgattcctcttcaatacggctagagtcacaaaggctaaattggaaacccagtcaagatttccctcttcaaaaaaaaatcacccagtcaagatttcccttttcaaaaaaaacttttgctattgaagaccactgacaggaaagaaatatggtacccaaaaggctgcactacagtttaaaaagcaacttagaaggtagaatattttgggggtgggggtggtgtgtgaaaggcaaactaagtctaaatttaagaacagggacattaaaaactttattcaataaatacaacaaataatttaaaaatatatttcaattccaaagccaattaagaagaggaagtagagagaaagggaaaaaagtggggatgaggaaggtagaggaaaagagaaagcggccaaacaatggtttggttgggctgtgtttcagagtataccaccctttaaaattctgatcaaatactcttgacccataaacccttagcccttgttctgatggggtagccacaggagtccaccagctgggaatcatccactgagctctggatcagagcattctagaggctggaatgtcgggggagttttaggggtagttttccggtcattcctaaaaccatccgtcctaactcccaggcaggtttaaatagtgcaaactcttaggcagagagctcccagctgcatagtttcacaggtgagtgtcccaagccagggcctccaggaaacaggtcccagagtacccaggggtccaaagccacttcggtgaatggaaatctaaaggtgaagagaggggaggccagggcacagagtaaagctcctgggctaagccagtggccaagccagaaaacaatgctgggcagaaaagggttacaaggcaggtagtctggacactggattcaacagcttgccatcagccagggaaagtgaagctgaggatgcatatggagcagggccaggaagatcaggagagctgagggagaacaggaaaattgggaggaaggaagaggcagctcagcagcaaactccaggagaaataaccagcagccctcacagatttgtgattgtctcttaaaaagatttattttctcttcttgcctgaatgtacaaaggcaaaaagagtacagtttgtatatatatatatttatatatatatataaaaaaacaaggaacttggtaatgtacactttacagaagggaagaatcaggaagactgaaattaaattcaacagagcaacgccaatggaacaaaatctatgaacagcaacactgcccctccagcccgggcctccagctcgccccaacctgctcccaatgggagggctgagcaccaaggcaagcgggtgggctggggcaggaggggctggggacagggcctgggaggggcttgatcccaggaggggggcccatggtaggagatcactggaaagcttcctgggatgcccaagtaattaaaacaaacaacaaaggcccagaattatggggccaactagctgcccagttgcatcttgggggcatcagagtagacaaggggatggtgagagggtatacgggataagtgacatgggtggcctcaaagcctgtatgaaataattctctagccctctgcagtcttaactcgcaactctaagtcctgccatggccccttaaacgtggaaaaaagagactcaagaaatcaccatttcatttcatagggtgccctcttacccttctaagcgtgtggttctttgaccttgtgatgtgtggagagagttcggtaagagaaggaaatttcatacatgtacatgtacaaggcaggaaaaggggatgaagggaactgccataccttaaaatgaggaagtagttgatgtggatcctaaagagcagctctccaagccttgcctgatctatctggggatgaggccccctccctctttagcttctcctctatgggaagccccgtgagcaatgtctgtgagggcctgggcaggggtggctcataaacaggcttggtctggtggtcttggcccttggtagcaaatttttccagcctttgtttgtggggtgggataggatggggacccctgctgagcatctcatccctctgactaggtcatggatgccacaggtagctcccacctgtgtttctcctccccatgtagaggtgggcagcaaatctttcactcagcacttgtcaagaatctccacagctgctgcttcatgttatttcagagggaagactaggcccggcaggcatcaggatctgccatggtggctttcacctgctcttctgagcagctcctactcttcaggggagacttggatatgaggatcaaagagccaaatgtttaagaagaaaaattaaaaaggaaaagaaaaacctgttctcttctggagaacccaaggctgcccagctaatacagaagttcgtcctctgtgttacagaatgagtggaaagggcaggaatgcagggccatgcctgcccaatgcaaaagaaaattactcctaacggtttctttacaatatatacagagtatgctgcaggccagtgccacagatacaaaacacacaacaatatttaaaaacaaacaggaacagagagggaaccttggctccacctcacaggagccccaggagggcataatcaggctgaaattcagtcaccctcttggttggggtgactcaggtggggtgggatgacggtgtctgcactagctacttccacggaggaaagggaggtcactgctcagagcactgcccatgagggcagcagaaggcagagggaatgatgggtatgagggaggctgttttggggccctgccaagaggtctaaaacaatggtttttggggaggactcagaacccaacttgaacaaaaacgaggaggcagaaacctagggaaaaggcctgtagatcagaggggatcctcttgagcagatggtgaccctaagcctctcaagtgtagggttccagggtccttggaaatcaactactactgggcattgtgcttactgtcccctatttcccattttccaaactgagtcggagccaagttcctgctcctagtcacttttggcactctggtcacacactcccttttccagcctacactggtgtctgtcagtctttatctctctctctcaatccagagggtcatggaaagataggaggggagaacagagggatgatacctcaaaagccaagtaagctaagctccccacaccttggggaagacatgaccccaataaagctaccaaatcatcctcactttcccagtacaaagagtataaagcttccattgggagactgcatttctaaggagagcagagaaatgttggctgcctcaaagcacagctccactgagtacattctgagactctaataagtaatggcttggatgtgttattccagggtctaaggaacaaataacctcccatggccagtggcccctcaaacaaaatatgtgttaccaagaaacacagcttatattggcccacatggaggttatagactgagctatataaaatcatgtacttgtagacagaggaattgggctgtatatatctgtggcctcaaatgaggaagatatcagatggctagatgacaggacatctccaagaactgctgggtgctcccaggggctgccttctgggccttgccctaaggtgacctggcagactccaaggttccccaagctggggggaatactagtttatctgcctgaggcttaagagccaagcagtggaaaagaagaggcaagaccagtgtggggatccccctgggaaaggcaccaaggggttaggagggaagggaaaagggcaaggagttggggaataagaagcagcaggacttagtggggacgcaggttctacttcacagacgtcattcatgctccagcaccagcttgctcccagtgtccctggggagccctgtgctggtgttggaacccctgccccctgcctcacaggcagctcaaggccatgttggggcagatgccttggtcttcctttccaggctaggttgtgagcgtttatatgtgctcatgtaaatggggagaagtctcc

SEQ ID NO: 6689 - DNA, 362 bp, Homo sapiens
ggaaagatatctcactggttggtggcccgagagaggcctcttatgcttctaagatccaatggatctgtcccacctcttggccctctggtgccatcctgggcttcactgctgctggacatgctgttcttccccttcacagactacttcctttcagtcaccttttcagtttcttctccatcccccacccatggcctccaactctgcagccctctgctctcctctctctgtcttgtctccagagttccatcttctcacccgacctggaccattactcccattcccacaggcactgcagctttttttcagaactgaaagtttaaattccccctttatccttctccttcttcccctacaaccaaaaa

SEQ ID NO: 6690 - DNA, 10887 bp, Homo sapiens
tcaatttttcttaaacttcaactttatttggaccaggaaatttttccttacataaggttgacatgttttaaacaccttaggacaaactatttaaaaagcaacattttttatttcagaagggtcttgcttaagtggttttctgaattcttctcgttattatgaatatgtgctttataaataaatatattgtcggttactccattgtaatcaaatcagctgactaattgctatctgtactgagttatctgagatcagaagacttgatgcaggtcatttaaaattcacattagcacagtgtctatgagaaattgataatacagattaatgtgatatttacctctagtttgttttcctaatggcttccatgagaaggtcctcacaataaattatataacagtacagtacatttgtttggaaatcgtaaaaataattctacaaattagctccatatattatgttgctacagtatggtttaaatgatataaaataattagtatgtcaaacatcttcttataaacatattgcttttggtcatacactgaactgaaatgtacagcataaattcctttttttcctctcctgaatggcacaaaacaatggcttgatggtagggaaatgctacttcatgagaaagcatggtgcccatcaactccaacagtacctgtatttgcactcaaaaataaaataattcttgtgttgtcttgattgtatacaatttttgataactccagaagatgacacagtgttactttattagatgtatatagtcctttaggcaagagatacatttaaaaaattatttgaaaatcaagtttcttcctacataaatcctatcacacatgggctgggtgagggcttggtaattaatggaatttttttgtaaaatgaacaatcatgtcaagagtagtttttatgcaaatgcagttttccctactctgctggcactacctggggcacatcaatacccctacaacgcaccttcgtcactgaatttctgtctcatttcggcacgaaatgagaaccaaccctgtatcatttcctgacatcccagtaagctttctgactgtaaatgaggtatagtcctgataggtacagttacaggtatatcatttctgttggtgtcttacattacatttcataattgtatagtaacaaaaaatagaggtaacaagtagcattttgttttcatgtaacaagaaatggctgcaggttctcagtcagaacagaaacagagagacaaaagaaatggttactattcccttctatagtgcataggtttttttacacaatttgtcctttacccatttcagagaaggggaggaagagtaattcacagcatttgctagttaaaatttgttttttcagtcctctagttttctcaactgcacatcagctacttgattttttttatgaatatgtgtttggcttccccagggaagttgcttgctggtaaacaaacgaaagcataaaaagaaaaaagcgaagtattttctgaagttgggccctataaagtattagaaaaacaattttataatgtgcaataatcaggtaactaggtttttcagttaaaaaatgtaatgaccttatataagctagattactgagactatggtattaaacaatccatttgctcctctaaggaatatttacaatttaaaacctgctttccagcaagctgggccaggtttcacattaatttacttttcatatataatacagaaaatgaaaataaatattaaccttatagtaaaggactcatctctgaaaacacatgttctgatgctttagataacgagttgagaatataatacagaaatgaattcagcttcaagttgtgcttgcatatatattttctgaagctttgctgccagcttgttaacaggaaaagaccacctatcacatccacatccattatgtgcttttctcatgcccctagggatcatggtgcttggtcaagtatatatttgagtcaaattctccaaagcataaattactctccgattttaggttagggccctttggaagccatggttatttgttcagaatgcaacatattattaatacaccaaggcaataatttaccaagtcattaggttgaaccatatgaaagtgtctatattcatttcacctatcattttaacctataaaaatgatcacttggctgggtgcagtggctcatgcctgtaatcccagtactttgggaggtggaggagggtggatcacgaggtcaggagatcgaggccgtcctggctaacacagtgaaaccccgtctctactaaaaatacaaaaaattagctgggcgtggtggcgggcgcctgtagtcccagttactcaggaggcttgaacctgggaggcagaggttgcagagagctaagatcgcgccactgcactccagcctgggtgacagagtgagactctgtctcaaaaaaaaaataaaaaataaaagattacttacatatggttcaatttgtcattatcctggaaccaatagagagtagtttgagccctaggagaatatgaatcaatacactgttgagattgcattgcgttcactgatggtgaccttccctcttgcctttaaggcaaccataagtgaggcaaatgtaccatatagagatggatgagactggaccttttgtctttttctgtctccaaactgactttgtcatttttgaaactgctgtaaacattcctctcaatggaacagcctctgcccaacaaataaagttctcactcttgaaagaaactacaccagggttaggagatcaaatgtggcatgtgactgtgactttgtagatgagtggaacctctgccataactctttctgctccccaaattgtcctgagaatttggctaggacagaacattagtcattgactgctcctagccagatctggagaactgagctaggcacaaaattccatctcagttactataatcaaaaaccttctgctgctttgatacttagttttttggccatgcatcttggcaggaatgtaagtttgattgactgtgttaaccttcatgttgagagccttttgaagcagaaatctcttttattggtacacatacaacttgatttcaaaaatggaataaattagaatataatggcatagtataattaagcttggtttcatctgagatctgcaaccacattaaagggtgtcagaaaaattttttaaaatgtatttacttagagttctttcatctggggaacaaaagtaaaacaaagtgaattatataatataatagtccttttagaacagcagagtggtatccaaaaatcaaaccaatgacctactaagaaaagcagaggatcacttttctaacaacagtccaagaaggcctgaagtacctagtgagccacacttgaaatttcaccacttcataaatatctgcacacactgagtaaataaccctctatcacatagccttaaattgcacccctgttgcaatactgcattaatattattacatttttcaaaatctgtagaaaatattatctggaaccccaaaggaaaatcaattaatttttaaaaagttcattacaaagttgactgtataaaatgctaaaacataatccatatatacaaaatgctgttgtttaagaaaataatgggacccagttttagaataaaataattttatacaaaaaagcctactgcattcaaatcaatattttaaaaaaaaactttaaaaaagaatattgacatgtcttagttcagaagaataactataaagtgttgatttgcttttatgccctctgcacatcttgcaggtagaacaccagtcagctgagggaaagtatcctgcttctccctaggaagagattcatcaccaaggcagacagtcatcgccgagatgcgtacttggaagcccagtctgtccggccatgcactggctgggcggctggaggccgtggtatcaacccaggagtgcttctaggctgggtgtggaagaatggtcgcccaggatgaggtctcatggccttcagggaggaataacctgcaatgaaagaaaaaggccggcatgactgatatggggccaatgtaagcaaagtacaaataaatgcattttggtgacaaaaacatgagaaaataaggagttcaagaggagcatcttgtctcctacttataatcttctctactgcagttaaagacatcgttttaaagttgtcaggccaaaaataatggcatcattcttgacccctctttttttcatataccacatataatttgtcaggatatcctattagttctaccttccaaatatttacagaacctggcaactttttaccaactgaactactaccacgctggcccaagctagcatcatttcttacctggataatttcaacatcctcctaattggattccctgcttcctaccttgcccctacttcagtctcatgacaacagcagcttgagggagcctgtggagatggctgtcagatcacctcacttatggactcaaagccctccagggactccacgtcactcagaatccatgacaatgtgcttacaggcatcgtatcacccctgacctcatcttgctactccccctctcactcctgtcactcccacactctggcctccttgctgctccttgaatttgccaggccagttctgcctgaaagctcaagcacagaacaatctcctgtctggaaaagcctcactcatactgtatgcttgctcaatcacctcctccaggtctctactcaacaactcctttgcagtgagctcttctttagctactctatctaaaattgtaacctgtaccccacactccaacccccacaatccctacctcctgtctgctgtatttttctccttagcactaagtcagtaagcatctgacttactatatgttatatagcacttatttagcttacttattgtctgtagagtgcaagtttcatttattggtggatcccaggcctaaaacatgcctggcacaaagcagttgttgagtaaccatttgttgagtaaattcatgaataatttaaaatacaactcaccaggggaagggtctggaataggtgctaggtgtaccctctgcatagcagaaccgatttcttttttcagaaaggaagggacatagtttccagtcagtccactagaacttgtagagctggaaccaactgatttgcaaaagcaaaaagctcattattacaaagacatgtacccaggacaccaacaaggttaaatgacagcactgcagagcaataacaaactaagtttttacttttagggaaaagagcaaatcatgataaaaatgagttcagagccaagcatcccaccatactaccctgtcagaaagactgcgggggccaaagacagtgctgctcctgtgaggggcaaccaaatagagggtgggttggttgtgaaatttttttaaaaaagggaaatatgacatttgttctttattttcttttgtaaaagtagatttagactattctaaaatttgcttttttcactccataatatagaatagttatccttccatgtgagtacatataaattctagagtatggctaaaccataatccatttaaccattttcttattgatcaacacacaggttatattaaattatttagctgtgacaagtaattacacactaaatattcttatccacatcagaaaaattaaccattttttacaatgtgaaataccttaactttttatgtcatttccacttgggagtgctttaagggcagggactgtatgctactcgtcttggtattctggggaggataacagaatgccttgcatatagcagataatcaattaattttggatgggtgaatgaatataattcttattatttaggcttaaaggtacacatggaataatgaagactgttattattgcccgttatagaaatggaaattctaaccattaagaaaagtcagtaagtagtagagttgctctgttttcacaacacagagctttttcagcaattgtttaaggcagagtggaaacacagtctagaatgcctgcgtgaggagttgcgttggtcagctggggtgtattttgtactttggtgaatgaagaaacatgaagaaaaatgggaagagaatttgaacaggtaagtcacaaaagagaaaaaacttatagtcaataaacacaagaaaagatgatgaacctcattagtaaataggacatgcaagtttaaaccacaataggataccatttctcactcatcagattagcacaaattttagtcttgacagtaccaagtggcatcaaggatgcagagcaactcccatatcccgctggagagcaagtagtttggcaatatctgtgaagttgaagatgagcacaccctttaacctaaaatgttgactctggctgggcatggtggctcacacttgtaatcccagcacaatgggagacccaggcgggtggatcacctgaggtcaggagttcgagaccagcctggccaacatggtgaaaccctgtttctactaaaaatacaaaaaaaaaaaaaaattagctgggtgtggtggcacatgcctgtaatcctagctacttgggaggctgaggcaggagaattgcttgaaccagggaggcagaggttgcagtgagccgagatcatgccactgcactccagcctgggcaacagagcaagactgcgtcttaaaataaataaataaataaaaataaataaataaaataaaataaaataaaataaaatgttgactcctagttctcgtacccagaggaatcctcacacatgtgcataacaataggggtacaataatcatctcagcactctttctaatagcaaaaattgcaatcaacttatgtatttatcaagaagagaaggcatacataaattatggtccacataaataataagttatggtgttgtatagatatatattgtatatgttatataatatatgatatatatctctataattgctacacatatatttattaaaatgcatgaagcagtgatccaagattatcttcacataaattttaaaacctgcaaaaccacactatgaagtttatacaaacctaaataaacactcgatcaggctggcatggggggaggtaaggggaagcagggaggcgggaaaggcacagacactgggcttcatgtgtatttgccaagttcaacttttttttttttttttgagacagaatctcactctatcacccaggttggagtgcagtggcgcaatcttggctcactgcaacctccgcctcccaggttcaagtgatatcctgcctcagcctcctgagtagctgggattacaggcctgctgccaccatgcctggctaatttttatattttaggtagagacagggttttaccatgttggccaggctggtctcaaactcctgacctcaagtgattcacctgcctcagcctcagcctcccaaagtgctgggattacaggcatgagccaccacacctggccaaagtttgacttcttaagctgggtgatggctacacaggtgttgctatattatctctttcttttttattttccttaaattaaacaaacacctaatggatgaaggcagtgcacttggcagtgcagaggggaaagcagcacatggcaggggctgcctgcatcagggaaaaatgatgcaggaaacgtctctactgtgaacagggtttgtcagccttgggactcagtaaattcattcatccgtttaacaaaaaaagtggggagggtcttccaaactgtccaccttccaactagaagggatcttgatactctgggcctgcagctgggtcatcagaaggaggggacaggctggaacaaggcagacacagccaagggtgacttccacctcaagaggagggtgcctgctgcagccagggctttagccatcaggcctagtaagagtctgtaaaggtatttttgtttttcccttgagccagggatgactatgctctactccccagctaccctggaaggcagactcccctgggagctggctgagtcccaagggactgctgccgagaaagagaggaggatagggctggaaaagaggcctgagctttcagatgacaaaggcccctgtgcttccaaagcccgtcccatgactccttgtgcccaccttcctgcatccagggaatttgctttttgccatttaggggttaatgatcattactcacctgaatttactttgctgattactgacattgtccctgaagattttccagacaagccagaactagaccatggattaggtggaataaattccttgcctggattcgagagtatgccatttcttatactgatccctgatagagaagaaatgattttaaaatgcaaaatacacaatgaatcttacactagactacaaagataaaattaatgcagaactcaatttgtcaaaaactctctatgatacaataatcaaagcaaaaactgactgtgatgatgtcatctgacagatgtccgaggaaagatatctcactggttggtggcccgagagaggcctcttatgcttctaagatccaatggatctgtcccacctcttggccctctggtgccatcctgggcttcactgctgctggacatgctgttcttccccttcacagactacttcctttcagtcaccttttcagtttcttctccatcccccacccatggcctccaactctgcagccctctgctctcctctctctgtcttgtctccagagttccatcttctcacccgacctggaccattactcccattcccacaggcactgcagctttttttcagaactgaaagtttaaattccccctttatccttctccttcttcccctacaaccaaaaagaaataaaatagctctctgattcactccctgctcctttttgcctgtggtcactgtaattcgaggcttggccactcatactggatcactctatacctgtcatctggatctctcttcttccagatcatcctggggcctgtcaggccaatcttctaagaacaaaatgtcaatcctgatgaagtctagcaatatttagaagccacattccaaaccagagggtgaggaatttcatgcatcaagagggcctgccattctcaccccattcctcccttctgactccagctcagcctgtgccgccatctccctcacctggatgacagctacagcttgctggcccctcccctactcagcacacaggtgttgatacaaccacatcactccttcagttaaaacccttcagggacttctcatcgctcatgaagcaaaatccaaatttcttacaaggccccaaaaatgcctcatactacacattacgtcacctcctttctcactatgctctggccacactggcttctgccattcctctcacaggacaagccctctcctgcctctagacctttgcacttgctgtttcctctctccctggtgtgctctgccctcagctctctgcacatttggttccttctcattctttggggcccagtcaagttgcttattcagagaggccttacctgaccattcttttacaatctgtgattactatttgtctatttgttaaagtctctctcccaccactagcagataagctgtgtgagggtgaggatgttgtttgcaaagctgctgtataaagctgctgtataaagccactgtgtagactacagtgtgaaggaattccccagggttgtgtgacccagtggccctgcctggctgttttgttcacaataatattcgcagtgcttggcatgcagtagatgcttgatacatatgtactgaatgaatgattcactaatgctgtaagtttggaatatagaaaatcaggagagaggcttggatacccaccaaactatagcattgacatttaacccccatagtactgccaggacagtgtgactaagctcctaccctggtttccctattggccatttcccctaaacctggtctggtagaggggcctcagacatgccgcccagcttttgccagttcctccctccctggaggctggacccagtttcctataccatatttcttatcttgggtgactataaaagataaaaatgtgaggcctgggcccaggcacggtggctcatgcctgtaattccagcactttgggaggccgaggctggtggatcatttgagatcaggagttcaagaccagcctggccaatatggtgaaaccctgtctctactaaaaaatacaaaaattagccaggcatggtggtgggcacctgtagtcccagctactcagaaggctgagtcaggagaatcgcttgaacccaggaggtggaggctacagtgagccaagatggcgccattgcactccagcctgggtggcagagagagactccaactcaaaaaaaaagtgaggcttgggcttcagcaaatatttctatgatgttcccctcagttctgaagggaagccccctagtatctgccttctaaaacagaacctttgtgaatatgtgattccaaggacagggtttcttattaataatcaaagtaaagccaagtcatttatattaccaggcaagtatcgagagtgcttcaaatagtgctgcttggctgcagatctcagggtgggcgtgtctcgccgctgatatgacgtctgggtgggggcactgtttcctgtgcccacaggctcagagggcttcaggtccaaaacactctcaaacctgaatgaagagagcatggcttgggtcagcacgagagacagtatgtattctcggatatgtacccataatctcatgaattccagattcagtctgtttacaaatgtgagcagcacacttgcctgcagagagtgtcatcactctgtcttttcttgtttttcaggtcaatcctgctgagggatggactgaaatccaagtcatccaagtcagcccaatcatctgaatcctttgttgacctggaaataagaccccaccttctcctactctttgg

SEQ ID NO: 6691 - DNA, 259 bp, Homo sapiens
ctttgctgattactgacattgtccctgaagattttccagacaagccagaactagaccatggattaggtggaataaattccttgcctggattcgagagtatgccatttcttatactgatccctgatagagaagaaatgattttaaaatgcaaaatacacaatgaatcttacactagactacaaagataaaattaatgcagaactcaatttgtcaaaaactctctatgatacaataatcaaagcaaaaactgactgtgatg

SEQ ID NO: 6692 - DNA, 4070 bp, Homo sapiens
ttcaataggtttctctggccaaagtgaggcgaatgaattggggtagtaggggtagagaaagaaacctcttgtgtctgtgtaaattaaagtagcaccatgagtttgaagaatatgagtaagaaaaggtgaaatactaaggaggtaggtggtaaagcaattgctaatcagatcaaagggaagggaggaggaagaaaagtctagaatgatgccctgtccaacacacacacacacacacacacacacacacacacacacacacacacacacacacacttcttgtcttttttttaataacatgtattgtcatctaacaggacttttttatttatttgtctgtagattcctagaatgtaaattccacgagatcgaggatttttgcgcttttggttttccttttgtacatcctggttagtatagagtaggtattcagagaacacttgttgaatgaatgaatgagcaatgctttggtttctagttccataaagagcggagaaggaagacaaagtttggggaaaatgggttgacttgtcttttgttgctatgaaccatccagctggaaatacccactagacagttgaaaaagccattgagggctgggcgcagtggctcacgcctgtaatcccagcactttgagaggctgaggcgggcggatcacctgaggtcaggagttcaagaccagcgtggccaacatggtgaaaccctgtttccactaaaaatacaaaattagtcgggcgtggtggcctgttcctgtagtcccagctattcaggaggctgaggcgggagaatcgcttgaacctggaaggcggaggttgcagtgagccgtgatcacgcccctgcagtacaagctgggcgagaaagtaagactccctataaaaaaaaaaccgaaaagacaaaaaccaacccagtgaggactcagtagagagaactgaaatcggttgaattggtggcaaaagaatgagctcatccagagaaggtatgcagggtaagaagagaggtaagtcaaggaccactgggcaccccaaaagtcagaaaagtcgttttcaaaaaagacttaacagtgtatatccaatcatatttctagttctgatttaacagcaattactcagtttaacatgagtaggaagccatattttccagccttgctgaaagtggtcattctttttttcttgcttttagtttataattaaggaaggtttattgaacatctgtgctgaggtctactggatttactgagacataaaaaataaattataaaatccagttcttgccctcaaggagcttattttttaattgacaaataaaattgtatatttttactgtgtacaacatgatattttaaagtacagtcatccctcagtatctgtgggggattggtttcagaaccccctcagctaccaaaatcagaccatgctccagtcccttatataaaacggtgtagtatttgcatgtaacttaacacacatcctttggtttactttaaatcatctctagattttttatgttaacctaaataacaaacagaaagaggctctttaaaaatatttatttggaaattgaattttgcaataggaatatgcatgccatagtaaattatgtgtgtattcagggaggtaaaataaaacaaagatttttaaaggacaaaaatgacgatggcataattgttttaaaataagtatcctttgctgcaaagatgaataacaagggcaataatcccagtatttttttgtgtaagactgcaatggccattgtggaaggttgtggttcttatagtcttttgtgatcgtgtgttgttgttgttgttgttgttgttgttgtttgtttgtcttttggagacagggtcttgctgtattgcccaggctggaatgcaatggtgcgatcagggctcactacagcttcgaggctcaagtgatcctcccacctcagcctcctgagtagctgagactacaggcgcatgacactactggctaatttttagtttttgtagagaaggggtctaactatgctgcccaggctggtctcaaactcctaggctcaagtgatcctcccacctctgcctcttaaagtgctgtgattacaggcatgtacctctgcacctggcttttgtgattgcttttattagacatttaagccaagcacttgtctccatttgcttagttccaactggttgaattataccaaattgctaatatcttactgtttttaaccttcaaaaatggcagtttcagatgtccaatcttataaaatagaggcaacatcatcctagagttagggaaacaggagtgtaggagagccagggtgacagcattttaaaatcaactccatcttacaatgagaacacatagacacagggaggggaacaacacacaccagggccagtcggggggtgggggagtgaggggagggggagcattaggacaaatatctaatacataccgggcttaaaacctagatgatgggttaataggtgcagcaaaccaccatggcacactacaccatggcacaactacacgttgtgcgcttgtattctggaacttaaactagattaaaaaacaaaaaaatcagctccatcttaagatgtctacagctgaggaaatagcttaataatacctggaaggacaaattcctatgacagtagaatgtccagatgttccaatattgcataatgctaaacacctttaaggtaattatagtcatgctttcacgtatttacgcatgaaaatgccaaggatacctttctttaaattaacaaagtactaatttttttcattctgttagcccactcgcacgtagacattgcttagcttaccttttacagagataagacccctatcgaataaaaacaaagaagaggcattcctcctcttgctttctgagaatgctctactctgtaactgagtagctttcaataaaatgttacttctcatggcactgggtgactcgccttacattccttcctgtgcgagatccaagaaccctcttttaggatctggatcaggacaccttttttgggtaacactcagccttgttcacctgaaagtgtaactaaggtagcagcatgactgctattacacaggcttggggagaaatgaaaactcctgttataatagttctggcactctatgacaggtaccccaaaggcattttattcctttgaagcccctgacatcatcaacctacttgttcttgaagacccttagagttgccctcatcctgagacagtcttactcattttatctatctattctacctacctacctacccacctacctacctgatacattttcagaggccctgagaagtcttcttagcctcaacccttcactcatctgctcagtagtaggtaaaattgcttgcacagaagtcaagagcttcaaatctcagtttaagagctttgtatactcccagaagagggaaacatttgacttaaattcagccttagctataagcgattggtgtaagaccctattctaacaagtgggttttcttatcaggaaagatggttgagagcttgaaatggcttcttcagggtttctgaaggggcaacatgggcccaacgtgatgccaaaaagacaaatgcccatgactacacagtaaagtcactgttctgatggcgagaggcacacttagggattcaccaatgcaagtttgattggtagatcatgttcctagaaaatcctgtcaaggagtcaaagaatgtttagaaaatgaatttcctgtgacattctttatgtagttcatgaagttatgaacttcttttgaaggtttatattgtatatgagaatgtgctgtgaaaagctaaaagacatacaaggcaggttaaaatgatgaaatcaggaacaagaaactgtttccacctgcttttgctttttttttttttttttttttttttttgagacagggcctcactctgttgcccaggctggggtggaggggggtgatctgggctcactataacctctgtctcctgggctcaagtgattcccctgcctcagccccccaagtaactgggaccacaggtgcacaccaccacatccggctaaattttgtaattttggtagagacaggtcttg

SEQ ID NO: 6693 - DNA, 379 bp, Homo sapiens
atactaactgacacagaaagtgccactttttcataaaggatagacagttggcctcttcagacagcactgcaaagctaataaaaaatagaaccccttgtcaggttattattttactaaatctaacactcatttttttcttttgaaaagcagccaaagaggagcagaaagatctgggctcagttaatagcccagcattaacatattgaataacagcagtaatgtggataacaatctacaaatattaacacagcgctttatgcttttcaaaatatcttaaaaacatcatggcctttgatcctcatgaacaaccctgtctggtaggtaagacatgcactataatcttcctttgataaatgaggaaactgaatccatagggatt

SEQ ID NO: 6694 - DNA, 2378 bp, Homo sapiens
gcggccgcggcgcagagccggctgcactcgctgccgcagcactaccagggcgcgggcgcgggcgtgaacggcacggtgcccctgacgcacatctagcgccttcgggacgccggggactctgcggcggcgacccacgagctcgcggcccgcgcccggctcccgccccgccccggcgcggcgtggcttttgtacagacgttcccacattcttgtcaaaaggaaaatactggagacgaacgccgggtgacgcgtgtcccccactcaccttccccggagaccctggcgaccgccgggcgctgacaccagacttgggttttagactgaacttcggtgttttcttgagactttttgtacagtatttatcacctacggaggaagcggaaagcgttttctttgctcgaggggacaaaaaagtcaaaacgaggcgagaggcgaagcccacttttgtataccggccggcgcgctcactttcctccgcgttgcttccggacggcgccgaccgccggagcccaagtgacgcggagctcgtcgcatttgttataaatgtagtaaggcaggtccaagcacttacaagttttttgtagttgttaccgctcttttgggttggtttgttaatttatacaaagagattaccaccaccaccccctccttcagacggcggagttatattctgggttttgtaaaactttatgtatctgagcatttccatttttttttttgggttttgtattatttcttgtaaatgcattgtgaaaaattttattttcggcgttgcaatgcggggaggagaagtcagattatgtacatagttttctaaaaagcctttcttctaaaaacgaaaaaagaccccccacccaaaatgtttcgagtcaacaaatttaagagacagagcccattttctccataaatttgtaacatgctatttttatgtgcatgttttatgagttcaaaatgcaatgaggaaatctgacagggaaattatctgtatgaactaaaagtaagggaaccccggggaatgggaggacaggatttttcaaggaacctttttcaatgaaagagaaggaagttaaaacctataggttattttgtagagctgagtgttaatacgggccgagaaataaaagtatcttctgctccggctgtttcactgcggacggctggggctgctgcgcgttaccttgctgcaagcggggcgccttccacctggctgggggtctgcgccacagtttggtccagaggagggaggaggaagggaagaccccagtggtgggaccctggaccaggccatggatgaaggacaaagaccagggcaggtcacgggtttcccaattccccagcaattaagatttcgagcagaatttatctaaatgtgtttcaaggaaacacaatcgctgaaccaaaacgtactgcagccgagccccctccgtccatcctctgcccctccccctggcttctttctcttgggaaaacgggcaaaataattgtgctggattctcacacacacagaaatatcgaccatcaccctcccccgcgtgaactgggatgcaagttgctaaccgatgtgaacgcaaaatgccttgttcattattcctgacgagatcttgaggttgtttgatgctttaaattttttaattatattattttctaggtgtttattggtacattgcagttttttttttgaaatttaaaaatttctgtaaaactttgtcttcaagtaatctgacagcattaaatattgcatttaaaaattatactgtagcaaatacatttaaaaattaatcacaacgttaagatgaaattatatttttggaaaaaaaaaacacttgaagcccagatggaaatacgtttatttcagcagccttaggtttcccctcgctttctcaacacccttccttgtcctggagtatggactgtccgtccaaaagtgagcctatgctataagtttaatgagaaccgaattcagcctgcattcgagaatagctttaagtataatgctgatctgacaattgacgtgtaatttgggaagtcattttgataattttgcttaaaccactcattcgttaaagtgattacaaaaaagttcaagaatgatgtccactgctttctaacaagataataaaccccccccctcttttctttttctttatttttatttcttttagctatttgatcctttctgaagcagttgtttctggaagagtctgtgcgcccatggatggctgagcaccactacgacttagtccgggataagggcctccccagtcctctccgggagatgatttgggaaattttataatgcttgttctgttaactcaccgggaccttgagggtccaatgggaccttgagggttttctctgaaatatacaaacttaaaggac

SEQ ID NO: 6695 - DNA, 2240 bp, Homo sapiens
gctcgctgtccgcgcccggctcccgccccgccccggcgcggggtgggttttgcacacccgttcccacattcttgtcaaaggaaaatactggagacgaacgccgggtgacgcgtgtcccccactcaccttccccggagaccctggcgaccgccgggcgctgacaccagacttgggttttagactgaacttcggtgttttcttgagactttttgtacagtatttatcacctacggaggaagcggaaagcgttttctttgctcgaggggacaaaaaagtcaaaacgaggcgagaggcgaagcccacttttgtataccggccggcgcgctcactttcctccgcgttgcttccggacggcgccgaccgccggagcccaagtgacgcggagctcgtcgcatttgttataaatgtagtaaggcaggtccaagcacttacaagttttttgtagttgttaccgctcttttgggttggtttgttaatttatacaaagagattaccaccaccaccccctccttcagacggcggagttatattctgggttttgtaaaactttatgtatctgagcatttccatttttttttttgggttttgtattatttcttgtaaatgcattgtgaaaaattttattttcggcgttgcaatgcggggaggagaagtcagattatgtacatagttttctaaaaagcctttcttctaaaaacgaaaaaagaccccccacccaaaatgtttcgagtcaacaaatttaagagacagagcccattttctccataaatttgtaacatgctatttttatgtgcatgttttatgagttcaaaatgcaatgaggaaatctgacagggaaattatctgtatgaactaaaagtaagggaaccccggggaatgggaggacaggatttttcaaggaacctttttcaatgaaagagaaggaagttaaaacctataggttattttgtagagctgagtgttaatacgggccgagaaataaaagtatcttctgctccggctgtttcactgcggacggctggggctgctgcgcgttaccttgctgcaagcggggcgccttccacctggctgggggtctgcgccacagtttggtccagaggagggaggaggaagggaagaccccagtggtgggaccctggaccaggccatggatgaaggacaaagaccagggcaggtcacgggtttcccaattccccagcaattaagatttcgagcagaatttatctaaatgtgtttcaaggaaacacaatcgctgaaccaaaacgtactgcagccgagccccctccgtccatcctctgcccctccccctggcttctttctcttgggaaaacgggcaaaataattgtgctggattctcacacacacagaaatatcgaccatcaccctcccccgcgtgaactgggatgcaagttgctaaccgatgtgaacgcaaaatgccttgttcattattcctgacgagatcttgaggttgtttgatgctttaaattttttaattatattattttctaggtgtttattggtacattgcagttttttttttgaaatttaaaaatttctgtaaaactttgtcttcaagtaatctgacagcattaaatattgcatttaaaaattatactgtagcaaatacatttaaaaattaatcacaacgttaagatgaaattatatttttggaaaaaaaaaacacttgaagcccagatggaaatacgtttatttcagcagccttaggtttcccctcgctttctcaacacccttccttgtcctggagtatggactgtccgtccaaaagtgagcctatgctataagtttaatgagaaccgaattcagcctgcattcgagaatagctttaagtataatgctgatctgacaattgacgtgtaatttgggaagtcattttgataattttgcttaaaccactcattcgttaaagtgattacaaaaaagttcaagaatgatgtccactgctttctaacaagataataaaccccccccctcttttctttttctttatttttatttcttttagctatttgatcctttctgaagcagttgtttctggaagagtctgtgcgcccatggatggctgagcaccactacgacttagtccgggataagggcctccccagtcctctccgggagatgatttgggaaattttataatgcttgttctgttaactcaccgggaccttgagggtccaatgggaccttgagggttttctctgaaatatacaaacttaaaggac

SEQ ID NO: 6696 - DNA, 1562 bp, Homo sapiens
ctttggagaacagctcacaccccagagggaagtggcttggacaaagggggctgctcagcagacttcgatctcctctgggggatgtggataccgctcaggcccgcacccctccattggtcctggagactgatatgggaggcggtatgtgccttggctccggagggcacctggagcacccctcacctggagaaccctcatccagagcactcctttcctggagcacccctcacctgaagcaccctcagttggagcatcctctcacctagagaaccctcacctggagcaccctgttacccggggcaccctcacctggaaaaccctcatctggagcaccttctcacctggagaaccgtcacctggagcaccctgttacctggagcaccctgttacccggagcaccctcatctggagcaccccctcacctggagcacccctcacctggagcacccctcacctggagagcccctctcctgcagaacccctaccaggagcatacttcaccgggaccaccccttgccttgatgcctcagcactgaggagtctcccatctaggtggctgggagggcactctggagccatggggatgaggaccagaggctgctggtacatcttgccctgagactttggaggactgcaaggggacccacattcacttcagctctgcacctgtggtgatatccccacactggagagcaaagtgattgctccgggggccagatggccacgccaccatccccccacacactgcccctgccccctgcctggagcacagcccgagagcacccaggatcatccatgtgaagcagcaggctgtgggtatgtttggccgtcccgacccctccacagccagaatgggcacccataggcatgagaacctcacagccattaggggtgccctgagtgccatgggcggtgggatttctctgatgccccccagctctgctccctgcctggctcgccccctatcaaggctaaggatgactcagggcccagccatcaccatagcaacacgcgtcgcctagcaatggcggtctcccggcaacggttgtctcctagcaatgggatattttcctgggccctggctggagcccggcagttatttttagctccacagcaaatcagtcggcagctgcattttcggctccttgaagagaggcaaggtgtgggggggtgggtctctcggcaaagggaggaaagcatccccaagataggaatcttgctgccgtgggcccggaggtgcaggcctgtgggtgggcgaggccggatcctgcctgtgcaggggggcaggtggccggtggaggggagccaggggttgtgcaggctgcctggatgagtcggcagctaggactatgtccttgatgggcccccaagcaccctgagcctcataggtcggctgggtagaggggacgcaggccagtgctcacagctgcactatcagagcatgtttctgggtggcccagggtctggcaggctcttggcacccagtgcccctcagctgtgggagccatcttcactgtcccagaccccagctccacccagggagggggcagcagggcggccgc

SEQ ID NO: 6697 - DNA, 8647 bp, Homo sapiens
ggacgtcatcctcgggagcccacccggacgaagggggagagtagacagcagaaccagcggcggcggctaagcagagactgtagtagcggcgacagcgacgacggcagcgatggctggggcggggccagccccgggactcccgggtgcaggaggacccgtggtcccgggtcctggcgctggcatcccgggcaaaagcggcgaggaacgcttgaaggaaatggaggcggagatggccctgtaaggcccgcgacagagagtgataaaagtcgtcccagagccagagccaccgaatctcggagcctccaggcctcgataggccggagatacggctctaacatggggaagtgggaccttcgggattgtgggggcggggataggggagaggttggcaggggtgagggtcccctcgcgatatacccacagttccaaaattggtacgaggtcctgagcgctgatgtctgttctactcctccaggtttgagcaggaagttctgggggctccagtacctggaatcccaactgctgtgcctgcggtgcccactgtccccacggtccccacagtagaagcgatgcaggtcccagcggctcctgtgatccgcccaattatcgcgaccaacacataccagcaggtacggctgagctaaggcatgtaagtcagggaacacaatgcctcgaacagagtaggtgtttgtgtacagagagctgttgacgttttggcttgttgactaattagcatgacaaatattttatatgccaggcactgagaacacagtaatgactgagagagacatttctgccctgtgggagcttatattctagaacatgttgtccagtagagctttctgcaatgacgagactgttctgatatatttaaaatttatatttaatagttcgttattctcattagtcacatttcaagtgctcagtagccaactatatatgactagtagagaaagagagagaaattattaagatgaaaataggctgggcgctgggcgtggtggctcacacctgtaatcccagcactttgggagaccaaggcgggcagatcacgaggtcaagagatcgagtccatcctggccaacatggtgaaaccccatctctactaaaattacaaaaattagctgggtgtggtggcacgtgcctgtagtcccagctacttgggaggctgaggcaggagaatcgcttgaacccaggaagcggaggttgcagtgagctgagattgcgccactgcactggagcctggtgacagagcgagactccgtctcaaaaaaaaaaaaaaagccctgaggcaggtgcatacctgttgtgttgttgtgttcaaggaacagcaaggagaccagtgacagtggagtgagcaaagaggaaagtgggaggagataaggacagagaggtgaggccaaatcttgtagagccttatggccattttaagaaccctggtggccaggcacggttgctcacgcctgtaatcccagcactttgggaagccaaggcgggtagatcacaaggtcaggagttcaagaccaacctggccaacatggtgcaaccccgtctctattaaaaatacaaaaattaggcgggcgtgtcggcgggcgcctataatcccagctactccggaggctgaggcaggaatatcacttgaacccaggaggcggaggttgcagtgagccaagctcgtgccactgcactccagcctggacaatagagcgagactccgtctcaaaaaaaagactgtaagggacaagggcagaagccaggagatggaggaaggggctagtacagtaatctagacaggagttaatggtggcttggatggaggttgtgcatgggagatggggaggacaggttggacacagtttcagtgggtgctaagtgctgtggggaagatgaaataaggtggtgagagaagttgctgctcagagagccctagtgtgatccaaaaagcctccccgagaagtggcattttagctaagacctgagatagccagccacatacagagcacaaagcatgaagctcttggtctcttggggtgagctggccgcagcagatgggaatgctgagtcaggcccctcaccctgacctcttcctcgacaggtccagcagactctggaggcccgagcagctgctgcagccacagtagttcctcccatggtgggtggccctccttttgtaggccctggtaagtaaagagtagcaaggtgagggggttgggcaatcaggcagggtggtaaaaaggtgtgcacaggactctcctcccaccatccttgcctctcccctcccaacagttggctttggccctggtgatcggagtcacctggacagcccagaggctcgagaagccatgttcctgcggcgggcaggtgagtctggggccagggacccccacatttaatcaggcactcttgtttacatgacttcagcctcttgcctaaatccttgctctaaattaccctttgcctttgatcccaacttgatgttgtcatcctaaagcacgaacctgatcatgtcctttctgatgatgtcaattttgttttaacctgatcattgcaaaccaaccctcctgctgtcagtcctaattcccagttaccacagcacttaacacctcataacaagctatataatttcttatttactatggctatcatcttttgcatcctctaaaataaaagctccatgaggggcagaagtctcagtatctgccacataggaagcattatgtactgtctgttgatgggatgaacggactgttgagacaagcgccaggcttttcccctggcagtcacaaccctacatgaccttgcttcttgcagggagagatccccagcagcccgaacatttctgggatgtgccagcagtgcttttgttaaggtcccttctctccctgctcactgtcacccagctgtaatcttccagccatccttcccccccaggccattttctacattccaccttttgttcttcaggtaacctttactcacactgtcaatttgtaggacattacttccttatatgtatgaaaaggatgcgtgttcttacttggatgtaaaattctggtataatctcggttaaaccaaacgtgctacttatgttacctaaatcctgttatacttattaatctgatgatctctgagaagttgtaatgtctcttactttttagtatggttttgatcaaaatgcaaatctgacctacttcccctgcccagcttccaaccctgctgtggctccccagtgccctcaggaggacacccatggctcagccaagaatgctgtgctttaagaacaaaaaagctctactggggtgcctgctggctgctcagcccttctcatgacactctctaagccccactacttctattacagttacactaaactgaaaagggaaaggttttgcttataaatattcttcctgccaataatattcccactcaccccttgcctaacacttcattgccccttgggtctcagctcacaggtccctttctccaggaagccttccctgggcctggctgggtcagagggctcccctctcttagcactgatcccactgcctgggcttccctgcttccagcgctggtccccactggctctccttctctagtgatgtctccattccctcctcctctggaccaggagctccctgagaaccctgggtctgttggtgtgtccccagcattgcctgccacagggctgagccagaggagcttctcagtggtaaattttcatggaatgaaccaggggagaggcccccacatctccaggagggctccccagactcttctccaggatttcttgatgctgagagtgcacacacacacacgcatgcacacacacaccttgtcccaagtgcccctgtcccccatgacacacacccccatctctctctcccacagctgtggccccccagagggcccctatcctgcgtccagccttcgtcccccacgtgctacagagagcaggtgaggggccagggtcatcatccctgccacataactccccccaggccctggaactccccactaacaccctgacagattccgctctctcctctgcagcagccggcccccgccctatggccctacggccccctcaccaggccctcgtgggcccccctctgcctgggccccctggaccacccatgatgctgccaccaatggctcgggctccagggcccccgctgggctccatggctgcactgaggccccctctggtgagtgtgaacagggaactaacggtcagatgtgcggtggacggggagaccatccatcctggcccaatgggctatgtctgagttggcctctctcctgactttctgtttctctaccttctcactctgcctttgtctctgtctctttctgcatctttctgtggcaaaatctgttctctccttttgtgaagggagtacagagagaaacatgctattggaatatttctcttttgattgttactgatgttcttgtctgtggctgtctctctctgcctgtgtttctccttctctgtgtttgtctggctggagactctctgcttgggtgtctcttggctgctctctggcccccaggccctttctttgttggatggaatggagatgacagtaaagtctgagcctgtgagccggcccccctcatgctctcctcttacccacaggaagagccagcagcaccccgagagctgggcctaggcctggggttgggcctgaaagagaaggaagaggcagtggtggcggcggcggctgggctggaggaggctagcgcggctgtggccgtgggggcaggaggtgccccagctggccctgcagtcattgggcccagcctgccgctggccctggccatgccattgcccgagcctgagcccctgcccctcccgttggaggtcgtccgcggcctcctgcccccgctgcgcattcctgaactcctgtccctgcgtcctcggccccggccccctcggccagagccacccccaggcctcatggctcttgaggtaagcagggagcctagcggtgaagggacagaagggacggggggcagacaggagcccaggaacttccacacagacagaccggacagcaggaggacctgggggagggaggcggacacatgtgccccacatccagaagcacatccagcccttactgtggtggcaggagggccggggaccaaaggacagtgggagaccccaataccaacccctttgcacctctcccctttcctctgcaggtcccagagcccctgggtgaagacaagaagaaggggaagccagagaaattgaaacggtgcattcgcacagcggcagggagcagctgggaggaccccagcctgctggagtgggatgcaggtaagctgctgaagctcgaggtcaggcgtggctcggccaaggtcagaccaggctgctgtccttgggctgcagactgggagggtgaaccctctcagtagggtgggcgctgttgttagcccaccttggggaggggaggctatggctcaggggctggttcttcacctagccatgggccggagcttggtggaggtgacggggacatggggctttgtagcctgttttactcatgaggtgcctggcttcagagagcattctttttttttcccaactcttaggataaaaattttttttttttttttttatgagacagagtaccactctgtcgcccaggctgcagtgcagtggcgcaatcttggctcactgcagcctccgccccccaggttcaagtgattctcctgcctcagcctcccaaagtgctgggattacaggcatgagccactgtacctggccgggaaaaattttaaacacagatggcacagtaaacacccgtctacccaccacctagattctgcaattaacattttgctgtgttcacttttttcctctttgtgtatgtatctggtttctttgtttttagctcagtcatttgaagcaagttataagtgaattaatcacttctaaatatctcagtatttatctcctaagaaaagagatattttggccaggcacggtggctcacacctgtaatcccagcactttgggaggcggaggcaggtggatcacttgaggtcaggagttcaagaccagcctggccaacatggtgaaatcccgtgtctctaaaaatacaaaaaaattagccaggcttggtgggaggcacctataatcccagctactcggttggctgagacaggagtatcgcctgaacccaggaggcagaggttgcagtgagccgagatcaggccactgcactctagcctggcaacagaacaagactccatctcaaaaaaaaaaaaaaaaagaaaagagatactttttgcatatcataatactattatcaagtctaagaacattaactaattcggtatcttcttttcagtttatattcgtatttccctaggtgtcccaaaactctgttagaactattaatgtttttgccctgaaccagcatgcatgcagttttatgtccttcaattatatctttttttttttcttttttttttttgaaacggagtcttgctccatcgcccaggctggagtgcagtggcgcaatctcggcagctcactgcaacctccacctgccagggtcaagtaattctcctgcctcagcctcccgaatagctgggactacaggcgcgcacgaccatgcttggctaatttttggtatttttagtagagacggggtttcaccatgctggccaggctggtctcgaactcctgaccttgtgatccgcctgcctcagccttccaaagtgctgggattacaggcataagccaccacgcccagcctcgattatatcttaataagaacggtctctttcctgcctctttgttttgtacatattttttgaagtgtccagggcagttgtcatgtatgatgtcccaccttctgagtttgtccggttgtttgctcctggcattgcctaacttgtgcttagagtgtcccatatcacagacgccatggggcagccgtgcaatggctgaggaaggagatggacccctcctgcttcagtgtttgacttccaccccctctcctgggaccgtctacctggcccagagaagaccctagctctgtgaccttgggcaagtcacttagcctggttttgttttgtttcttcttttgttttttttttttttcttttttttgagacagagtctcgcactgtcacccaggttggagtgcagtggtgtaatcttggctcactgcagcctccgcctcctgggttgaagcaattctcccacctcagccttccgagtagctgggattacaggcacccaccaccacacccagctaatttttgtattgtttagtagagatggagtttcaccatgttggtcaggctggtcttgaactcttgagctcaagtcatccacctgcctcagcctcccaaagtgctgggatcacaggcgtgagccactgtgcttggctcacttagccttttaagcctcatattcctcatcccctcccttgtggggacagggattcattgggacagagcatgttcagtggaagcacaggcccaactcagaggcagcatgagaatgtcagctgggtgcagccatggcggaggagcaggcagcatgtccaggtctcaagggggagttagggcaggccttgccaaggaagcagggctgaggaaagatgaagcccatgttcctgaggtgccatgacgggcagccagtgggtgacaggggtccaggggaccaagggacaccaaggctcagaggaaaggccagggctagggcagagttaagggtgttactacaggaatgagtgaggtggccctggggtggggagggcagtgcagttcaaggttaaaagtaaggactggagccagatgcctgagctcttgtcttagctctgccgcttcctgcttgtgtcactgtgggcagtgacttcacctctctgtgcctcagtgtaaaagcatggttgggagtgccagaaatggaaacacccctccaggtgccagcagagctcctggcgcagggtcagtaggtgttgaccattattactaagaggtccctaggcagagactagatacctccgaaaaggtgggatcgttcagacaaggtagacactgggcaaggcctctgcatcctctgatgtcatctcttccccatccccagatgacttccggatcttctgtggggatctgggcaatgaggtgaacgatgacatcttggcacgcgccttcagccgcttcccatccttccttaaggccaaggtgatccgtgacaagcgcacaggcaagaccaagggctacggcttcgtcagcttcaaggaccccagcgactacgtgcgcgccatgcgtgagatgaatggtgggtgcggcctcccctgggaactgcaggcgcggcaggcgctggcctaagcctgacccgagcctgccttgaaccctctgtctccacagggaagtatgtgggctcgcgccccatcaagcttcgcaagagcatgtggaaggaccggaatctggacgtggtccgcaagaagcagaaggaaaagaagaagctgggcctgagatagggtctgtggccaggcacccgctcccacctggccgggcgctggctcctccctcagttctctttggaaaacccccagctgtccacccatcccctgccccaaaaccagtttcaataaatttacgttcatttccacccctg

SEQ ID NO: 6698 - DNA, 105 bp, Homo sapiens
cttgagtccaggaggtggaggttgcagtgagccgaggtcacactactgcaatccagcctgggcgacagagcgagactccgtctcaaaaaaaaaaaaaaaaaaaag

SEQ ID NO: 6699 - DNA, 3565 bp, Homo sapiens
gaccagatccaggccctccgctgggtgagcgagaatattgccttcttcgggggagacccccgccggatcactgtctttggctcgggcattggtgcatcctgcgtcagcctcctcacgttgtcacatcactcagagggtgagtaactcgtggggcaaaacatgaactagccaagtgccggctgtcccagcatgccccatccatgccccagggcatccaagggaatcggccagctctcttctaccagcttggtatccctttggcaagaagtggaagagaaatgtttctctgggagaagtacttctcccaaagctggagagggaaggaagagaatcccatttatgtcctgggaaagcaagattctccttctgatgtgggagtcttattttggggagtgggaatagaacaattgtcccctcagaggacaatagtttgacaggggttggggaggatctttcagtatgggaaggacatgttacttcacagtagagatatagggtggaaattggtttctaggtctaagaaacatccattctctgcctttctctctgaagaacaagtctgtacaagaggggaaacatcctagagggggaagtgggtctgaaatgagagtcactaacccacgaggtgggcttcttccataggacgatggtctattatcagactccagacctctccccgactgtgcaagctgccggggagattctcatttttggcctctctccttgtggtgggtccctttgccagtgacccttccaagagagcagaataggtcctttttgctcggcaggaaatgttttctccacctctggactactgggaacattctatctctgagaggcaaagctgagcttctcatgaagaaaagatcttcctgaaataggtgcccttttctgaagtaaggaaatctgtgagcgaggatgctttttttcttttttaattgaacactaaccccctgagttagggacattctcacaggaagactttccatctcttgaagaagttctgtctctctgagagagaagaaccaccttctttgacctagaaattctgtctttgcccctccagggactaccctggtgagggaagacttaggtgggatctgcctctctaaagagagagactgtgttcctaggtgaccatagtgggaacaggaatcttccctttttccccaaaggagggcgaaatgacgggctgcaagggtgccttggcctgaaaagacgttctgtgcctcctctgactggggactcctcccctaggagaagaaagcctttcctggagtggtgctatgctttgtctcatagggggcctgtgtctctggaggtttgactttttttttttctttgagacaagatctcgctctgttccccaggctctgtcccccagtgcagtggtgtgatcacagctcactgcaacctgttcctcccaggctcaagtgatcctcctgcctcagcccccagagtagctggggactacaggtgcatgctaccatgcccggctaattttggggataaatttttttttgtagagacaggttttcgccatgttgcccaggctggtctcaaactcctgagctcaagcgatctgcctacctcggcctcccaaagtgctgggattacaggcgtgagccactgtgcctggccgaggtttgacttctttaaagatctgttctctctgtttttctgtaattgatgcatggagaataatctttgggaaaatgaggctgtcttttaagtagtaatctatcatttctttccctctctttccactcatgcaaactggctttctcttaaaggaatggaattatgtgcctgagggacaaattctcccttgggaatgttggggccagggagagaatgatatcctttttttttttctagaggggaaaattattttctttttgagtttgggggactggctccctctctgctaggggaaaatctgaatttgaagtatcggtagcttcagataaaaggaaagtctctgccaggcgcggtggctcacgcctgtaaccccagtactttgggaggccaaggcgggtggatcacctgaagtcggaagttcaagaccagcctgaccaacatggtgaaaccccgtctctactaaaaatacaaaattagccgggcgtggtggcgggtgcctgtaatcccagctactcgggaggctgaggcaagagaaacgcttgaacctgggaggcagaggttgcagttagccgagatcccaccattgcactccagcctgggcaacaagagcaaaactccatctccaaaaaaaaaaaaaaacaaagtatcagtggagaccacagacggggagcacaggttccctggagactttcagacccgaaggcctttgcccttgggctccttccccaagccctcagaatgtggggctcttgcctgcctgcatttctcatctctcatgaaaaagactcctttgtggtgcaagtgccagctccctggtggtgcgctggcacggagctgggcccagctgggcaggaagcaagaggggaagacaaggagagataaagagaggcggcataagggggctgatgtctgggattcaaggggttaattcttcctgacattgccttaacccctaagttaccagccatcgcaccaggacagggaagggatggtggaagccatcaaggaaggggttcagcaacccctcctttggccctacatcatcccctgccaaaagagttgttcccccttcctagcccatttaaaccatggggcagcctcagtgacaaaggaatgaagagatttatggctatgtgtgacacgacagatctgacctggtgctacctgtcttctgtaggacttttccagagagccatcatccaaagtggctctgctctgtccagctgggctgtgaactaccaaccagtgaagtacaccagcctgctggcagacaaagtgggctgtaatgtgctggacaccgtggatatggtggactgtcttcggcaaaagagtgccaaggagctggtagagcaggacatccagccagcccgctaccacgtggcctttggccctgtgattgatggtgatgtcattcctgatgaccctgagatcctcatggagcagggcgagttcctcaactatgacatcatgctaggtgtcaaccagggcgagggtctcaagtttgtggaaggggtggtggaccctgaggatggtgtctctggcactgactttgactattccgtctccaattttgtggacaatctgtatggctatcctgagggtaaggacaccctgcgagagaccatcaagttcatgtatacagactgggcagaccgtgacaaccctgagacccgccgtaaaacactggtggcactcttcactgaccaccagtgggtggagccctcagtggtgacagccgatctgcatgcccgctacggctcgcctacctacttctacgccttctatcatcactgccagagcctcatgaagcctgcttggtcagatgcagctcatggggatgaagtaccctatgtttttggggttcctatggtaggccccactgaccttttcccctgcaacttctccaagaatgatgttatgctca

SEQ ID NO: 6700 - DNA, 360 bp, Homo sapiens
gacatgtctcctcagcagcaaattccagtgggggggcgggaagacctgtttctgtggtaacgcactgcgctacttccccatttctccaccagatgaaaaagatggtctgacccagtggtttctcaactttggcaggtatcagcatcacctggagagcttgttaaaaacacagattgctgggccccaccccagagtttctgattccttaggcctccaagggagggaaatgaggacctgccctgaaaatgaggggaagggggccatcaaggccccggaaggaagtggagagggactgatttgaacaggaagggcaaggagagcttagggattgttgcctcttgggatcatctacacttcctt

SEQ ID NO: 6701 - DNA, 1919 bp, Homo sapiens
caagttcattcacaccaaggccaaccgctttgaggaagtggcctggtccaaatacaatccccgagaccagctctaccttcacatcgggctgaaaccaagggtccgagatcattaccgggccactaaggtggccttttggaaacatctggtgccccacctatacaacctgcatgacatgttccactatacgtccaccaccaccaaagtgccgcctccggataccacccacagctcccacatcacccgcaggcccaatggcaagacctggagcaccaagcggccagccatctcacctgcctacagcaacgagaatgcccaggggtcctggaacggggaccaggatgcagggccactcctggtggagaaccctcgtgactactccactgaattaagtgtcaccatcgccgtgggggcctccctcctgttccttaacgttctggccttcgctgccctctactaccgtaaggacaaacggcgccaggagcccctgcggcagcctagccctcagcggggagccggggccccggagttgggagctgctccagaggaggagctggcagcattacaactgggccccacccaccacgagtgtgaggccggtcccccccatgacacgctgcgcctcactgcattgcccgactacaccctgaccctgcggcgctccccggatgacatcccactcatgacccccaacaccatcactatgatccccaactccctggtagggctgcagacattgcacccctataacacctttgccgcagggttcaacagtaccgggctgccccactcacactccactacccgggtatagctccaactcagagcacagccaatctccaggctccctccctcccagatccaggaacacatgcacacacacacacacacacacgcagacacacacacacacacacatatatgtatacgcacgcacccacaccctacagcagatccacctgcacaaacatagacagatgtggacatgcacccgcatgtacaaaaacacaaatacggaagtaaacctgaacaaaccctttaaatggggacgcagatgagtcctcggtaaaccgaggacccatgaaacagcagctgaagccagctccctgaatctgaccacagacactcctggggggcctgaaagcaacagctggacacccccttggtgctcgccttcggcctctcttggaactgcaccaccgaccaactccagacttgggagctttaaagagcaggatagctcttcctccccaggacttggtcttttttctgggtcttgttttgttgatttttcttttttaattttggaacaaatgcttttccaacccatgagtgctaagagcctctggaagggagggcttcaggcccgaaggtctctctggctctaggacccccagtgctcacacaatcagaccaaggaacaagacccccaggaaggaaacagatttaagcaagaccatggggtggaaggagaaaggggctagcactggatggagctggagggtcgtaggggagagatctccaactctctctgtgtccgtgtggagggctgcagagcctgcagggtgacctgcttccccaaaggccaacagcattggcctggccagaccaggtgaccttagatttggtgaacaacgtactatggaagccacatcactattgggcccccaggtctgatctgggttttgcctctgcccttggggaaatgctatcagaaattcgccccattttctttacagtcttttgtgtctgtcatttctctttcaaaaaggcggtgttttttgttgttgttggtttttttttttttttaaagaaaagttcttaaaacactaacgggaaacccatggagtttgccctttgtaaaaattttaaacacagtgtcttgatataaaaataaaaaatccagttagcactcccaa

SEQ ID NO: 6702 - DNA, 2510 bp, Homo sapiens
ggggcaggcaggtatggatcacataggatgcgatacctgtggccgtgtatgtccacatgtgtgcctgtagatacatcatcaagccctttggagcttcctaagttgctttggctgaggggagaggaaaacatggattattcactccccccatactctttgtgatacacatgtgacatgtgaaagacatacgagacatagctacatgtgatgtgcacatgtgtgaagtgcatgtatgcgtactggttgttgagctgggaaaccgtggcccaggcagtggtcactacagcctgattggtcctccaggtcagaacggtgccccacagtggtcagtccccagccctgtgggcccccacctccatcgcccagccttttattacacactctgagagtgtctccaatgcctgtctgacaaagacagtcccagcccattctcctgtctggctgggttgggtgcaagcaggctctgaatgcctggcatttcagctgcatcacctcccagctccttattgcccaaatagagagggtggccctggctcccctccgagcaactctgcatttaattttgtaatctgggaagtgcctggttttgaaaatccgctttctctcactcttcccctccttccttgcccctggctgctctagtgttctgtctcccagtcacctcgctctcccagcaccagtgcccttctcctgctcccagatactctttcctttcctctctcctgttttccttcctctgctatctctcacacctctcccagactatgtcatcttgttctcctgcctgggttcaaactctgcatccttctctaacaacgtgactacctcatgtctgcttcaaggcccccgtgcccttcctgtatccgcggctgccgcgcactcgcctgccatcctcctgcctcctcttcactcagtgcttctgcttgccctgccccaggcagcccacccacgcccagtgcgggtgtggagaagatcttctggcttccctgcatcttgcctttgggattgggatccaagggttctccatggatggatccaagtcatagaggggaatgtttgagacagggaagggggctgtgatccagaggctcagaataaaaagatgccctcccttctatgcaggggggcaagtttactggatggagatgatttgggcctctcttccagaagaagctaaaggaagagaaggggagtgagagttcagggaggcccttcccaccctgtgaggcttgacttgatctggattggggatgacaggaatctcaccctctggggtgctggcaaggaggtctttgcacaggaaaaggggtagctcatttcagtttgttttttctttaaattgaatcctcaagtcattttctgttcacctgccgcacagggacaagcttgacttctattttctgtgtagtgaaaacaatgtcatttatttggtttttcacctcagccctctcataggagcatagaatgttagggtctttactccctaatgatgtctgattggcacatcaagagttaactctgccttctgggccaaattcgaaataaccagtccatttttccttttttttttttttttttttaaatggtggaatgtctctcagcacagttgcggcttcctcaaaccctgaaagcatctgtgtttattatactcgggtgtcactcactgttgatgtctgcacctacgtttccacctcctccccctccttcagccagcctatgataacactaaagattattaatgttggttttgtatctcgttaaagacagaattgtcacttgtagtatttctgtagcattcagcgctgctgtggctaacaccactgtgtatgtttcatcattgctctgaaggtcaaaagcctcattttattttgctggtttgattttttttttttaaagaagaaaaaaaaactgccctgaattaaatggctgttttaacagtaggctcttagcattataccacatagtcatttttcatgttcttgtttaacaggcactgaggttctggtttaaattaaatagctgcaaatgagacaatttataacccattaggttgggtggaaaattgtttctcaaaagcaaataagtaataaatctggtatctgcctataactcacagttgataagaaagtggccatttctcactagcactatatatgatttgggctctgggtaatttggaagtgttaggtttgtgtctttgtagcagtatttttattagaaaagaatctattggccttttacagggtattaatccctttgtcacctaccattgatgccttaagttttctgagtctcaattaaaaatcttccttttcttgatgcatgacaagtgtaatcagtacttgctcatttatttgtctgtatttagtttatgctgtactatttaattatccttccagcgttttttttttctccttacaaatatgatactctttagtgttaagctaaggcattgattcatgtatctgtccttataatgaattaataaactattttccagaaatgtggaa

SEQ ID NO: 6703 - DNA, 1633 bp, Homo sapiens
tccaactttcatgtgctggtaaaccttttccacaatccctgtttacaacacaatataattataattcctcttaattgatatagatgaaaatagaattaacatgtgacttaaactgtttgctatttttatggaacatgaaagcacataaaagttctggttataatgggctactaggaattttactctatttgatatatttcttgctttttgatattttccaacaatttgttcttggcccttcttgggaagcatcagtcattctcaaactccagatatgtatttctaacttgaaaggttagcctggatgaatcccatcagcaccctgctgactgtgtctttctgccattgattgaagaccccactgggtctcttccaatgcaacactgataaaaataaaacctgatttccccatcagttaattgtgccgctattgacgcacgtgcctaaaagaaatcttgtgtcggccttcttcaaaataaatggtaatttattcagccattcattcaacaaattcatctctacatttattgatacctactgtgtgctgggtgttacagctactatgatgagcaagagagacaaacccagtcctcaagattattacagtatgacggggaagtcatactatgaacaaataattataaaagtcagtaattttttagtaatcatttagtaaatgctttgaaggagaagcacaggaagtgtaaaagtgcaggcaaacggaagttagacctacagggattccatttttgcccctttttattatatggagtcgagcagccaaagacagccctcttgccacctgctagaatgctcataccccttcccctggactaaaataacattcctctccttagggtgatatacaacgccattcatgcctagacccaagtataccttttcagctttggcttctaatgagcactgcatactagctacccagggccactcacaagtccctcagcagggaacacattttaatttctctgtccatttgcattgttctcactagcccatctacctgttgaactcctacttgctcttctatacccagatcaaatgtcatttcttccctttagctttcacactttcatagacacttggcctctacctcttcctgggtggcagtaaatgcttcctcagtcatgtgcacattcaagcacttagcaataggaccctgtaggatacagcaaggggtctggaccttggaatcagagaaacatgaggcttgagccttgtgtttgtgaactattgattgcaacaatttacttaagtctctggactttagtttcctcatttgtaaaatggaaagattataaagattgactttaaatgcaaaatgcttagtacagttcagggcatctagtagacaactaaaaaatgctcatttgcatactcttgtatcatattggattgtcatgtaactgtctgcttcccctgagaacaagagccatgtctttttattcctatgttgattctgccttgatttatattctaactaaatttcataagtattttcctcccaactatgtttctttcatgcaagaagcttttaaatctccacaacaaaaatggaaactcaattgattatacagattgaatgaaaaacaaaacaaatatttctagtaataaa

SEQ ID NO: 6704 - DNA, 7347 bp, Homo sapiens
acgagaaaaagataaagaaaaagaaaaggaaaaaaatagctgtgttattttgtaacaagtgttggcttctgttggaaccacctatatgtcttgagaaacaaaaccacaggaggaaaggaagaaaaaccgatcaataccgtctgtgcctgatttcctaatggattttgttcgttttttcaggggaacggttgttacttagttacaatcagactttttcaagtcacacaatacactctttatgagctggagtttcatgttacaagttggaaatgctgtgtgttgtcattcatgaaaaatactgcacttgtagccagattagcaaatcacagcaaattttgtgtcatagtgacattcataactcatatcagttagtaagctattatatcttctgttctaacaatgaatggaggtaattgatttagtctgattccttcctgaaatctaaatattagcacaatagtttctgaaattttacaatgttaaattatgatctaattcatgagaaaccacgggtttaacatagggattcaaaaaaacaaaaacaaaagaataggaataaataacccttaattgtatattggactagttcagcccttaaacagctttacctttatttaggaatgtacattttaggtattatcttgatcatggagcttagatttaatttagatagcaaaaataaagatttgtatttcttttccaatagcaaaaagttacataacactaatacttataacctatcaatatcagatattaatgactttgtagtgttgtaaaattttgaggaattttggagtctttatcataggtaacctggaccacagttactatttattgacaatgtgattgagtgtatggaggaaagcacagtggatgctaggctttgtaaatatggggatgtagaaaagcagatagttcagtgtctacctttttctagaactaccttgaaccttaaattttaagtcatgttcattgctagaaaattaaatgtacttattaaaaccaatgaaaaagcacatttctgaaatgaagttagagataatctttgtgtcttataaaaagacattaataaaaatctgaaagggccgggcgcagtggctcacgcctgtaatcccaacattttgggaggccaaggtgggcggatcatctgaggccaggagttcgagaccagcctggccagcatggtgaaaccctgtctctactaaaaatacaaaaaatcagcctggcatggtggtgcgtgcctgtagtcccagctactcagggctgaggcaggagaattgcttgaacccggcaggcagaggttgcagtgagccgagatcgccctgctgcactccagcctgggtgacagagggagactccgtctcaaaaaaaaaaaagtctgagagtagctaagaatttatgtaaaagcaatcagagtttttaatttatgggaaccaaataaaactataacctcatagtgtttataagaactcagaaataatatttatttaactttattatgaggccacacatattttcctgtgtttctatatatagtttggaaaactatccttaatagtctgttttatatgccttatatttaaaagtttgttttagttattttgaaagactattgctgctgcaaatagttgtgtgctttacattctaagcttcagtacatttatttaagagcatcataatctgacctgagcatccacttggagagtgttttttttgtgtgtggtctggggtgacaaaagaccacaaaaatgtgtggtctggattttttcaactatgtcattaactttatgatccaagaccagttataggatgaatctgtatgtaaaaatagagtcttatttatggaaggaattattctaagggaaaaatccagggtcaagctgtatcttttatgtcctttatattgcatgtctatttctgttacacaatttgttatttcttcaaatttcctatggtagcatgataaatcatcaaagaacctgtttgggatataaaactctgatagaaaatatttaatgagtatcttgattataacctagaatatgtatacgttagtaaaataaccagatatactacagaactctctattggctcaaacaggttgacctcaatccaagtttactcttgatatcactctgttggctgaaggaggtaactcaaacctcagggtttgtttttcccgggacagatagtagtgatagtgcattatatttgaataagaaaaacaaaccagtataccttgagaaattttaaaaagcatagttgaggcatattttttcataattatatacttatctgtttattgcccatggaaaatatatgtgtagaagtatttcttctgttatttgttactatcttcttaatttgttccaaagaaaatgctgccatactgcattccctctggaaggaaacaaaacaaaacaaaactcactcaaaaccagcagtgctgctatcagataagtagatgtcaatgtatacttacaaggaaaaactaaaaaatgtaatgtgttaattcagcctttttctatgtaatatttccaagtcagactttcttacattcctggaatttactttgatataccaagaataataatgataaaatgtttgctttgattactgtggggggaaagatgaaatgttcaattgtattaaaacaaacaagcttttcagagatactggtttcctgcccttgaagggtataaagaatttagatcatgcctgtaatcccagtactttgggaggccgaggcaggtggatcacctgagatcaggagttcgagaccagcctggccaacatggcaaaaccctgtctctactaaaaatacaataattagccaggcatggtggcgggcacctgtcatcccagctacttgggaggctgaggcaggagaatcgcttgaacccaggaggcagtgattgcagtgagctgagatagcaccactgcatgcaagcctgggcaatagagcgagactccgtctcaaaaaaaaaaaaaaaaaaaaaaaattagagctattgtgtctttattttcttaaattttgcccaaggtaacgttatatatcccaccacttcattgctggtttgggtacataggattttgaaagtggtatattaaagtctttccttccaagtattttgtaatacttgaaaattcttagatgtatactgctaacaaaagttagaacttaaacatttttgtttttatcatttatagcctagattagggacatatttgcatcaaccaaatcatcattagatttgaaaataggcagatgaatgaacaaatatggtcattgcactttccttttactttcagagtctaagtatattccttaaggttagtaaccagtctttattaaaaatataaaatttttcttcatgtctaatcccattgcatccacaatgctgtgatttatagtacatgatcaacacttaaaagtactttacatatgtgtgtttctgaagcaagttttcatgacctctgttagattctcaaaagaattcagaacttcaatttaagaatcaccattttaagaatacatgtgtacatatacacattaagcagtataaagcagctaaaattggcattggttttacactggtgcagtgtgcttaggtaaagtaacttcttccatgtttcaaggtcaggttcagagttgaatgaagtgtagatttaaatttaggattaggctttggaatatatcttgtttttattgtctcacatttctgatattgactacttatcccatattctgtttcaaattctttatcatatttcaagttctttctcatacttcttgatcttggcttaactaagcaagttagtatcagagactagttgactgaacccaagattaaacattttgcacttgcacaaaaccttcttagcattttgctttcaatgaatcagaaagtcaattcactaagagacagatcatgagaggaaagagaactagaggccaataaataaaataattgttcatatattaatgttcacatgtgaactacatatctaaaatcttggagaaaaatcaaggcaagaatttccagaactgtcctcaaatagctcatttatttaagttttgttaaaaagcaaaagcgaattgattacatttgattaacttttcctattccatgcacaagttaccttaaaacatgataaaaaccttatgggcattacctatcacacagtacttatgcataaacttataatagtaaaattactaatgtttgataaaataagatggaggcattacaaatagtctacagtttgtattttaaggaattggacatgaagaattctagatcattttgtgtctataaacccgactttctatcttgccttgggcaaactttctgtgcctcaatgtactctttaaatatgtgaaggatgctctttttgattaagtgttttgcactcctgaataaagggcatagtataagcacaaagtatgacttaatttatcacaaatattacacatcctatgttcttgaatgtgcacacttttttctcaataacaaaatatatcttaagtcagtttttttaatgctgtcaaaatttgtagaattttctttgagtatggcatgatctcttcccaaatgcattttacagttttttgtgtgttctatagactatagagtcaaaatcaagagtattttgagaggatcagaagcatttaaaaatctatttttttctagtatctttcacagatctaaatatttagattctctttgcctttttctccatggaatacggtggtatcaaattactaatacagtatataaacttcgtttgcattggtggaattcatttagatctctcaagtaatattattttagggctatataaattgtgtttttagtgtaaaatgttatttgataatgtgaagttaaatcccttttagaaagtgactgaaaatggtaaaggaactcatcagaatcttagcgttcttaagttctctgataatttagtatattttattaatgatgtccaacacctctaagattgttgagaaaacatgaagaattgaggttactcttctcaggtgacactttaaatattaaaatcagaggcttcctgaacaaaacaaattgcaaaatagcgataatggcatgggagaggccagatgcaggactctggtaaatttaacttactttgaatatctatgtaaattttagttcatgcatgttcttacttaatcctggtgtttttgctcttagatgttagagtttaataaattgtgatacgcatatatttttttacatgaaggattctactttctaattttacttttctgatctcaagaaaattaaacttgaaaaacggggtaaaattcttcaactattgcctcaagttcagttttgtcctattgtcctgagaaaggagatttagacttgtctgcctaacacaggtattttttagggcatcgtactatcccagagaaagtgttgagataccatggcagaaatataaaacctaagctttgaaccccagtagacttcttcttctgccattaagtctctctttatctgatattctaaggatttcttcaaactacttaataatttgtcaccattaactttaatatccagttttaatctgcactgtaatatcctgctttgagaagaaagaatgcctcataaattagagaagtacaaaacaaaatgttttggaaggtgatcctggctcctttggctctcataattgttttatagctgaaaataaaaagtcaggaaactggcccggtgcggtggctcatgcctgtaatcccagcactttgggaggctgaggtgggtggatcacctgaagtcaggagttcgagaccagcctggccaacatggtgaaaccctgtctctactaaaaatacaaaaaaaattagctgggtgtggtggcacatgcctgtaatcccagccactggggaggttgaggcgcaagaatcgcttgaacccggaaggcagaggttgcagtgagccaagattgccccactgcactccagcctgggcgactgagcgagactcttatatctcaaaaaaaaaaaaaaaaaaaagtcaagaaactgaaattcccatttaagttctcaaatcagtgatctgtcaaaataggccttgtaactgaaataccttacaaagcagttctaactaatgcaatgtgttttttaaaaatttttaatgaaccttacattgtgaacataattgcaacatgttttaagacaaacagtatttaatccttgaagacctgtcttgtatgtctctcaattttgtcagaatttttattattgtttttcacatatgtgaaataagcagttttttcagggtacatagggtatctttgttttacagatttttaaagatgaggttttgaaaagccctcagaggtttttgttaaaagactatcttgcttaataaatgacaacttgttacagattcacacattacaagtaggacagtataacaggagattggtgtgtgaatgctacaaaacagtcagcaaaaggaatcatgtttgcttgtgaaacttcagaggtaccctgaaagtcatttcctaaagctagtgcatgtgaatcttttccttgaattgtgcagaataattggattgaggcacatattttgaggagtagcaagtggaatggtataatgactacagagaaaattatcttgaaatatagcaaggaagagaaacaagttttctttctccactttattgttggactaattgggtcaatttgctgtgacatatcaaagatctctttgtgccaggccaagactggctactgagttctcaaagcgttttaatatatagattacgtatgagtgcctattttttcctcctcctttcattttttatcttaatacccattttacttctgaaataattcatctgttttgctttatgaccagctttaatttcaattgaggaataataacaaccctagagattcataggaaagagcattgaaatacattttttgcataaagatacctaaaaccatctacccagcttagggttgaactgaatttctgtgaaataaatttgttttaaatactaattattttaaaactacttaattcttaaaaacaatgtcatcagtttcaaaagtttcactttgggaggatattccttaaaaggcatacatagatggtaaagtataaaatatttctgacagaattattcagtattattcaacatttactttcatgtttgttattgtaccacaaagatagtgtcattgttgggttaaaatgttggctgtttttgttaatatacttaaaactgtaaccagtgaataacacctgtagtattttttattatagattatattttatttcaataaactttgatatttagaccaaa

SEQ ID NO: 6705 - DNA, 6107 bp, Homo sapiens
cctgtaatcccagctacttggggggctaaggcaggaaaattgcttgaacccggcaggcagaggttgcagtgagccgagatcgccctgctgcactccagcctgggtgacagagggagactccgtctcaaaaaaaaaaaagtctgagagtagctaagaatttatgtaaaagcaatcagagtttttaatttatgggaaccaaataaaactataacctcatagtgtttataagaactcagaaataatatttatttaactttattatgaggccacacatattttcctgtgtttctatatatagtttggaaaactatccttaatagtctgttttatatgccttatatttaaaagtttgttttagttattttgaaagactattgctgctgcaaatagttgtgtgctttacattctaagcttcagtacatttatttaagagcatcataatctgacctgagcatccacttggagagtgttttttttgtgtgtggtctggggtgacaaaagaccacaaaaatgtgtggtctggattttttcaactatgtcattaactttatgatccaagaccagttataggatgaatctgtatgtaaaaatagagtcttatttatggaaggaattattctaagggaaaaatccagggtcaagctgtatcttttatgtcctttatattgcatgtctatttctgttacacaatttgttatttcttcaaatttcctatggtagcatgataaatcatcaaagaacctgtttgggatataaaactctgatagaaaatatttaatgagtatcttgattataacctagaatatgtatacgttagtaaaataaccagatatactacagaactctctattggctcaaacaggttgacctcaatccaagtttactcttgatatcactctgttggctgaaggaggtaactcaaacctcagggtttgtttttcccgggacagatagtagtgatagtgcattatatttgaataagaaaaacaaaccagtataccttgagaaattttaaaaagcatagttgaggcatattttttcataattatatacttatctgtttattgcccatggaaaatatatgtgtagaagtatttcttctgttatttgttactatcttcttaatttgttccaaagaaaatgctgccatactgcattccctctggaaggaaacaaaacaaaacaaaactcactcaaaaccagcagtgctgctatcagataagtagatgtcaatgtatacttacaaggaaaaactaaaaaatgtaatgtgttaattcagcctttttctatgtaatatttccaagtcagactttcttacattcctggaatttactttgatataccaagaataataatgataaaatgtttgctttgattactgtggggggaaagatgaaatgttcaattgtattaaaacaaacaagcttttcagagatactggtttcctgcccttgaagggtataaagaatttagatcatgcctgtaatcccagtactttgggaggccgaggcaggtggatcacctgagatcaggagttcgagaccagcctggccaacatggcaaaaccctgtctctactaaaaatacaataattagccaggcatggtggcgggcacctgtcatcccagctacttgggaggctgaggcaggagaatcgcttgaacccaggaggcagtgattgcagtgagctgagatagcaccactgcatgcaagcctgggcaatagagcgagactccgtctcaaaaaaaaaaaaaaaaaaaaaattagagctattgtgtctttattttcttaaattttgcccaaggtaacgttatatatcccaccacttcattgctggtttgggtacataggattttgaaagtggtatattaaagtctttccttccaagtattttgtaatacttgaaaattcttagatgtatactgctaacaaaagttagaacttaaacatttttgtttttatcatttatagcctagattagggacatatttgcatcaaccaaatcatcattagatttgaaaataggcagatgaatgaacaaatatggtcattgcactttccttttactttcagagtctaagtatattccttaaggttagtaaccagtctttattaaaaatataaaatttttcttcatgtctaatcccattgcatccacaatgctgtgatttatagtacatgatcaacacttaaaagtactttacatatgtgtgtttctgaagcaagttttcatgacctctgttagattctcaaaagaattcagaacttcaatttaagaatcaccattttaagaatacatgtgtacatatacacattaagcagtataaagcagctaaaattggcattggttttacactggtgcagtgtgcttaggtaaagtaacttcttccatgtttcaaggtcaggttcagagttgaatgaagtgtagatttaaatttaggattaggctttggaatatatcttgtttttattgtctcacatttctgatattgactacttatcccatattctgtttcaaattctttatcatatttcaagttctttctcatacttcttgatcttggcttaactaagcaagttagtatcagagactagttgactgaacccaagattaaacattttgcacttgcacaaaaccttcttagcattttgctttcaatgaatcagaaagtcaattcactaagagacagatcatgagaggaaagagaactagaggccaataaataaaataattgttcatatattaatgttcacatgtgaactacatatctaaaatcttggagaaaaatcaaggcaagaatttccagaactgtcctcaaatagctcatttatttaagttttgttaaaaagcaaaagcgaattgattacatttgattaacttttcctattccatgcacaagttaccttaaaacatgataaaaaccttatgggcattacctatcacacagtacttatgcataaacttataatagtaaaattactaatgtttgataaaataagatggaggcattacaaatagtctacagtttgtattttaaggaattggacatgaagaattctagatcattttgtgtctataaacccgactttctatcttgccttgggcaaactttctgtgcctcaatgtactctttaaatatgtgaaggatgctctttttgattaagtgttttgcactcctgaataaagggcatagtataagcacaaagtatgacttaatttatcacaaatattacacatcctatgttcttgaatgtgcacacttttttctcaataacaaaatatatcttaagtcagtttttttaatgctgtcaaaatttgtagaattttctttgagtatggcgtgatctcttcccaaatgcattttacagttttttgtgtgttctatagactatagagtcaaaatcaagagtattttgagaggatcagaagcatttaaaaatctatttttttctagtatctttcacagatctaaatatttagattctctttgcctttttctccatggaatacggtggtatcaaattactaatacagtatataaacttcgtttgcattggtggaattcatttagatctctcaagtaatattattttagggctatataaattgtgtttttagtgtaaaatgttatttgataatgtgaagttaaatcccttttagaaagtgactgaaaatggtaaaggaactcatcagaatcttagcgttcttaagttctctgataatttagtatattttattaatgatgtccaacacctctaagattgttgagaaaacatgaagaattgaggttactcttctcaggtgacactttaaatattaaaatcagaggcttcctgaacaaaacaaattgcaaaatagcgataatggcatgggagaggccagatgcaggactctggtaaatttaacttactttgaatatctatctaaattttagttcatgcatgttcttacttaatcctggtgtttttgctcttagatgttagagtttaataaattgtgatacgcatatatttttttacatgaaggattctactttctaattttacttttctgatctcaagaaaattaaacttgaaaaacggggtaaaattcttcaactattgcctcaagttcagttttgtcctattgtcctgagaaaggagatttagacttgtctgcctaacacaggtattttttagggcatcgtactatcccagagaaagtgttgagataccatggcagaaatataaaacctaagctttgaaccccagtagacttcttcttctgccattaagtctctctttatctgatattctaaggatttcttcaaactacttaataatttgtcaccattaactttaatatccagttttaatctgcactgtaatatcctgctttgagaagaaagaatgcctcataaattagagaaggacaaaacaaaatgttttggaaggtgatcctggctcctttggctctcataattgttttatagctgaaaataaaaagtcaggaaactggcccggtgcggtggctcatgcctgtaatcccagcactttgggaggctgaggtgggtggatcacctgaagtcaggagttcgagaccagcctggccaacatggtgaaaccctgtctctactaaaaatacaaaaaaaattagctgggtgtggtggcacatgcctgtaatcccagccactggggaggttgaggcgcaagaatcgcttgaacccggaaggcagaggttgcagtgagccaagattgccccactgcactccagcctgggcgactgagcgagactcttatatctcaaaaaaaaaaaaaaaaaaaagtcaagaaactgaaattcccatttaagttctcaaatcagtgatctgtcaaaataggccttgtaactgaaataccttacaaagcagttctaactaatgcaatgtgttttttaaaaatttttaatgaaccttacattgtgaacataattgcaacatgttttaagacaaacagtatttaatccttgaagacctgtcttgtatgtctctcaattttgtcagaatttttattattgtttttcacatatgtgaaataagcagttttttcagggtacatagggtatctttgttttacagatttttaaagatgaggttttgaaaagccctcagaggtttttgttaaaagactatcttgcttaataaatgacagcttgttacagattcacacattacaagtaggacagtataacaggagattggtgtgtgaatgctacaaaacagtcagcaaaaggaatcatgtttgcttgtgaaacttcagaggtaccctgaaagtcatttcctaaagctagtgcgtgtgaatcttttccttgaattgtgcagaataattggattgaggcacatattttgaggagtagcaagtggaatggtataatgactacagagaaaattatcttgaaatatagcaaggaagagaaacaagttttctttctccactttattgttggactaattgggtcaatttgctgtgacatatcaaagatctctttgtgccaggccaagactggctactgagttctcaaagcgttttaatatatagattacgtatgagtgcctattttttcctcctcctttcattttttatcttaatacccattttacttctgaaataattcatctgttttgctttatgaccagctttaatttcaattgaggaataataacaaccctagagattcataggaaagagcattgaaatacattttttgcataaagatacctaaaaccatctacccagcttagggttgaactgaatttctgtgaaataaatttgttttaaatactaattattttaaaactacttaattcttaaaaacaatgtcatcagtttcaaaactttcactttgggaggatattccttaaaaggcatacatagatggtaaagtataaaatatttctgacagaattattcagtattattcaacatttactttcatgtttgttattgtaccacaaagatagtgtcattgttgggttaaaatgttggctgtttttgttaatatacttaaaactgtaaccagtgaataacacctgtagtattttttattatagattatattttatttcaataaactttgatatttagaccaaa

SEQ ID NO: 6706 - DNA, 7351 bp, Homo sapiens
acgagaaaaagataaagaaaaagaaaaggaaaaaaatagctgtgttattttgtaacaagtgttggcttctgttggaaccacctatatgtcttgagaaacaaaaccacaggaggaaaggaagaaaaaccgatcaataccgtctgtgcctgatttcctaatggattttgttcgttttttcaggggaacggttgttacttagttacaatcagactttttcaagtcacacaatacactctttatgagctggagtttcatgttacaagttggaaatgctgtgtgttgacattcatgaaaaatactgcacttgtagccagattagcaaatcacagcaaattttgtgtcatagtgacattcataactcatatcagttagtaagctattatatcttctgttctaacaatgaatggaggtaattgatttagtctgattccttcctgaaatctaaatattagcacaatagtttctgaaattttacaatgttaaattatgatctaattcatgagaaaccacgggtttaacatagggattcaaaaaaacaaaaacaaaagaataggaataaataacccttaattgtatattggactagttcagcccttaaacagctttacctttatttaggaatgtacattttaggtattatcttgatcatggagcttagttttaatttagatagcaaaaataaagatttgtatttcttttccaatagcaaaaagttacataacactaatacttataacctatcaatatcagatattaatgactttgtagtgttgtaaaattttgaggaattttggagtctttatcataggtaacctggaccacagttactatttattgacaatgtgattgagtgtatggaggaaagcacagtggatgctaggctttgtaaatatggggatgtagaaaagcagatagttcagtgtctacctttttctagaactaccttgaaccttaaattttaagtcatgttcattgctagaaaattaaatgtacttattaaaaccaatgaaaaagcacatttctgaaatgaagttagagataatctctgtgtcttataaaaagacattaataaaaatctgaaagggccgggcgcagtggctcacgcctgtaatcccaacattttgggaggccaaggtgggcggatcatctgaggccaggagttcgagaccagcctggccagcatggtgaaaccctgtctctactaaaaatacaaaaaatcagcctggcatggtggtgcgtgcctgtagtcccagctactcagggctgaggcaggagaattgcttgaacccggcaggcagaggttgcagtgagccgagatcgccctgctgcactccagcctgggtgacagagggagactccgtctcaaaaaaaaaaaagtctgagagtagctaagaatttatgtaaaagcaatcagagtttttaatttatgggaaccaaataaaactataacctcatagtgtttataagaactcagaaataatatttatttaactttattatgaggccacacatattttcctgtgtttctatatatagtttggaaaactatccttaatagtctgttttatatgccttatatttaaaagtttgttttagttattttgaaagactattgctgctgcaaatagttgtgtgctttacattctaagcttcagtacatttatttaagaagcattcataatctgacctgagcatccacttggagaatgttttttttgtgtgtggtctggggtggacaaaagaccaccaaaaatgtgtggtctggattttttcaactatgtcattaactttatgatccaagaccagttataggatgaatctgtatgtaaaaatagagtcttatttatggaaggaattattctaagggaaaaatccagggtcaagctgtatcttttatgtcctttatattgcatgtctatttctgttacacaatttgttatttcttcaaatttcctatggtagcatgataaatcatcaaagaacctgtttgggatataaaactctgatagaaaatatttaatgagtatcttgattataacctagaatatgtatacgttagtaaaataaccagatatactacagaactctctattggctcaaacaggttgacctcaatccaagtttactcttgatatcactctgttggctgaaggaggtaactcaaacctcaggtttgtttttcccgggacagatagtagtgatagtgcattatatttgaataagaaaaacaaaccagtataccttgagaaattttaaaaagcatagttgaggcatattttttcataattatatacttatctggttattgcccatggaatatttgtggaagaaagatttccttctgaatttggtactatcttcttaatttgttccaaagaaaatgctgccatactgcattccctctgcgaaggaaacaaaacaaaacaaaactcactcaaaaccagcagtgctgctatcagataagtagatgtcaatgtatacttacaaggaaaaactaaaaaatgtaatgtgttaattcagcctttttctatgtaatatttccaagtcagactttcttacattcctggaatttactttgatataccaagaataataatgataaaatgtttgctttgattactgtggggggaaagatgaaatgttcaattgtattaaaacaaacaagcttttcagagatactggtttcctgcccttgaagggtataaagaatttagatcatgcctgtaatcccagtactttgggaggccgaggcaggtggatcacctgagatcaggagttcgagaccagcctggccaacatggcaaaaccctgtctctactaaaaatacaataattagccaggcatggtggcgggcacctgtcatcccagctacttgggaggctgaggcaggagaatcgcttgaacccaggaggcagtgattgcagtgagctgagatagcaccactgcatgcaagcctgggcaatagagcgagactccgtctcaaaaaaaaaaaaaaaaaaaaaattagagctattgtgtctttattttcttaaattttgcccaaggtaacgttatatatcccaccacttcattgctggtttgggtacataggattttgaaagtggtatattaaagtctttccttccaagtattttgtaatacttgaaaattcttagatgtatactgctaacaaaagttagaacttaaacatttttgtttttatcatttatagcctagattagggacatatttgcatcaaccaaatcatcattagatttgaaaataggcagatgaatgaacaaatatggtcattgcactttccttttactttcagagtctaagtatattccttaaggttagtaaccagtctttattaaaaatataaaatttttcttcatgtctaatcccattgcatccacaatgctgtgatttatagtacatgatcaacacttaaaagtactttacatatgtgtgtttctgaagcaagttttcatgacctctgttagattctcaaaagaattcagaacttcaatttaagaatcaccattttaagaatacatgtgtacatatacacattaagcagtataaagcagctaaaattggcattggttttacactggtgcagtgtgcttaggtaaagtaacttcttccatgtttcaaggtcaggttcagagttgaatgaagtgtagatttaaatttaggattaggctttggaatatatcttgtttttattgtctcacatttctgatattgactacttatcccatattctgtttcaaattctttatcatatttcaagttctttctcatacttcttgatcttggcttaactaagcaagttagtatcagagactagttgactgaacccaagattaaacattttgcacttgccacaaaacctttcttagcattttgctttcaatgaatcagaaagtcaattcactaagagacagatcatgagaggaaagagaactagaggccaataaataaaataattgttcatatattaatgttcacatgtgaactacatatctaaaatcttggagaaaaatcaaggcaagaatttccagaactgtcctcaaatagctcatttatttaagttttgttaaaaagcaaaagcgaattgattacatttgattaacttttcctattccatgcacaagttaccttaaaacatgataaaaaccttatgggcattacctatcacacagtacttatgcataaacttataatagtaaaattactaatgtttgataaaataagatggaggcattacaaatagtctacagtttgtattttaaggaattggacatgaagaattctagatcattttgtgtctataaacccgactttctatcttgccttgggcaaactttctgtgcctcaatgtactctttaaatatgtgaaggatgctctttttgattaagtgttttgcactcctgaataaagggcatagtataagcacaaagtatgacttaatttatcacaaatattacacatcctatgttcttgaatgtgcacacttttttctcaataacaaaatatatcttaagtcagtttttttaatgctgtcaaaatttgtagaattttctttgagtatggcgtgatctcttcccaaatgcattttacagttttttgtgtgttctatagactatagagtcaaaatcaagagtattttgagaggatcagaagcatttaaaaatctatttttttctagtatctttcacagatctaaatatttagattctctttgcctttttctccatggaatacggtggtatcaaattactaatacagtatataaacttcgtttgcattggtggaattcatttagatctctcaagtaatattattttagggctatataaattgtgtttttagtgtaaaatgttatttgataatgtgaagttaaatcccttttagaaagtgactgaaaatggtaaaggaactcatcagaatcttagcgttcttaagttctctgataatttagtatattttattaatgatgtccaacacctctaagattgttgagaaaacatgaagaattgaggttactcttctcaggtgacactttaaatattaaaatcagaggcttcctgaacaaaacaaattgcaaaatagcgataatggcatgggagaggccagatgcaggactctggtaaatttaacttactttgaatatctatctaaattttagttcatgcatgttcttacttaatcctggtgtttttgctcttagatgttagagtttaataaattgtgatacgcatatatttttttacatgaaggattctactttctaattttacttttctgatctcaagaaaattaaacttgaaaaacggggtaaaattcttcaactattgcctcaagttcagttttgtcctattgtcctgagaaaggagatttagacttgtctgcctaacacaggtattttttagggcatcgtactatcccagagaaagtgttgagataccatggcagaaatataaaacctaagctttgaaccccagtagacttcttcttctgccattaagtctctctttatctgatattctaaggatttcttcaaactacttaataatttgtcaccattaactttaatatccagttttaatctgcactgtaatatcctgctttgagaagaaagaatgcctcataaattagagaaggacaaaacaaaatgttttggaaggtgatcctggctcctttggctctcataattgttttatagctgaaaataaaaagtcaggaaactgggcccggtgcggtggctcatgcctgtaatcccagcactttgggaggctgaggtgggtggatcacctgaagtcaggagttcgagaccagcctggccaacatggtgaaaccctgtctctactaaaaatacaaaaaaaattagctgggtgtggtggcacatgcctgtaatcccagccactggggaggttgaggcgcaagaatcgcttgaacccggaaggcagaggttgcagtgagccaagattgccccactgcactccagcctgggcgactgagcgagactcttatatctcaaaaaaaaaaaaaaaaaaaagtcaagaaactgaaattcccatttaagttctcaaatcagtgatctgtcaaaataggccttgtaactgaaataccttacaaagcagttctaactaatgcaatgtgttttttaaaaatttttaatgaaccttacattgtgaacataattgcaacatgttttaagacaaacagtatttaatccttgaagacctgtcttgtatgtctctcaattttgtcagaatttttattattgtttttcacatatgtgaaataagcagttttttcagggtacatagggtatctttgttttacagatttttaaagatgaggttttgaaaagccctcagaggtttttgttaaaagactatcttgcttaataaatgacagcttgttacagattcacacattacaagtaggacagtataacaggagattggtgtgtgaatgctacaaaacagtcagcaaaaggaatcatgtttgcttgtgaaacttcagaggtaccctgaaagtcatttcctaaagctagtgcgtgtgaatcttttccttgaattgtgcagaataattggattgaggcacatattttgaggagtagcaagtggaatggtataatgactacagagaaaattatcttgaaatatagcaaggaagagaaacaagttttctttctccactttattgttggactaattgggtcaatttgctgtgacatatcaaagatctctttgtgccaggccaagactggctactgagttctcaaagcgttttaatatatagattacgtatgagtgcctattttttcctcctcctttcattttttatcttaatacccattttacttctgaaataattcatctgttttgctttatgaccagctttaatttcaattgaggaataataacaaccctagagattcataggaaagagcattgaaatacattttttgcataaagatacctaaaaccatctacccagcttagggttgaactgaatttctgtgaaataaatttgttttaaatactaattattttaaaactacttaattcttaaaaacaatgtcatcagtttcaaaactttcactttgggaggatattccttaaaaggcatacatagatggtaaagtataaaatatttctgacagaattattcagtattattcaacatttactttcatgtttgttattgtaccacaaagatagtgtcattgttgggttaaaatgttggctgtttttgttaatatacttaaaactgtaaccagtgaataacacctgtagtattttttattatagattatattttatttcaataaactttgatatttagaccaaa

SEQ ID NO: 6707 - DNA, 4315 bp, Homo sapiens
gtatttttgaataattaccaagcagccgaagaccacccacgaatggttatcttacgactgttacgttacattgtccgcctggtgtggagaatgcattgacaggttctttgcggagccgagataccatgcagacattttgcttgttcaaaccaacaagacccagcaccgcggtctcctggtgccattattatgcagccagcggttctcttgtggagggggcaggtgacgtttcagaagacaccgagctggatgggactacctttctgttcatcaccacacagcagaatttctaatggaagtttgttgtgaatgtaaaggagggagcattctttgctttttaatatacaaaccatggttttttggagcaggattttgtgtaagaatggtgtttacatgcagtgtgttttccccctcaccttcaataaggtttttcaaaaaggaaatggaaactttttaaccaatttgtgaataacttttgtattaaaattttaagaacctacggcctattctcagaggattatgtaacccctgcagtggaaactgagccagctaacttaaaaagctgccttagtttatttttagagattacagaatttttaaacagggagacgtgtgatatactccctcccttccctactattgcctctctgacctttttaaattatttttaataccaaaagagttcttttgaaatggaactgattaaaagggcagagggtctgttgccagcctgcattgatataccagtcccatttgtaaatatttacgtacctttataaattcagttgcatctgtggcaaaatttcagactatttttgcgtctttcctcatcactttttgtgatgcaactccagtctggactcagatgcatagatttggtccagtgtattttcatgataaagtgaaattgagtcagaacaagagttaatatctgcctgtatcttgcacagttcgagcgatctgttattaactgggaagcatttggtgttggttttcattccatttcgacgagcatgttattgggaagtattctgaagaggcaatagcagtaataacaacagacttaagtgctacgcccctttgtgctgctggcttttctggttgcaggctttcccatggtcacaggatgcactgtcagcatcaggtcccagagggccaccgtgtccattacagcagagtccagctgcagcatccagctcacgccctcatgggaattggcacaggcctggggcagggcttctgatggccatttgcttggcctcctgcattttagtccaactcacagtccactagcttcactcctttaaattcactttgaaacaggcctcatcccacttccaccagcaccatagaagaataattctgggcagaagtctgttttttttcatttttccaggacagttggatattgtcaggccacttgtgaccccagccatgtagtgagggtgctctttctctgtgcctgctccttatgagtgcagtggaaggaagccacacactggtcagtcatttcagaggcagcagatgcccagggagacccaagaaagagtcaggttagggagcagtgaaagtgaggagggaagacaattctgtgaactctgtaactcttaaaatttttgaaaactccatcgttaaacaacttttaaaagaaataactaaattttcaaatgagtaagcagtgccaccaactagtgttttgcccgatagaagagccagcatgttcacgttatttaaattaggtggaaaaatctaaacatttttatcttcataatttaaaaaatatatatgtatatattgcatattcactttttcctttaggtagagatgatttcaatccaaatactcttactttaaaaaatttcctttccccaagaatctccttgggactttgacttatttttaaagctgtgttggagctcatcttgttccctgatgtgtctcgagcccattggtagggtcatacaaagcccacggttacaagcagtggtaggattgcagccgtgggcctgctggacacacacatacaccaaagatgtatttggatctgggcaccccctcccaggatccctgtactcacgtgccagtctcctgactagagcactttactctgtttcctcagccctgcagcccctgggagcacacactgggtgcagccctgggccaggcacgggaggccctgccctgtgctgcccaggggctgtgtgcaccacatgagcacatttccctctggcctggcggcctccaggctggctgtggaaacagttcctgaggaaattagagattctatgaattgtaggagtattaaagaccaggctgttggcaccagaacttaaagcgatgactggatgtctctgtactgtatgtatctggttatcaagatgcctctgtgcagaaagtatgcctcccgtgggtatacgtttttaccttttttaaaaaacatttttgtagaaaaaataattaaatcccctttttggaaacttactgcaggttttgtgccttgacaacctctccctatgtgaggtttgtaaaaagtgtcctgtgacttaacacagaaacgcaataaacacacacaaaatagtttcatgagtgattcttcagatgcccttcccaactggttagttgatcaagaattttgggggtgggggttgcggagaaatcaagtttaaaattccttctgattaaaaaaatatagtggaatacaattgtctgccgtttccccttcttaatgtatatattgtgagtatttattagattcgtaggtcatattacttatcaactgagccaaatgtctgtgtgcaattgtgtttcctttaccttgtaaaattttgtacagcataaataagtaaaaaaatcactgtttttctcaactttttcaaaatcaaggattgtaaatattgtagattctttttctgtgtgatgtgtcctactgtttcataatgctgtaacttgtagaaatattgtatatttattttctgcttatttaatgtcttaatttctgaaaagtattaacatccctgtctcccactcccctgccgtcccatgaagttaactcctgagagttgtcgggggtgactggagagctcattgcagaccacgtggtcctccagggtggctctccaccttcgggtcctggtatttccagtcaagtgggtttcaattcttgggctttgccgcccttatgatgaagtgtgtgtttgatgccagtgagaaactcagtctggcaggctacaaaattctactccaagaaatacccagcaaccttctgtttgttccaaagcaactagcttatcatgcaagcaaattttgctgactccaggctttatctttaggaaaacaaaaaaaccaaagtattatcagcaggtgggaaagatttttctattgaaaatttatccctgacaactcagcgtttagaaaagaaataaaatgtgccacttccagaggtgctgcattgcagttgttcagggctagggccaggcaggacaagtgaatgggtgggacaggtggctcctgcctaaggaccacctcaggccactaaccccttgtggacaactgtgagtagctgggttttcccccacctgctgtgcaacttcctgtgctttgaggttggactaacttgtcttcaggagctaattaactgtacagccctccccacgccccacccatacggtcactgcatttggtcagcctgcttcttcaggtcgatgccctccttctgatactccatctccttcaggggaggttggggccccactggactgggtgtcaagatgtgaaagcttatgggagctttaaggagacttcatggtggttccatgcaggtggttctgccatccctgctgatttagcctggtgcctgtgtgtgtccactcacgtacacgtggggtgggggaaacgtgtctacagatgacgctaaatcagttggggtctactctaaacagcattgtgtgtaagaagcatcctcaagctcccagttaagtaacttgactacttttatttgggaatttcagactatagaagctctcttatgttttatgtccagattctgtgaccactagttactgtatcagaactcatcaggtacccacttataaatagcactgatctggctgtatactgatccatcactaacctgttttctaggacccagcgtatgtagcatttgtattgcagtttccctggcttacttgtgttttgcactgatgaattttgacagggtaattgccactttacttgtgcaatactgctgtaaataactgcagatttttaaacaatcttttatgttaattttataaaaataaaactttcaactagtttt

SEQ ID NO: 6708 - DNA, 6601 bp, Homo sapiens
gtatttttgaataattaccaagcagccgaagaccacccacgaatggttatcttacgactgttacgttacattgtccgcctggtgtggagaatgcattgacaggttctttgcggagccgagataccatgcagacattttgcttgttcaaaccaacaagacccagcaccgcggtctcctggtgccattattatgcagccagcggttctcttgtggagggggcaggtgacgtttcagaagacaccgagctggatgggactacctttctgttcatcaccacacagcagaatttctaatggaagtttgttgtgaatgtaaaggagggagcattctttgctttttaatatacaaaccatggttttttggagcaggattttgtgtaagaatggtgtttacatgcagtgtgttttccccctcaccttcaataaggtttttcaaaaaggaaatggaaactttttaaccaatttgtgaataacttttgtattaaaattttaagaacctacggcctattctcagaggattatgtaacccctgcagtggaaactgagccagctaacttaaaaagctgccttagtttatttttagagattacagaatttttaaacagggagacgtgtgatatactccctcccttccctactattgcctctctgacctttttaaattatttttaataccaaaagagttcttttgaaatggaactgattaaaagggcagagggtctgttgccagcctgcattgatataccagtcccatttgtaaatatttacgtacctttataaattcagttgcatctgtggcaaaatttcagactatttttgcgtctttcctcatcactttttgtgatgcaactccagtctggactcagatgcatagatttggtccagtgtattttcatgataaagtgaaattgagtcagaacaagagttaatatctgcctgtatcttgcacagttcgagcgatctgttattaactgggaagcatttggtgttggttttcattccatttcgacgagcatgttattgggaagtattctgaagaggcaatagcagtaataacaacagacttaagtgctacgcccctttgtgctgctggcttttctggttgcaggctttcccatggtcacaggatgcactgtcagcatcaggtcccagagggccaccgtgtccattacagcagagtccagctgcagcatccagctcacgccctcatgggaattggcacaggcctggggcagggcttctgatggccatttgcttggcctcctgcattttagtccaactcacagtccactagcttcactcctttaaattcactttgaaacaggcctcatcccacttccaccagcaccatagaagaataattctgggcagaagtctgttttttttcatttttccaggacagttggatattgtcaggccacttgtgaccccagccatgtagtgagggtgctctttctctgtgcctgctccttatgagtgcagtggaaggaagccacacactggtcagtcatttcagaggcagcagatgcccagggagacccaagaaagagtcaggttagggagcagtgaaagtgaggagggaagacaattctgtgaactctgtaactcttaaaatttttgaaaactccatcgttaaacaacttttaaaagaaataactaaattttcaaatgagtaagcagtgccaccaactagtgttttgcccgatagaagagccagcatgttcacgttatttaaattaggtggaaaaatctaaacatttttatcttcataatttaaaaaatatatatgtatatattgcatattcactttttcctttaggtagagatgatttcaatccaaatactcttactttaaaaaatttcctttccccaagaatctccttgggactttgacttatttttaaagctgtgttggagctcatcttgttccctgatgtgtctcgagcccattggtagggtcatacaaagcccacggttacaagcagtggtaggattgcagccgtgggcctgctggacacacacatacaccaaagatgtatttggatctgggcaccccctcccaggatccctgtactcacgtgccagtctcctgactagagcactttactctgtttcctcagccctgcagcccctgggagcacacactgggtgcagccctgggccaggcacgggaggccctgccctgtgctgcccaggggctgtgtgcaccacatgagcacatttccctctggcctggcggcctccaggctggctgtggaaacagttcctgaggaaattagagattctatgaattgtaggagtattaaagaccaggctgttggcaccagaacttaaagcgatgactggatgtctctgtactgtatgtatctggttatcaagatgcctctgtgcagaaagtatgcctcccgtgggtatacgtttttaccttttttaaaaaacatttttgtagaaaaaataattaaatcccctttttggaaacttactgcaggttttgtgccttgacaacctctccctatgtgaggtttgtaaaaagtgtcctgtgacttaacacagaaacgcaataaacacacacaaaatagtttcatgagtgattcttcagatgcccttcccaactggttagttgatcaagaattttgggggtgggggttgcggagaaatcaagtttaaaattccttctgattaaaaaaatatagtggaatacaattgtctgccgtttccccttcttaatgtatatattgtgagtatttattagattcgtaggtcatattacttatcaactgagccaaatgtctgtgtgcaattgtgtttcctttaccttgtaaaattttgtacagcataaataagtaaaaaaatcactgtttttctcaactttttcaaaatcaaggattgtaaatattgtagattctttttctgtgtgatgtgtcctactgtttcataatgctgtaacttgtagaaatattgtatatttattttctgcttatttaatgtcttaatttctgaaaagtattaacatccctgtctcccactcccctgccgtcccatgaagttaactcctgagagttgtcgggggtgactggagagctcattgcagaccacgtggtcctccagggtggctctccaccttcgggtcctggtatttccagtcaagtgggtttcaattcttgggctttgccgcccttatgatgaagtgtgtgtttgatgccagtgagaaactcagtctggcaggctacaaaattctactccaagaaatacccagcaaccttctgtttgttccaaagcaactagcttatcatgcaagcaaattttgctgactccaggctttatctttaggaaaacaaaaaaaccaaagtattatcagcaggtgggaaagatttttctattgaaaatttatccctgacaactcagcgtttagaaaagaaataaaatgtgccacttccagaggtgctgcattgcagttgttcagggctagggccaggcaggacaagtgaatgggtgggacaggtggctcctgcctaaggaccacctcaggccactaaccccttgtggacaactgtgagtagctgggttttcccccacctgctgtgcaacttcctgtgctttgaggttggactaacttgtcttcaggagctaattaactgtacagccctccccacgccccacccatacggtcactgcatttggtcagcctgcttcttcaggtcgatgccctccttctgatactccatctccttcaggggaggttggggccccactggactgggtgtcaagatgtgaaagcttatgggagctttaaggagacttcatggtggttccatgcaggtggttctgccatccctgctgatttagcctggtgcctgtgtgtgtccactcacgtacacgtggggtgggggaaacgtgtctacagatgacgctaaatcagttggggtctactctaaacagcattgtgtgtaagaagcatcctcaagctcccagttaagtaacttgactacttttatttgggaatttcagactatagaagctctcttatgttttatgtccagattctgtgaccactagttactgtatcagaactcatcaggtacccacttataaatagcactgatctggctgtatactgatccatcactaacctgttttctaggacccagcgtatgtagcatttgtattgcagtttccctggcttacttgtgttttgcactgatgaattttgacagggtaattgccactttacttgtgcaatactgctgtaaataactgcagatttttaaacaatcttttatgttaattttataaaaataaaactttcaactagttttggtgagcgtttgatttgtttgcacaaaatgtcagagaaacagctgaaattatatatgaacatgtacacgcccacacatctgctattatcagtcataaaatgtagctgtgtgtagctcatatatttttgcttgaagacgaatccgtgcagtacacttaaaagtaaacgagtctttaaagttttgatgtggctggtgcgaaaagtattctgcctgcacagtcagatatgactcagcacttgggtggggagttgtgggggcagggaagtgtactaggagccggctctgtactgtgttgatgagtgatatggcaggtgcccagccatcttaccccatcaaccccataatagaaagggcttgtctgcagcacctgctcagggtcaaaggggtcacccaaacgtgcctagaccctgtgtgtgaaatgatgaccaggaaccgccaagttcccagctcccgtcatgtagggtggatgggaattgccttaggaatgagtgaaagaaattaaagcctggtttggggatacaggtgataaaatcctaataagtatttaatttggcactttcaccctaagtgctgggaaagtgaaagacagactcagctttcttttagactaacaatctgttaatgctttcaatcgggtgagtaatacatgaatatggtcttgtaaatttatttcaaattgtatttgtttcaaatcaaattgttctgtcttaatcctacctcctcactgaggtaggagtttgcattctcctggactcttaatctgcagtgtgtgtgtgtgtgtgttgtgtgtactcacacagcagttttgcttttctgtaagtgccatagctctgtatatggttctgacttagcaataggtcacatatctttccatagcgactccacttcatgctaactactgcagcaagtgccagagcacaggcatagaatttgctcataggtatcccactcttgtggtacagggaggtggaagatcagcctcaacagactctggaagacactgtcaaagtggcagctccacttcacacgggccctggcagcacataagaacacccacttacccccagtgctgtcagacatgagtgagctggtgtctgcctgctgggtgaggagcaagtggtgctcatttgaatttttctatcaatgcagtaggatgatcttttcaggcactggtggcatttgcctttttttctgaaagtttttgctaatttttggttgagtattttttctattgatgattagctctttatacattctggacaaaaaaatctcttatatgttggaaatacttttccttcaatctgttgcctttttttcccaacattttattgtgaaaacttccaaacattcagaaaagtcaaaagagttttacagagaatacccatgcactcactacctagcttctacctttaacttttactacctttgcattatcatgtattcatttattaatccggcttattttttggtgcatttcaaaacaagttgtcaccaatactcttatccccaaatacttcagcatcatttagagttcatcaattttttataatttttttctccaaagataaaatttacataaagtaaaacatacaaatcctatgtgtgcatttgctaaattttgaccaaggatacagctgtctctcaaacccttgtcaagataaagaatactaccgtaactcccagaaagttatctgctttccaggtaatccctcctctcctgcccccattggtaacctctgttctgagattcttttccgtcataaattagtcttacctcttcctgaacttcatattaatggaaccataacagtatatggtcttttgtgtcgtgtctggtttcttttgctcagaatatgagatccatgttacaattatcagtaattttttcctttttattactaagtagtagtttattgtgtgaccaacccatgctttgtctattgtcttattaatgaacccctgagtttttcccagtttggggctatgatgaataaatttgctatgaatactttcatacaaagcatatgagttttttttgtgaacatatgtttttattttgcagcatgttttttaattgcttgtggtgtattttatgtagaagttgtcattttaggtggtgggtgcctatagtcccagctactcgggaggttgaggcaggagaatggcgtgaaccccggggggggaagcctgcagcgagccaagatcgcgcccctgcactccagcctgggcgacagagtgagactccgtctcaaaaaaaaaaaaaaaaaaaaaaaaaaaaaaaaagaa

SEQ ID NO: 6709 - DNA, 16424 bp, Homo sapiens
ggcacccctttcccaaagtgttcaatggatgcaacaggagggagctggacaggtatctgcagtcaggtggtggaatgtgtctctccaacatgccagacaccaggatgttgtatggaggccggaggtgtgggaacgggtatctggaagatggggaagagtgtgactgtggagaagaagaggtgaggggtcacaatggtgctagtgggaggggaagaatttgcattggtttcaaaactcaaggtcaaagagaacacaattgaaaatttcttagtcacaggtgtttcctacatataactgtccaataccccatgaaaaatcagatatgaagaagccttccagttggagtgtttgtgccgcctctgctagtttgtggccagcatcgctagtgtccaggatcagttcttcttatgagtgtctggtctaaccagaaaccacgatcacgtggcatgttgactctgtcttcctcagtggagctgcacatgcctgcttgccctccagctgcacggaatttattctggaggccacacagccagatatatgggcttgaacaggggccttatgaggatgcttaaaataacaagctcatgctgtttaggctggaggagagatgatggaaaggggatgtaggaagtgctgtcaagtcccaaaagggctgctaggaggaactgtttatgtgtaaactctctccttccttctgatcttcacagtgagtgtggagggtacacggcagagcccggtcatttttaacaaatgcatgtggtttctgcagaaagcagaactggattgtttcgtctctattttttgaaggctgaaaatatgtatgtttatacatgcataacaatttggggtagataacaagtaacagtaaattatgggggtgagactgaggttctgtataaatggaaaaaaaaatctgattttatggccttctctctctcactctgttgcccaggctggagtgcagtgacaagatctccactcactgcaacctccacctccagggttcaagcgattctcctgcctcagcctcctgagtagctgggaatacaggtgtgtgccaccacacctggttaatttttttttttttgtacttttagcagagacagagttttgctacattgaccaggctgttctcaaactcctgacctcagatgatccacccacctcggcctcccaaagcactaggattgcaggcgtgagccaccgcaccctgcctgtgacctctgtgatgtgatttttctttttttaatgccagtatgtcactttcagaataaaacaagaactagtcaaggatgccacccccaccaccatgagcccagagagatcaacacagacccatcagaaaggagggagtggtatgaacatggagggccactggggttgaggaatggcctgagagtgggcatggccagttggcttaggttctgagcagttgctcattcaacaggcacactgagtgtgggctactgtgtctggtcctagggttaggatgagtggcaaaaatgacatagttcctgtccttggggagctgatagtctagtgggagaaacacatattgaaataattgcaaaagaatatatgtacagtccatggcaagtgctaggaagacaaatgacacagtgctctgaacatatataatgtgagggggaacctccttgcttgtgtgggaggtgacctggagcccatatctgaaggctgcattaggagttagtgaggcacgcaggagggaaggcacatttcaggtggaaggggagcctgtgccttcgtgggaagaaatatggtacattaggaaggcaggaatacaggtcttcctggagcccaacatggtgggagaataatgggaggaaagtgttctattccttctcttaggggagacaggtggacaggtgtctgtggtcaggggatgggatgtggctctccaatatgctagagccctggacagttaggggtataaggttgataaacatgaggtaggcctcaggcagacctgacttgaattcagcaggtgtgtccctcggccagctactggacttgcctgagccacagcatccctgtctgtggaatggggtcaaggctgcctcataaggctgtggtggagagatctgtggagccccgtacacttttcatcaatggctgatggattggcctgttaatactgtaagagtgtgatgaggacgctcagggtcactggaacgcctcataatcttttaaaaatctcaggctgggggagagcaaggaacccatggagatcttctgttccagaaaggtccaggccaggaagggcttaggaagagaagcagatggagaaaaaaatctaaggaaacagacccaggagttgacataaactgtttggagaggttgttccagcagactcttgcaccggcagccccttttcatgagataagaaagcctaggagggttgggggcaggagggcacccatgaaagacagggtgtctggatgttctactggggattagaaaaacaaaacataaaatttccatatactctgctaaaaagtccattttagaagactacatggttacagggagaaatacgcatgttatattaagtaaaaaaacactgtggatactatgattttgtaaagtaagtataaatatatatgtatgtgtgtagaaaatgccttgaaaaatattcatactcaaaatgtagctgtgtcctagcggggcatggtggtgtgtgcctgtggtcccagctacttgggaggctgtggcatgagaattgcttgaacctaggaggagaaggttgcagactgtctcaaaaaaagatgtagctgtgtccaagtcatgttactaatgattgtgcatatatatggttcttgtgacaagtacacattagcttagtgacgaagctgtcacatgatttttgaggtcaaaagtttccaggccaggtgcggtggttcatgcctataatcccagcactttgggaggccgaggcaggtggatcacttgaggtcagaagtttgaaaccagcctggccaacatgacgaaacccaatcgctattaaaaatacaaaaattagccaggtgtggtggggtgtgcctgtggtctgagttacttcggaggctgaggcgggagaatcgcttgaaaccaggaagcagaggttgcagtgacccgagatattgcatcactgcactccagcctgggtgacagatcgagactccctctcaaaaaaaaaaaaaaaaaaaaagagatagttgctagagagctggggttccaggggtgtgtgggcaagggtggggaaaatgttgggggtggtgaaggccctcccccactcacacccaccccactgcctccccaggaatgtaacaacccctgctgcaatgcctctaattgtaccctgaggccgggggcggagtgtgctcacggctcctgctgccaccagtgtaaggtaagtggcccttttctccacgccttgggccctggcctgacagtgggaccacaggactgctctgctggggtggatggctggggatttgcctccatcctgggctgtgatggcaacagagtttcagaaacacagagcggaaaaggtgccttgaataaaatttactattcctatactgggcctcactgaattcagatcatcccagaggagggtggcgcttctttggaaatggtacttttttttttcttttttaaagaagtatccagagagagtgggcttgattttattgagctcataaacaataataattatcatcatttgtattgacattaatggacctcttagtagatgccaggcactgtgctgggaattttatgtacgttatctcattctctcctcacaaaaaccccataaaatatatgtgactatccttattttaagatgtggaaactagagcttataggggataagaggtttatctggaatcaggcagtcaggaagggactgaatccagctttccctgactctggtgcccacattcctaatattgatgtgagagataaattgtctgttgctgctagtgttaccgtagaaccacaatctctcttccacaattctgaaattaagggagttctaaaagctgaaaaaaaatgtaaacacatttggtggcaaaacttgacctgaattgacatgagatgaattatagtctttttaaaaaaaaatcactcctaaagtgaatatttatattgcattacagaaatattaatatgtttgatcagaaggtgttatccccagccttgctggggggttatgtaatatacatatgtagttatatatgcggacatatgtaattatccatatccatatatatatatatatatatatacatacacacatgtgtaattatatatgtacacacatgtacatatggacctatgtattacaatatctgctttctaaatctgaaaagcctgaaccccatctggccccatcattttaggcaggaactgtgggcctgggcttctgcctagcacttgctgagtgctcgttaggggccagataccattcacatacttagttctaactcacgtttaatcacccattagtgggttattatcctgagttgtgggtgagtgagcacacacaggttacacagcaggtgcccaaggccccgctgccggttaaggagctgggatgtgtgcccaggcaggctggctgtggggcaggtcctctttgcctccacctgcctctggatggcagaggtgtgtcctgcagcctcctcctgcatacaccacccatgcccacacttgcgactgggcatccactctcagcaagctgctcagctggcccagtcttggcctgagagtggccggtggagaagcctgtctgccttctcctggaaggaccctgtgggtgggaggagtggcccaggagcaggggagggggtctgttctcagtcactggtttccttgcctggctctcggaatgtgcacggcatctggtttggctgtgcgtccccctgggaggctgtgctgggtcaagttcttccagtcttggcccaaggcctaagcataagcatggagtggaccccttcactccacacaagaatttccgtttgagcctcagaaaggattccctggtgtccaagactgacttcaaaccctggttgtgtgatttggggcaacctattaactctctgagcctaggttctttatctgtaaaatggaaagagtattagtaacaccgactacccagggaggctgtaagactcttcgccctttgccccaggtgtgctgttgatcaacttattgatctgcaaagtgggacaaatagcagtatctatcccatggaagctgtgaggatcccacgagatacgtgtatgtcacacactcagcccagtgcctggccccatagtggggatatattattgctgaggtgctttgtaaactcacagatgttatgtgaatgctagttttgtgtgtgtgtgtgtgtgtgtgtgtgtgtattagtgggcctggctcctctgccacttactatgagtctttggatgcatcgtctaacctctttaagcctacagattttatcatctgcagaagggataattatatcacacaggactgtcatgaaaactaagtgaagtcatatttgtactggacacttaagtgggagctgcataaaagtagctgctattactaaagcatgtaggaaactgtaaattgttgtataggtattatttcttgcctctttcttaagacttctatgaagagaaagtgagttagcatttgtgaaaacagcttgaaattctgtcagtattcacatgagaaggctgaaggtggtttgggctaatgaggtcatgtaaaaagtgctgtgaaatcatggtaatggaaaattctgttctatgagagtgatccttatgagcccttgggcaacagggttgagggtggggaggagattgactgtgttttcctctcattccttggctcagctgttggctcctgggaccctgtgccgcgagcaggccaggcagtgtgacctcccggagttctgtacgggcaagtctccccactgccctaccaacttctaccagatggatggtaccccctgtgagggcggccaggcctactgctacaacggcatgtgcctcacctaccaggagcagtgccagcagctgtggggacccggtaaggctctcctggggagcacggctctccccagcccaccacttcccagccagcctcccctggccctcagggtagtttggaatcttggcttcaaatggcacctctagatactacctctttcatccccttgactcagggtagatgttcagggagaaccagaggacagtgttccttcccagtcccttgatgcttttatttctcagagtggacaattgaataagagtaatccaaaagaaaaatgagcagaggatggagacagagaagcaaatgcaaatggcccttaagctatgaaaagacgtttaatctcagtcatattaagggaaagcaaagtataattatgatgaggtgagatttttcatatatcagattgcaaagactgaaagttaagataataataatataacaacaataataatgatatagtgttgtggagggtgtgaagaaacaggtagatataaccactatggaaagcaatttggagatatacttagaaatgcagctaacacttgcacatgtatgtgaggatatatttactatgatgtttactgcaccattgttagccatagcaacaacaacctatgtgtccttcagtagggaccaattaaattaattctggtacattcatataatgcaatgctttatggctaaataaggaggcagccctatatttactgaataaaatcatcttccacaaaaaattaagtgaaaaatgcaaggtgtagaacagcaaataaaatatgctttcaagccagatttggtggcttgcacctgtaatcctagctactcaggtggctgatatggtggcttgcacctgtaatcctagctactcaggaggctgaggtggggggatggcttgagcccaggagtttgaggctgcagtgagccactccactctaggactccagcccaagcgacagagggatgtaccatctcaaaaaaaaaaaaaaaaaaaaaaaaaaagactgggcacagtggctcacgcctgtaatcccagtactttgggaggccaaggcaggtggatcacctgaggtcaggagttcaagaccagcctggccaacatggtgaaaccctgtaactgctaaaaatacaaaaattagccaggcgtggtggtggacgcctgtaattccagctactcgagaggctaagacaggagaatctcttgaaactgggaggcagaggttgcagtgagctgagattgtgccactgcattccagcctgggtgacagagcaagactctgtctcaaaaaaaataaaaaaagaatatgcttccattctttattagatagattatctctagaagatacacacagaattatacctaggagatacagaaattagagatttaagtatctttagaaaatatactgttaataagtgctattcctccaggatgtagagaagtaggaactggatgactacaagaaaaattttccaagacatacttatatctttaaaatattatgcatgtatgacctattttttaaaatcttgaatcggaacatggcttcttcattagagagcaggcttagcatgcaaccctccccacacacaaatataaatcctcaataaggtaggaagaatttacataaaacaggccaggtgtggtggctcacgcctgtaatcccagcactttgggaggccgaggcggggggatcatgaggtcaggacttcaagaccagcctggccaagatggtgaaaccccatttctacaaaaaaaataaataaataaatacaaaaattagccagtcatggtggtgggtgcttgtcatcccagctactcgggaggctgaggtagagaattgcttgaacccaagaggcggaggatgcaatgagccgtgattgtgccactgtattacagcttgggtgacagagcgagaatccatctgaaagaaaaaaaaaaggatttatataaaacattattctctgagtagatcttgttgagaatatggggatggagtaacctggagggaacaggaagaagaggctgagtattccctcccagaaaatattcttaccttcatgactttaccaaagatacctttgcccttgggggcttctgacagatgagtatactgatagatgttgcttgcccacccaggagcccgacctgcccctgacctctgcttcgagaaggtgaatgtggcaggagacacctttggaaactgtggaaaggacatgaatggtgaacacaggaagtgcaacatgaggtgatgaccaaagggcaggcctcatgaaatgaggatgaacaagcagtttctgctctgtcctcactgttgcccaactcagcagtgtgactggccccagagctgcacctttacgtcaatcagttgaagtcagtcatctattctcggccccctgtttgacaatgcacttttcagctctgaggaagtcagaggagggtgtgggtggcagtgcttcctagaaagctgatcgggcttcctttggggaccatcttacagtagggcagggaatcagcccttttgggtcatttctgccaaattctaatcatgccctaatttgaatagctcctcattcattaattcactcattcattcatttattcatcattcattccaaccaaccatccactcatctgtctacccatccatccatccatccatccatccatctatccatccatctaccacccactcacccactgatccatccatctatccatcctccaccacccactcacccactcatccatccatccatccatccatctgtccgtccatctatccatctactatctattgaagatttactgtctatctactatctattgaagatttaccatgtgcaagatattgtgctgagtgcatggaacttctaattaacaatatagtatgacaatggcaatgtggagagagccatccaacccatcttagtgtgtcagagtggtttcccaaaggaagttatacctacactgagatctggagcagttacctcggtgaacagggtggaaggtggtgctggtgcataggagagtaatccaggaagagagatgaatagagaaaaactggtggttgaaagaactgagaacagtttgatacagttaaagtataatgttggggtgcaaaggagaaggtctgctgagaaattagcctggatagtttagcatggaccagatcatgaaaagcctcaaatgcatggctaggggagtttagattttagcttgagagcagtgtgaaaattagactcctatgaggcagactggaggcagggaaatcaatcttctgcagaccaggtaaggggggtggggcagtgtgaattaaggtagatagataataagatagataattaaggagggaagattgatagggtttgaaaatggcttgagcccaggagtgagggagaatggggagttggagatgaccccagatttctagctggaactcctgggtggacagcggtataaggggcaaaaagggaaagattgctcagctcaggtgcgctattcttggagttaaggacttttcgaggccagttctctggtctagatttgctcagggtcaaggagcctgttctcttcccttggtgtcagtccacatggaatctctcctggtgggttccaaagcacatgactgccctaaacctttgccccaccccacgcaagcctgctgtcttgatcaagaaagactgaagctctctggtgccccagctcttcctctgcctctgattccgcttccttccctctctgtctcttgtgcccagagatgcgaagtgtgggaagatccagtgtcagagctctgaggcccggcccctggagtccaacgcggtgcccattgacaccactatcatcatgaatgggaggcagatccagtgccggggcacccacgtctaccgaggtcctgaggaggagggtgacatgctggacccagggctggtgatgactggaaccaagtgtggctacaaccatgtgagtcccctcccctgctcacctaggagccagctgcagagcagagtgattgagaagtgaggtctgagggaaggatgcctgggctcagatgccacctcgccaacctctgagccttggtggctcccttcatgaagcgtgtatagtgacagcaggcacccaccccagagaactgtcggaaggattaaagaaaatcatcccagtaaagcacttaggtggcctagctagtgccactttcatcctcatcgctaattatcataggaattaaaaatggactaggagttagggaagcctgagcaaaataatagcacagactctatcctccagagtcgattctgataatgaaactatggaaaacatgaagcatttagcatagcacctggcacagagtactgtcaccatcattatttttaaatataatgttaaaattgatacatattaatgacaagtaattaacataatcaacataatagtcctttaatgtgataacacataaataatattgtattgttaaatatgatactttaacaatatatttgtcgttttctccctaatcacaaaagtaatagcagaatttagttggctgttgtcctgtccttagcgttgtgggctgttttccatttttcactttgatagtaacctgaagtgtgctgcctatttgggccctcatactttttttcttttaagatggagtcttgctctgtcacccaggctggaatgcagtggtacaatctcggctcactgcaacctctgtctcccaggctcaagcaattctcctgcctcagcttcccgagtagctgggattacagacacaggccaccaggcccagctaatttttgtatttttcgtagagatggagtttcaccatgttggccaggctggtcttgaactcctgacctctggtgatccgcccacctcagcctcccaaagtgctgggattacaggcgtgagccaccaggccgggccatgggtcctcatatgttccaagtgcaaaatcttgcctcctaactcccaaccagcatccctcccattgcactgatcgttctgttttctctccgtgcagatttgctttgaggggcagtgcaggaacacctccttctttgaaactgaaggctgtgggaagaagtgcaatggccatggggtgcgtgctgggttctggcttctctgtgtcatggggacgtcatgagggcaggccctgtgggtggctgatgctctctggggtgctgatgcctctgccctttctttgctccaggtctgtaacaacaaccagaactgccactgcctgccgggctgggccccgcccttctgcaacacaccgggccacgggggcagtatcgacagtgggcctatgccccctgagagtgagtgccagcctgctggggccactgcccgcttttgtgagaagagcgggcatcaggggcaggtggcatgttgcagagcatccacattgaatcagcttcattgtcctgattttgtagagaggaaatcaggataaagacagaccaagagagaggagcgactgctcatagtgtggtgtggggacacggttcagtctctcttctcccatcctttctactgaggagggggagcccgcttagtagagtgagagtaagagagactgtaggtcattgaatgttcccattctttttaggggacacggtgactatttctctttgggcacttaaaaataatcatgaacctgggacacattatggtggtttagatttcctctgatggacacaagttaaaatggagaaccagacactcagaaaattttatagtattttagtggatctctcaaggattctagcactatgatttctaaagttttttttttaaaaaaaatagcaaataactttaaaaaaaaagcaccaaaatctttcaaggaagaaaccccaatatgtaaaactgataaaaagtagtgttttgttagtacaaatacgttctctatatttacattaaccacttgagagaatattggggtagttttgatgaaaccaaatgttaagttatggattatgggtgagatgtctagtcttaaatctgtctgagtcttttcgtttctttgttttttttttttttttgagacggagtcttgctctgtcacccaggctggagtgcagtggtgtgatctcgacttactgcaacctccgcctcccgggttcaagtgattctcctgcctcagcctcctgagtagctgagactacaggcatgtgccaccacacctagctaatttttgtgtttttagtagagacgaggtttcaccatgttggtcaggatggtcttgatctctttaccttgtgatctgctgaccgcggcctcccaaagtgctgggattacaggcatgagccactgtgcccggcccataatgtgtgtttttaattataatttgtaagttaaaataagtaatacaaattaaatgcaaatcaaatgcctgaagaagaagcacgaatacctattttgaaatctgctgtagccgagacagcttctaaatctcccacttgggttctgtttctggaaggtgtgggtcctgtggtagctggagtgttggtggccatcttggtgctggcggtcctcatgctgatgtactactgctgcagacagaacaacaaactaggccaactcaagccctcagctctcccttccaagctgaggcaacagttcaggtatgacagggttcaatggaggactcagggtcaatttatgggtcacaaaggtctccataaatggtacttagcaaaagtgttggtgatagtgggtctaattcagggaagacaagtgcaagatacatgctgccctctcccctgctatgactgtgacaggcattactagttgatcttattgtaagtactctactgattctggtcatcactcctgagttcttctcagcagaatatccccaaccaaatcaagttgaaatataaaataaaatctatttgccatcctttgtctagttgatttattccccattttattttatttatttttgagatggagtttcactcttgttgcccaggctggaatgcagtggtgcaatcttggctcactgcagcctccgcctcctgagttcaagcgattctcctgcctcagcgtcctgagtagctggggctacaggtgcatgccaccatacccagctaattttttgtatttttagtagagacggggtttcaccatgttgaccaggctggtctcgaactcttgacctcaggtgatctgcccgctttggcctcccaaaatgctgggattacaagcatgagccaccatgcccagccccctctttgtctttttaaccactgttgctttaaagtttgtttcatctggtataagaatagctactcctgctcgcttttggtgtcccatttgaaaagtgatgtattattttggatatggaagatgtacagtctctgagtcacctattaaataacacttgttctggaggggattttaagtcccaggtctttctggatctatgcctgatggggattggttgatggctcgtgacacccttgtgtctcctcacaggggaagggtcttaaaagggtgaagagaaggtgctgagagagctctgctttgtataaggccaactctgtttccttgagagttctccattggccacacgtttttctacttaggaagatgtggttcgagaagaccaatcccactccctccagagcagacttgggaaagatttagctgcttgctggccgtgcttgggtcaaagggaactcaggcactgtcccctgctgaacatcgtcccctttcttttcctcccccatttcttgtttctagttgtcccttcagggtttctcagaacagcgggactggtcatgccaacccaactttcaagctgcagacgccccagggcaagcgaaaggtaagagctttgcaccactgaactttgctacttttcctttatccctcagggccatgctgtatttttctttttgagatggagtcttgccctgtcgcccaggctggagtacagtggcgccatctcagctcactgcaagctccgcctccagggttcacgccattctcctgcctcagcctcccaattagctgggactacaggtgcccaccaccatgcctggctaatttttgtatttttaatagagacggggtttcaccgtgttagccaggatggtctccatctcctgacctcgtgatccacccgcctcggcctcccaaaatgctgggattacaggcatgagccaccatgcccggccgccatgctgtgtttttctaagagcctctgtgggcccatgggattggtaataaaagcccttttattggctggagagacatgttatttggttctgacatcccctaatgactttaaaggttgcatctgacttctgggatcctcaggggtttaatagattggtgtgtctgttctccctttgggctctggtttatctcaaagagacacacaaggccagccctgagtgatttcttgtctcaggtgttccttgacttgtgcgtacaggtgatcaacactccggaaatcctgcggaagccctcccagcctcctccccggccccctccagattatctgcgtggtgggtccccacctgcaccactgccagctcacctgagcagggctgctaggaactccccagggcccgggtctcaaatagagaggacggagtcgtccaggaggcctcctccaagccggccaattccccccgcaccaaattgcatcgtttcccaggtaagtggataatcagcaaccttgggctgggaacattgcttttaaggccactttcaatgggtaatggcaaaggtggggaaggtgaaacttgtggggtcatgagctgactgccttttctgcaattcagtcaatacgggggcgcacagcaggttagagcaacgaacgtggggaaatagactctctaagaagctcctaaaccatgtggcattttctcccgggttggcctattttatgacaagccactacccaccttccaccccatattaacttctgtcagttcccccatgctcgtctgcctgctaggtctttgtaaatgctgcttgttctgcctgatacgctccttctctccttggtggggccacctcctgctcatcctcagatctgctcctagatgccgcttctcccaggaagtctatcctgattcctcaattctgaggttgatgggactgtacttctctcatcatagtactcttcctaccaaattgtacctattggtaccttctactgattggaaagtcttagggatgtatcctgatgccttgcccatcccaaggggcaggtgcctctgggaggtgagagtggggtctagactctcccccaccagccctggtgctcttggaggcatagcctgcccagcagcctgttcccactgcgtgtgtgtgctctgatggctctgaccacaccttctgcaggagatcccccagtgcagacacaggtgtttcctgggtggcggccgggtggggtgccttctggaactggcctgtgtgttttgggtgtgacccctcaactgagactgctttctctgggtgtaatccagagggctccatggaacccaagctgtctctgaccctaaggactctggggttggctgcaggctttggagggtccttgggatgtgtggcagtggtacagtttgggaaggctgagggcatccattctgtttctctgctgtgaaactgctgctctccccttccttttatgtggggcagaggtaggatggaaaaatccatgcagaaagagaggaaagattgacagggagagagaaggaaagaggaaaggaaaaaagcaagagaggggaggagtggagagagagaggtggagagtgtactcgtgtgctgagggtgctatagcagagtactgcacactgggtggcttcaaaacagacacttattttctcacagttctagaggctaagagtccaaggtcaaggtgctggaagggttgatttctgaagcctctctctgtggcttgcaggtggccgccctcttgctgtgttctcacgaggcctttcctatgcacttctgcctccctggtgtctgcctgtccaactctcctcttcttatgaggacaccagattggattaggtggcctcattctatcctaatcacctctttaaagaccttatctctaaatatggtcacattctgaggtactcagggttagggcttcagcatatgattttttttttttaaatgatgagtgcacagttcagtccctaacagagagatgaaagaaagggagaaagcaggcgtgtagagacttggggttacaggagaacaggagtgccagcagagggaggagggagtgggtcgggcgagcagtccactcagactgttgttctgaaaaacccacactagaggcatgttcagagaacacggggccagcctcacccctgtcacccctaggtgctgagccgtaggtcaggaa

SEQ ID NO: 6710 - DNA, 445 bp, Homo sapiens
ggcctcataggattgaagggacttgcccgacattgcacagttgtgagtggaggagctaggacttgaacccaggtctcatccagctgagtgagacagcctcctgccctggggccactcacagtctccagtctgccatcaaagattccccacctcctagctgggggacatggaccccctggagaagtgatagatgaaacctcatcacttcttcagttctgctattctaaaccggcttatgcacctgcactctgggccaggcaatgacgaggaaggcagatggcagctttgcctccaggagctcacattctgctggggcagtgactctgggatatgtgtcactgcaacagtgatatgtgctgtgaaggagaggctcagggtgctcagaagagagtaacgaggatttgacctaatctgggaaatccaggaaggtttccctgaggtggtg

SEQ ID NO: 6711 - DNA, 328 bp, Homo sapiens
gaattcttttttttttttttatactttaagttctaggatacatgtgcacaacgtgcaggtttgttacatatgtatacatgtgccatgttggtgtgctgcacccattaactcgtcatttacattaggtatatctcctaatgctatccctccccgcctcttgctaccctacaacaggccccggtgtgttatgttccccttcctgtgtccaagtgttctcattgttcagttcccacctatgagtgagaacatccggtgtttggttttctgtccttgcaatagtttgctgagaatgatggtttccagcttcatccatgtccctactaaggac

SEQ ID NO: 6712 - DNA, 4860 bp, Homo sapiens
  SITE (4173): n equals a,t,g, or c
gagcagaggcagcatggccaggaatctatactcgagctactaagaggaaggaagtcgcagcaaaaatagcctgggtggggtggtagaaaatattaaggggaaaatgagatgactggggtggcgttgaagaagagctgcttaaagagaaacagggacacacgctgggtaaggaatcgcatgctgttgaaactgacggtgtggaaggaaagtgaggtggcggcggctgggctgtggtagaggaagccgatcaccagtgagtgaaaagggaactagggtacccacgcgtttgtgttttttatttaaactttggctaagttttgctaggagcgttttgcctttttttctcagaccttctactcctgtcgttctcccctaagttctgggcatgtggcttcttctctacctaccagggtagcctgtcattgctttaaaggacaaaatgaaatccctgatgggcaaaatatgtcccccctcttcccccagcttttggtcggctttgctcacccaccaacagctaggagctggaaggctcagaagagctggggtgggcatgggagagacagaggaaccccggtggctggaaacacagttccttcccagggtctcttcagcttgctggttggacctcttagcctgcttatgaagcctgaattgacatcatgccaactggtctcctgctgataagtgattccttaacttcctcgggagcagcagaaacttgttttgaaaaaaatcagattctaaatctttacagctgtttacttctgcaagcacaatggccgtagtaaggaattcaagtcacagcgcagcgtggcagggaaggctctgcatggagtcacaggacaaagcctgtcctggaaacgtgctggaaggaagtcggcctcattctttacgacgggcagcagctccaaatgagaaaccaaggggcttggctctgggtcagtagcatctgcctggcatgcggtgccagctgtggagaccagtgaggtggcagcagctgcactgggctcctggggtgtgcgtggggacctcaggggtttaggagctgatatacttttggttctcatcatcttgtgtgttccttgcagacacagaatgttcagcttaacaaagaaatgacacttgccagcaaccggagcctggcagaaggaaaccttttgtaccagccccagctggacacgttgaaagcacgcttgacccagaaataccaggaactccaggttctctttgaagcctatcagataaagaagaccaaattaggtaactttttaagggtgatcattcgagaataaagagttgagagaaggacacattttcaagctattgccctaccaggaaagaaatattacggaaaaatttcaggttaagatagcgactctactgcaatgaacaaatagcttatgtatattatttatttatttttagagacagggtcttgctctgtcagactggagtgcagtggcgcaaccatggctcagcacgacctcctgggctcaggtgatcctcctgtctcagcctcctgagtagctgggaccacaggtgtgcactaccccaagcaggctagtttttcatttttttgcagagaggttgtcttgctatgttgcccaggctggtcttgaactcaagccatcctcctgcctttgcctcacaaagtgctgctattacagacatgagccactgtattggactagtttatgtatggaatatggagggcccccagacctgcggcctctctgcacttgcggttcgagagggcagggtgtatagcaggactgccccctcctcccagtggccctgactggtggcggtgactgctgaggtcagcccaggtccacacgcacctccagggtctgcagtgtgaagcaggttgcagaaacgtgggtacctcggggcagttaccagaaaaggggctggagattaggaggaagccagccagtttagcagtcaccagtttagaagaggagacttaaccactttttaaattcaagaccccaccttctctaaacagcatagaaaaagctttctgaattatgatattaaacagatgtcttatgacgtttgcccgtttgtcttatgctgtttgttaatggtaaaaaaaaaaaaaaaaaaagcatcactgaaacactttattttaatggcatactttaatttgcagccattaggaggagacatcagaattaaagattgttgagcatcctaagtgcttttgatagttatcaaagggacatttagataaagtcagagctgggggtggtggcacacgcctatggtcctagctacttgggaggctaaggaaggaggattgcttgagccttggagattgaagctgcagtgagccatgattgcagccctgtactccagcctgggcgacagagcgagactgtgtctctacaaaagaagtgaaataagctgggggtggtggtgctcgcctatagtcccacctactctgaaggctgaggccacagtgaactgtgattgcattactgtactccaccctgggtgacagagaccccatccctttaaagagtttgggttaaagatcaccttctgcagtgaggtttacagtgatgtctgtcactacttgctatcatcttgtcattttctccattaacttcagtaaaaatttacgatcatacacccaaaccagaatgacgaaaagtaaaaagactggcagtaccaagtgctgtgaggtgccgtgcatcttgctggtaggagtgtccatgggtcatctggggcttgcaggctgcactgccacagccacctccttttctcatttcacctggggaaggctgttgggtagcacctgctagaatgaagagtgtgtatgcgctgcacagcagttctgctccctgggtgtataccatacagaagtggatattaatgtctctcagaagataggtacaagaatgttgtatctttattaccttataataaaatttggaaacaataaaaatgtccgtctacagagtgatgggcacataaagtctgtttacacaatggaacactacacagcattggaaagaaacgaactgattcacagacctgagcagggtctcagagacgcggtgctgagtgcaagaagccaggagagtatgacctgtactctctgattccaggatgtggagtcaagaccaggcggacctcctctgtggtggtggaggccagcgtaggggttatctggcgggtgcagtgggcgtgagggcgcccggtggaaaggttctgtgtctggatctggggggtggtggttggcggttaaacacgtggaaatttgacttacacacttgagatgtgtatactcgatgtaagttaccactcaaaacataaaggaaatacaaagtggcatgatgagaatgtcactgccccatatttgaaaacagctggttctagaagcagctggtgacacaggttgctctgacatgggatgttggcccctgggcactggcttggtgcacttgttcccctgtaggttttcaagcctttcacattcagcttcctggaaaggaaggtgcaatcctgccgtggttggcatcatgaagggctttacctggacacctctcacttttgtcatacctcttgctttttttccagacagacagtctagcagtgcttccttggagaccctgttagcacttcttcaggcagaaggggccaagattgaggaagacactgaggtaaagcccaccagccttggtggaatccttggggcgctttgggcagtccgtgggcccgctgcctccagggaccgtgagtgccacaccgccacggccaggagtggtgcctcccaggtgtacgggctgtataccagcaggcagcctggcctgtgtgctggggaaagtgccaggcaggggtccagggagcagcggggtgagtgagggcaggtccgagcgagggccaagagagggcatgcgtgccaccctgtgaacgccggcccctggggccagtggcggattaccacgtgccgtcgttcaagggccagctgggaggaggctacagagcttctgggacacgtccagctgcgcattagagccttgagcctcgccaggcgataaggaaatgagtcaaggtcgaatgttgtgcaggtggtgcaggctggggccggcagggtcttgccaagatagggctgggctcgatgaactctgaagccctgggggcacaggtgtttctgtcttgctnacccacccagggcgagtctgtcagtcagggtgcagccgggtggaagcaaggaggtgttggactccagcgggctcgagagaggcctgggacccaggagtcggagccctcacccaaaggccagctcctccccccgtcacgctggtggtggggtgcgcagcagggctgtcgtcctctccacctagtggcagctcatgctgaagcctgagcccatgacctctgggatctggagcaggagcgaggccctctgggtggttacagggagggggcagtgttggaagcagctggcgttgcctctccttgtgcctagaccacgaagggagcatcctccccatctggctgtccctgtaaccaggtttctgcctctttcagaacatggcagagaagtttctggatggagaacttcctctggattccttcattgatgtctatcagagcaaacggaaactggcccacatgcgacgggtgaaaatcgagaagctccaggagatggtcctaaaggggcagagactcccaccaggccctggccccgctgccccccaggctgcccgaactggcacctaccgccccccttccctaccctgccccagagccagtgggcctcctgccgttgcacctcggcgcatcccccccccaccacccccggtgctgcgggacgcttagccaccccgtttactgcggccatgagtt

SEQ ID NO: 6713 - DNA, 428 bp, Homo sapiens
gggacaggccgtgccgtacccaggattacagtgcccgcccctgcccccccgcgtgggcctccccactcagcaaggattctcttcgcagttcgtgtccccatatccgccacctctccctcagagacccccgccccggctccctccacaccagccgggtttcatcctccagtgagcgccggcgcggtccttcccgggagacttcttccacctggcgtgttgtgctctgctcacgggaaggaggctggaggtccgctctgtgccaagggctctggggccctgggccagcgtgtctgtctgattttagaactgtaggtcagtggtgagtagtaggagcccaggctttgggcatcaaggcagttgtgtgtgccgggttacagcctgacacctggcgttgcatcggtttgcattatccgtgtgatttctaagta

SEQ ID NO: 6714 - DNA, 356 bp, Homo sapiens
agttacgtattcagctttattaaaaagtgcctgttttccagagtggccatacagtggtttttgtttgttcttttaaatgacttaacaatggaaggaaagacgcttctgcatggcctggcatagaaagcccatggagagccgccctgtgggtggggaagcgggtgacgggagccccactgcttaccagaaacccgagtgaaactgcgtctttccagtcccaagattctccttttttgctaaaggcatcagaagagatgaaagcatttctaccacccacatttcgaggacactcctagcttttactttagagttgggagagaggtttggttttcattgtcatttaaatcctgttgggt

SEQ ID NO: 6715 - DNA, 26210 bp, Homo sapiens
caggaagttcagaaacgttttcctgacggcatccccttattagaccctattgatgatatgggcattcaagatcaagggctgaaaaaagtcattcagaaagtagaagcttttgagcatcgaatgtattctcatccacttcacaatgatccaaatttggaaactgtgtatacgctttgtgaaaaaaaagcacaggtatggcagaaatttggtttttatagtagaattctatatgtttcactgaataaatatgtgtttgtcattttcttatcctgttggtttaattggctaaaacaggaaaatgtgagctatcttttaaataaactgtcagctctgaacctgtcagctctcatcagcaagacaagataaagttcattttgctatagtttgatatttcacataggatgttctgttttttcttcttttttaaatttgagatataatttacacagcatagcattcacccttttaaaatgtccaactcactggtttttagtgtattcacaaatacttgcaaccatcaccactatgtaacttcagaacattcttctcaccctctgaaggaactttatacccattagcagccactctctgtttctcccatcctccagcccttggcaatcacaaatctttctatctgtatggttttgcctattctggatatttcttataaatagaatcatgtaatatatgatgtttgtgtctgctgtctttcagttagcatgtcttcagggtttatgcctgtcatagcataaatcagtacttcattccttttaaggccaaatcttgtgtgtgtgcgtgcgtgcgtgcatgcgtgtgtgtgtgtgagacagagtcctgctccgtcacccaggcttcagtccagtggcatgattatggctcactgcaacctctgcctcccgggttcaagtgattcttctgcctcagcctccctagtagctgggattacaggcacgcaccaccatgcccagctaatttttgtatttttattagagacggggtttcgccatgttggccaggctggtcttgaactcctgacctcagattatccgcttgcctcagcctcccaaagtgccgggattacaggcatgagccaccgcacctggcctggctaaattatattttgttatgtggatatgccatattttgtttacccattcatcagttgatggacaggacatttgtttttttctaactttttggctctgatgaataatgctgctgtgaacatttgtatacaagtttttgtatggatgttttgagttctcttgagtggaattaggtaggattgatggatcatatggtaactctatatttacctttattctcagaaactaccagactgtttccaaaatggctacaccactttatgttctcactagtaatttgcaagataactgctttctctacatcttcgccagcatgtgttattgcctgtggtttttgctgtagccatcttaatagcgtcaaatgttagtagttcagctttttagcataattagctgtaatatctaaccagtaaaaccattattataagcattctgtatagcaaatttagaaaaagctttttgacgtgaacacaatcctttccactacctactttttttcaactggaatgtattatactatacaaatctcctttcctccatgaaacttacaactccttgctgttgtactttttcaacttttatcacataccacttttatcaatacatttgtctttgtgtctcacaaactagattttaagctccttagagtcagatgtttcattttaactttacattttctcataatggtctgtctttataaagtaaatgcccagtgtttgttggataaatacatgagtagaaactcctttaatagagtaatgtgttcagttcatagttttaaagcactctcccttctagctttttgtgaacttacatcatatggtgctgtagcatatacacaatactggctgcatgctcagtgaacacatctatgctctgacccaccttcaagtgctgctaggcaggaagcttgccaggtacttctcaagatgaggaaactgggacacaacaaactttcattacttacacagatatccagttgtgattctcacctgttcatctcttaaccaggaccattgcagcagctctctccctgctgtcagtccctccatggccaccagggtcggccttatgttttcacaacacaagaacaggtagacttgagcatgattgaatgattggaaagcatccttggaggtggtttgaaggcattatctgagctgctcaaatatactgaaaaagaccttgtctggctgaagggactggctaaataaagttgttatggagactctgcaataacatgtaagaaagctcatgcataagcataacatgaaaaaaggatctgaaattgaagtggactatgattactatttagcaaaaatataaaatacaccagaaaagactgaaaggaaaactataagtggttgtgttacagcaataagattatagtggtcttttttttttcttttcctgccccctccccatcattgtctataatgtgcttatatgtatataagcacatgatatataaatataagcacattatatgtgtgtgtgtgtgtgtgtgtgtatgtgtatgtatgtgtgtgtgtgtgtgtgtgtgtgtatatatatataatttcttttttttttaatggaagaaaaatacagcctgggcacagtggcttactcctgtaatcccaacactttgggaggccaaggcgggaagatcacttgaagcccagaagtttgagaccaccctggacaagatgatgagacccccatcactgcaaaaaaattttaaaaattagccaggcatggtagcatgcacctgtcatcccaggtactcaggaggctgaggtaggaaggtcacttaagccaaggaggttgaggctacagtgagccatggttgcacgactgtactccagcctgggtgacagagtgagaccctatctctttaaaaaaaaacaaaaacaaaaaaaaagtgtacatgtgcagtccagacattttttttcccaatatttttgatccacagttggttcaatccatggatgtggaacccacggatatgtagggccaactgtatatctgtgttcttttataaatatgttgggaaagatcttgtacagcattgtctggtgtcagccacatttaaattttttagtagccacattttaaaaaagaaagaaaaaaccagtggcattaacttcagtaatatttttatttaacccattatatctaaaatatttcacgtatttttatattcaaaatacaaacattactcaagaaaaaatgtcttaaatattggactctcttctaccttctaagctttataagcctcacagttattagcacgatgctttgctctgctcacataggcatcctcagtcacttcagtcaaagaaaccctaaaaaacaatggtttgttccttttactctggtaggcctgataagtcatgctaggtagcatagcattcattgtctagcttggaaagcattgcttcctatgacatggcattgtgactacacatctgttcatagaaatataaataatcactaagagcttgcatctagggtctgataccctgggtttgaaccccatctttatcactcagtagccctgttcacagcaatataaataattgaaaagagcttggattctagggtctgctagcctggctttgaactccatctttatcactcagtagctctgtattcttgaccaatttacttagtaatctctccgtgcctcagttttctcatctgtaaaatgcagatttaatattagttccctaccttttaggattgctataagaatgaaataatgtaaagcactagaaatagaggacattggtagtctctgaataaatatcagttgctgatcaccttcataatttttcctccttagtagaagtttaataaacagtctaaaaaattccattatcttcggatttcaacttatcaaaacttttctgtcggtgtttttctgaaccaccacttcaggataccattgttttttgttcttgtactactgtatgcttgtcatagtcagaaaatatgtaatatttactgattaactaaattttaaaacttatctactctaaaggatgacatcaaggtgatacattttcattttaaggtttcatttatgttttgaataaaggcctattctctttgctaaaaccatttccagcctaggcaaattcgtgatttaacttaagggcaaagagaaggaatagttttcaggacatcatgggggaaatatagatagtcaagagaaaagatttctgtaccctcatttttctttccctgttctctaagctaccccctgatgccctaaggatgaaaagctagagctgctgggattggtacttttggaccgtgattaattgtctagtgaatcctgtcttgggagagcctatcctaaattcaccactgactttttctactcttacagcctaccttgtctagctcacaatatccagctcactctcctccttctagccttcctccttacctctctccatttaagcaagagctgtgctctgttctctttttttttttcttttttttttttaagacggaatctcgctttcttgccaggctggagtgcagtggcatcatcacggctcagtgcaacctctacctcccgggttaaagcaattctcctgcctcagcctcctgagtagctgggactacaggcatgcgcccgccaccatgcccagctgattttttgtatgtgtgtttttagtacagacggagtttcaccatgttggccaggaacctcgtgatccacccacctcagcctcccaaagtgctgggattacaggtgtgagccattgcgcccggcctctgttctctgtctcaagctttttacactttctaacatctgcttgctctgcctcaaatttttcaaatggacattttgtattttccatgtacttaatattttaggtagtatttaataactttacagatacatcattactcttgtataatgttccgggaatgtatctaagaagctccagtttccccagtctccccagcactgaagctttaacccagaagtatactgtaagatgttctttaaaaatattttttgtttgatttcatgaataaatctccttgtacattgttcactttattattgaactttctttatactttcatgtgctttagattgcaatagatattaaatctgcaaagcgagaactgaagaaagcaagaacagtcctacaaatggatgaactcaaatgtcgcaaacgtgttttaagaaggttgggatttgctacttcttctgatgtaatagagatgaaaggacgagtggcttgtgagataagcaggtaaaatctggttattgttctagaaagttcattttttttttcatttttaattttaatttttgtttattttttttgagatggagtctcactgttgcccaggctggagtgcactggcgcaatctcagctcactgcaactccgcctcgcagttttaagttattttaaaaataaccattatctttaggaaaaaagagctttcttaaaaatataaagtttgtacaatatcttccacactaaatacagttttgaaccatgaaattgagaaattagaaaaatcttagatctcagtaattaacacaagcgctcctagcatttgtatgtatttcctttgactttttttaatgccttgtgggatttttacataatcttagcttatatataattttgtatactttttaaaaattattaacattttcccaccttgaaacttagcctagtaaccattatcttgttacgtgcatagcaaattgtaatgagattttgggctaataataggattttacaacagaacttattataagccacagattaaaactggttatattattttctgtttcagtaatcttttgtcacaaatgacctcaaaactaaattatttacaacatcaacagtgactttatcctcttattgtttttatgggtcagaaattcaggaagagctcatttggatggttctggctctgtcccccaggattgccgtcagacaggtggttaagctgaaacagtaggagtccggagcggctggggaatgttaggacctctctctctctgttagagcttctccatgtggtctctccatgtgggctggtttgggcttcttcacagtatggcagcagcctcaggatgcttacatggtagctgaaggctccagtgtgagtcttctagctggctaaggttgccttttctgacctagctttaccttttgtaacctagctttgttatcatacaccatcatttccaccacattctcttgattacaggtgagtcataaaccctcctggattcaagtgggggataattagattccaactcttgatggggaagtggctattgttcagtatggctttctgtgataattggattgttctgtgtctacactgttcagtatagtagccactatttagcatttgatgtgtgcttagacgaaggaactgaattttataatttatatcattttaattgaaattgaaatttccacgtatgcacatggcagtctttatagatcagtgcaattctagaagaacgtggtataggagatgctgttgtggccatctttagaaaatacaatttatgatactgttctaaaaaatgtgttcgttatttcccaccacgaggaatgtctcctgccttaggagccagcttgcctctgtcctccttaactggaaagtcataaactggtagctcaagcaatatccagtctgaagatatatcttgttttgtccatatagtgatgatcatcattctcagtgaatatataaaagacacttttgaaacagttttttatgtactcagcatggccaggatggacaggactagagaattacaggccttgtaaatgatttcagactttcttggtaaaaatgtaattatatcgttcatctgtccagatgttacagactcagatgtcttcatagaaccaggagactgtggtgaacaggacaactcttagccaccaaaagggggcagtgactacccagccctagttagttgttatcacaggataatgtgctattggattttaattaataacatatccaggattaaatctaaactgcagtactggtctactgatttatatgctaatgttattgggattatttccttctaataattacctgttttacaattaatatagaaattaatttcctttagatatctacaactagattttgtgttgaaagaatggaaattgattttattccaagatacatttttcatttatagtaataacaatattatatcaaagtttgttaactttcccccaaatttgcaaaaactggggcatcatcctagactccttctctcacccattttgcctttttaaacattgccactggctaatgtgtatccctcattatttttggcctcaattactgcagttgccctcctgattattcgttgcctcccttcttgagttttcaaaacccaaagcacaaatctggtatgtcgttcctctttccttcttgagatgggattttgctctgttgcccaggctggggtgcagtggtgcaatctcggctcaccgcagcctcaacttgccaggctcaagtgatcttcctgcctcagtctcccaagaacctgggactgtaagtgtgtgccatcaagcctggctaatttcttttttaagtttctgtagagatagggtcttgctatgttgcccaggctggtcttgaactcctgtaattaagcagtccgcccaccttaccacccaaattgctgggattacaggtgtgagccacttcacccagcacccagcccctttgtgccattctatttggtaaaagtccctcagtgattccttattgcttttagaatagattccataatttagtatattgttactctccctctccagcagtctgttgccacaccccacacatgcttttccttttgcttcatatgacctttcacccccaccccatatcctgcgattcttgcatatttttgcaaagaacttcgaaacttgctctgaacttcttcaatctggttttaggctcctcacctttttttcctcataacacttgtataaatcaattattagagcactctgttaaaccactgttctgtgattatcaccttacttgtctgcccccaatgttagactgtagcttcttgaaatagtctttcctcgtttgtattgttgcactctttgcttgacttaactcttaagcttaacactagagacccaaatttagtttttgacttttatttataaatattttaactgtcagtaaagattataatagttcatggctttattcttttttaaagactttgcaaaaaataaaggcaaagtttacttttttaataatacagtacagttattgtatgggtcaattgaaccctgattatagaagtctagaaacatcatctttgtagtgtttcttttttagcttgaattgaacacagttgcaaattcagaatttttcattttccacccaagaagaaaaataagtgaagatattttgcagttattactcaaatcagaagataaacacaaagggacaaaaagcactgtagtcaaagtgataatggtgagattgattatataagcaaagtctcagaccctaggtaaattctcagacataataactagtgcatgaacaatatttttatttatttatttatttatttatttatttattttgagacaaggtctagctctgtcacccaggctggaatgcagtggcaagatcatggctcagtgcagtcttgacctcctgggcttaagtgatcctcccacctcagcctcctgagtagctgggactacaggcgtgtgccaccacgctcaacttatttttgtattgctttgtagagacagggtttttccatgttgctaggctagtcttgaactcctgggctcaagagatctacctgtttcagcttcccaaatgagccaggagccactgtgctctgctgaacaatatatttctagggatatatatatatatgagattattattcatgtaatcattcaacagaaagggcctagttatgtaacgtctatgataagaacctggaccatctcattttgctaaaaggacttgtaataatagtctttcatcttttattatttgtgcaccaaagtttccttatatggtccacaagtggtcaaatacacagttgtgtatataaggaaattggaaagagatgatgaagaaattttttaaaacctgttgaattgatcattctaatctttgtaataataaatatattgtccttataagtctgtatatgaaaatgtttcacaattatggagcaaagaagatgaccttcctctcaacaaaatcaagttgtcagtttaaaaaactgtattttgatgatgcaaaagaggaatcaaaagtaataagctagaacttaaaagagatgtaaatctggacttgtacattttgacagtgcaagtgcaagaagaaacagacgtagtgatgagctagtacctacctgttagagatgtacttgaaatctagaattgtatttcctagatggatatttttcagatttgtggatgacaattggtgagcagcagtttgttgcatttaaaggctcttgcccatcttggttatatacactttcagcctttggaaaatatgaattaaaatgtgagtcttctggccaggtgtagtgtctcacacctgtaatcccagcatttggggagaccgaggtgggaggactacttgagctcaggagttctagaccagcctggacaacatagcaagaccccatctctactataatataaaaactttaaaaaattaaaacataaaaataaaaaaatgtggttcttcttatgagtacattctaattaagatttctaataaaattgtttttcattatctttattctacagattatttgtaaaataactgaaaaataattaaaagagtcctttggccctagaaaataaatgacagtgatgatttttcctagcatactaaaggttaagaaattgttcttatttcacgaatgtgtgcattttgatatttggaatctttatgtgaaatccccattttacattgattatataatatattggtaattattaaagatctactatgtccttaaataaatcattgtcattcctcattgattactccttaaggtcaaataatatattttattaaaaactacacgttaagggcatatgtgtgtgcatgtgtgtctttatattctgacattttaaatttattcttttgttttgccattgtagtgctgatgagctccttctaactgagatgatgtttaatggccttttcaatgacctttctgcagaacaggcaacagcattattaagctgctttgtgtttcaagagaatgtaagttaattgattcagcacatcttatttattaattcacacatcatgtagttaatagtgttatggctatattatcaaatattactaatatttacatattataaggtaatgttaattggaaatcacagcaactttaacacaaatgtactaagaaaattaaatgattaaatacgtattattagaaaggagaataaaataagatttgttaacaatcaccattaattagattttaagttttaaatttgttctgtaacccaattcattgaacatttggccaagtcctagacagtcctagaaataaaaagatgagtgagaagaaaactaggaaagtctgataaaaataaaagggggaagtgaggttgaattaactctcctccccggtgttgaagaataatgacgaagcagtccatcctgctaggaactgaaacattagttttcatgggcacggtttgaggtagtgaatataagatccttgttggtttggcagcagtttttttcatatgagtaattagttcactttcaacagttcttaagaaatcaaaaaatgaagtgctggatggaacacataagaacactaattatccttgtactgcattccaaaaaccagtttgattcatttttaaaagtaagatatattgttttgcatttcaaatttaagactttatttattgtagatgaagtggatagaatgagaataagacaaggacatctgccttctaaaaataatttaatattctaaatttttggaggaccttttactatacatacttagtttaacttttaagtaaattgtgtagaacaaattgtttagtttttttttaagttccacagctcttaaatcttggggcaagatgtccgtatatgcagttaagatgtattcagtgaaaccacacttaattggtctgtttacctgttaactgtttccctatttattaatcagatcaaatatattacttcttgaagtagatgggtacttttctcaggtccctgattactgattagaatcacagctgttagtggcaatgataacaaataggacaataatccaaaaacagtttatgctttcctgggattgcctaccatgcatctatgaaatatgcatacaaaaggaatgcattactttacaaaatattgtgtttgtttttccttaggctcaaaattttattatatcaatttccaagataaagataattaagaacatttgtcaaacttacttggaataggaaggttcagagatgtaggtttgtaaatagtttggggataagtggtcttccacccatgtcaaattttgtcttacttttcattatttgcatgttcttgttgttttatattttggcactattacaatagttcctttttctgagaagccaattatattccctcttcaaaggagttggttaagctaaaccacagctcttaaatcttggggcaagatgtcaatatatacagttaagatttattcagtgaaaccacacttttttatatacagtgtcatcaattcttgtggtggcgccttttaacattgagatggaagattgtactgattgtcatgtggatttttcttgatgcttttaacagaatgttttctgccaaaaagaacattgtcttctagtaaatatagtaaaatacttgttataagtaagatgaaatttgcttgatataataacttctattttaaaatgtatttataaaactgtctctacattttaaaaataatatttaaaaggttatgtaaatctttataatataaagatcaagtgcatacaaaaatttattaagcacccaatgtgggcagtgtacagatctaagcaccagagatgcagcagaaatgtttgctttcctgatacttacatgttagtggatgaagataaagaaatacagtacacatacattctgtcaaataggggtgaaggtttttggagaaaagtgagaagaatcaaagatcactggggagatggtgttactattttaaataagatgattagaaaaggcctcactaatgacgtgaaacttatattgaggcctataggagtgatgagggaacaaactgtacatacctggtgggagaacattgttaaaatcacaattaacctcctcatatcaggactggtgccttccacctatagtgaatagcagagaggaatgtgatgagtagctgttgaccatgaatagacataatatcaaagacatttcgcagtcttgggttctttattaaactgagatgttaaggtcattctggctattttgcttttttgccattcatcaataatttttggttttagcagcaataatatggaatctggttcttgatttattatacatatatacatgttgcaaatcaaaatcaagtcctttataagtactggtgcttaaaataaaggcagatatgtcgcaactagcctacaattgctttaaaaaaaaaaaattagcgatcgggcacagtggctcatgcctgtaatcccagcactttaggaggctgaggcgggcagatcatgaggtcaggagtcgacaccagtctgaccaacatggtgaaaccccgtctctactaaaaatacaaaaattagctgggcgtggtggcactcctgtaatcccagctactcaggaggctgaggcaggggaatcgcttgaacccgggaggtggaggttgcagtgagccgagattgcaccattgcactccagctgggcaacagagcgagactctgtctcaaaaaaaaaaaaaaaaatagccataattactttaattaaaccctgtctcatacatacatacatatcattcttatagtaattttatttttgtacagtaactacctttgtcaaaaatttcttcacaaataatgtctgttattctcatcataagcctactcattttgaggatctggttttatttttctttgacagggcagaaaaccagtacacagaatttaagcagcttgtccaacttaatttggctacttagtgtacacctgaaactccattatctaattcagaaattgacagaattttcagctgtgggaaagcaatactaagaatactgaaactcagattaaacttttagctgtcttatactttgttagaacatctgggtaaaataaaaattagggacactatttttaacgtactttatcctgagttttcagtttcaaacttttcagtttctacagattgaaagttgcctagaaactaaaactgtttcaaagttaaactatgataaaaccctttaatgttgatgtaactaaactactgtgtatgtttacaatatttaccctccctcagttccatatgtaatcacaaaaaggagctagttagcacactttgcaaatttagcggtgtattttcctctgaaatgtaataacagaatattataatttgggatgagaggaatagtgattttgcctgtgtaaactgaattgattagaaactctaaatgctgatgactaaggtcttataatttgatatgtgactatcttacaagctttaatttgttaaaacaggtagtgtgaaaaaccagtaactttaaacgtgggtttttatatcttgttttccttttcttttatagtctagtgagatgcccaaattaacagaacaattagcaggaccacttcgtcaaatgcaggtaaggttttttttttttttttttgaactacatattttatgaatagtagattgtaaaataaacatttttgataatctaatcatagtagtttatcatttcacagagataacctataaggattaaatgttacttgatgtcagtcatgtaatttaatgttactctgataacatctcttgtgatttttactttaataattaaacagtatttcttcccattattgtaatgaactgtatagcattgttgtgaacagagattaaaagcttcataatgtaaataggctgtattgacagctcagtgcatgtgtcattttcttcctcagtactgataatggtatcttgaaggactaggatttagtttatttttaattttttgcacattttttcattctggtttataacaaagtttggttgttttattgttttgtttttgagacagagtctcgctctcttaccaaggcctggagtgcagtggcgtgatctgggctcactgcaacctccaccttccacgttcaaatgattctcctgcctcagcctcctgagtagctgggattacaggcgcccgccaccacactcagctaatttttgtatttttagtagagacgaggtttcaccatgttggccaggctggtctcgaactcctgagctcatgtgatcctcccacctcggcctcccaaagtgctgggattacagatgtgagccactgtgcccagcctataacaaagttttaaaatctgttttatcataagaaattgtctctggatcctcaaagccacagtagtttatagtaataaatttctctcttactattttcataggataagccgattttttctgtctgttcaacattagacaaagacaaggaaagatgagctaaggaattacaagagaggaacaaaaaaatgtgtcataaaagggccccttcagaacaacagacactggtgcctacttgagggaggagagtgggaggaaggagaggttgaggaagaaaaaagaaaaaaaaaacctgtggcatattatacttagtactcagctgactaaataatctatataccaaacccctgagtcacaagtttacctagataagaaacctgtacatgaacccctgagcctaaaataaaagttaaaatatttttaaaataataattcaaaaaattctgattaaaattaaaaggccagttcagtggaacatgtaacatgccttaaaatcactaagaaatttaaatttctagaaccagcaaagtcttcataggcctaggagtttttggccttttagattgccaagtaaagaagaatgaagcttctcaacttagaggaaaacaatatgaagatatgtacatttttaagcattgttgtggaaaaatgtattttgctctaggatttgtatttctctaaatctgttttgtaatgaaataattagagattagttaaatgctgctcttgaataattttaatgaagagttctgtttctttgttgaaaaggtatcactggctgaaaagcatgctcttgatacatttttcttagttaactacctcaacataatgggaaagattggccgtttaatcacttagcaatggaacaggcactgtgcctacttaggagcagaatgtccacattgcagacataatacctaggaagaaaaagggacctcctggaatactggcttggaaacctaaagaataaagtgatatgggagatcataagtaaggaattttaactcttttatctttaaaggaatgtgctaaaagaattgcaaaagtttcagcagaagccaaattggaaattgatgaggaaacttatctaagctcatttaaacctcacttaatggatgtagtatatacctgggcaactggagctacatttgcccatatctgcaaaatgacagatgtctttgaaggtatggttaaattttacacatatatatttacagtataagaaatacagttaggatggtattgttttaattaaacaagtataatatgtatttttaatatttggtaactaaatgaaatcttctccctattatatagattaaaaaatattctccacaaattctttgtattatttaataagcatagtctgttcattagaaagtcctttagaaactattttaaactgtataattctgtgcagttgtaattctatgagtttctacagtcacaagcagatgaccctaagaagtcatatttatgtgggtatttttccttttcacttttgttctcctggtgagctatataattccactaaaaatagcagagctgaaaatgatcagtcattgcatatgtaattgacttggctttagtcagactgttattgcagcatgaatcagattaaatttaatgagcaggattttaagagactgaagaataattgttactcaactgaagagaaattttaaatgaaaaaattaaggcaaaagaaatataaggactaagtgaataataagaagcaaaaaaataagtagactgtttaaacgaaaccatattttaaaatgctgcattcagtaggaaaagattggcttgtgtgtttataaatggccagttgtatttactgaatgagataatttacattgaactttcctaaaaatgaaaataaatgagtttgttctgtatagagattataataagaactgctactattgcttataggtttagtttgagaaaaattacatgtttaacatgccaaatattataggcctttcaactgatattattaaagaagtaatagattactgattttatgaatcagttatttttatgatgcataggttaaacttctctgcaacagaatattaaaaacttaaactgagggcctttactacattgaactttatgggttttaaggtttttaatgttaaagtttatagcacatttttaaattatggtgttgtatcttacatattttttctaaggtttataaacttctcagcctcctctaaatgatcatttagtcaaacagtcccaaagcatcctttgaattctgtattctgttactgggaaagtcattgcccagtaagtactatatgccgaacactgtgctaagagctctgtataatttacatgtaatcaccaaatagcaattcagggtagatattatctccactttgcacaaggagactatggtaaacagtttggccaaggtgatgtgagggcacgatgatttaaactctggtctctgtaactacatgtaagttcagttaagcaccataccaccttatccttaaattttggatcacctgaaaatttcttaaaccctacactagactataccatctccatccacagaaaagtcatgcttggagtaatactaaacaggtcttaatcctagatgatgtttagcaacatctctaattagttaatggtgtttagccgagtcagtgagaagagggatgttgcgtactcactgatgaaaattgcttaaaacaggagcacaggttggtgtatgacaattgtgtttcagcagcactagggcgatcacatagagcaccaccagtcttcagtctgacatctttttggaacataaggatgaaactagtaactgttcaatgcctaataataagacttgataatacaatactcatatttgtataatatctgcttctctgaaaagtcagaacacaatgacataaaacaatagtggtacatggcagagagtagcttttttttatttttttatttttatttttattttttattttttttagaaaagtaaaaagcaggccaggcacggtggcttacgccggtaatcccaacactttgggaggccgaggcgggcggatcaggaggtcaggaaatcgagaccatcctggctaacacggtgaaaccccgtctctacaaaaaatacaaaaaattagctgggtgtggtggcaggagcctgtagtcccagctactcgggaggctgaggcaggagaatggcgtgaacctgggaggcagagcttgcagtgagctgagattgtgccactgcactccagcctgggtgacagagcgagacaccatctcaaaaaaaaaaaaaagaaaaaaagaaaagtaaaaagcaagggcagtagacctggcctgtcagatgagtatatttttttttaaatctaggaattcatataaaattgtctttatggattattttttctgttctttctacctaagtagaagttatcacagtatggaagataaatcctaaactgccaaattgaagatggtttgtagctcatactagatgccacctatgagttgactttttccacagcataccagcattcctgaagtctgttctgtcctctttcagttactcaggggctatttctacatcacagtttgcttgaaatttcagtttgaaaatttgagaaattcagttttttagctctaacttgaaattagatctaacatctgcataatttttatgtttttctggtgtgtgagccagtagatgagcttaaacctttctaaaaattgggatatactatgtattcgcccttaaaactattttttgatttaagtagcaaaaaatgagaaccttcattttcttaggatagtatttctctcttttgtttttacagtgttacatagtgcttccatttcaagaatagccattccttcctcatctcgttattgtatatggttgttttttattttttgcaacagggtctggctctgtcacccaggctggagtgcagtggcgtgatcttggctcactgcaccctccatctcccgggcttaagtgatccttccacctcagcctccagagtagctgggaccacaagcatgtaccaccatgcccagctaatttttgttaatttttgtagagatatgattttaccatgaagcctaggctggtctcaaactcctgggctcaagtgatccacctgcttcagcctcccaaggtgttgagattacaggcatgagccactgcagctggcctacacatgttttatgattggaaaaatactgtaatcaaagctgtagcacacagtacagtgtgtctgtttttacaggcagacaataattgcattggaactttctaatgtgctgtgtgcaaaccatatttgttcctaataagattcttaattttcttttcatatgaaaataaaagtgtctggtcatttcatatcctgagcctcagaagtagttttaagtattcttcaaacattaactgaggctagttaacactgtaatgattaaaaccatgtgtttgggggatgtgtaatgcaaaagaaaagttcatattgtgattcagttgagaaattttgaagactaagtatttattctgttatcaccctggaaaaaaaatgacagaatttagctgttttttatttccattaaactaaatttgaatgacagtttaaacaaactatttgtatgggctgatgcctagggttttagtcaagtaatccagaggctgttactatttatttctgactctacataaacaatattgtactcttaactatgaaggatgacaaaggatttgctttccactgagcaagtgtcattaggaaagcttctatgatgaattatctcttgaaactatttactgtacctctgcctgccatatgctttttattttttttcagtcctgctccctctgtatgccacatgttttgaaagcaaatactgtgaattgcattcctcaactctgtccccaccacacacattctctcacatgcctttcaagtagcagtttaaccctttcttagcatcatcagtgtcatgagtggttttccagtggatttgtcttttaaaagtattctcgctgataataatagagtaacaatttattagtaattgtttctgtctttacattttggcacagttttagtacctgatacttactcgtttaatgaataattctgagaccctagtgggaatcaggcaccatgctagttacagtgtgagcaatagtctctgctctcaagaaagggttcagcctaagctggggtttagcggcaagtagttgcaagatacatgtgtgattctaacctgaggccaggctggataggagtattaaattcgggtcagagcatgaactgtaggaaactgctttagggtatgccagaaagctgaaggcagaagttctgttcgggaaaatctgctgctttctctccttaatgagaatgatgctgttttgttcatcaaccgggtaaggctgatgtttattaaaatgctcttaaataaaagcatatagtcccaagtgtccatcgatagatgaataaattgtggtatatattaggttggtgccaaagtaattgtggtttttgccatttttaatggcaaggtgttccattgtaataaagattaaatggaacagctttcagttagaaaagacatactgactcatgctacaatatggacaaaccttaaacacattaagttgaaagaaggcagacacaaaggccacatagtgtataatttcacttatatgaaatgtccagagtaagcagattcatagagacaaagcatagacgtggttgccatgggctggagggacaggaagacatgtaactgcttaatgggaacaaggttttttgggggtggtaaaaatgctctaaaattagataatgatgatggttacacaagtctgaatatactaaaaaccactcagttgtacacttatttaaaataattttatggtgtgtgaattctgtctccatgtgagttcttccagaatgtagtaaacctgaatataaaaaagggcagtaactgacttgtatactttaacatggttaaaaaggtggattttatgttttatattttaccactatttgaaaaattttttaaagacaataactagaaagaattggatttctctttctactctggcaggaccaaaaaaaaaattttgtaacaaaccagtaggttaatgtggttttgttttgcttcggttttggtcagcttcatttagcctatgatgggtcatggctttgaaacttttgtctagcacttagtcaggctgatgaggcaggatgacttataaaggtgggtgtaagaagagcccttggattacagagaactgtagtaggtaggagagatgctagacaattcactacttaatcgtcagtcttcattaatccctggggggagtagcctctatgtttcaggcagctctggacagttagtgtttgtgcacatacccagtgatttgttgatgagactctgtgggcaacaaccacagtcattgtatatgcaaccttgtgcctactggcctaatttgcttgttacctgaaactgtgtcgaaactaaagtttccagaaattgagtcgaaatgtttacaaaatgtgacatgacagtgctctctggcctgaatgtgcatttacttgccttagtttattctttatcttagtaatttacttcgtatggtttggtctctgataactttcacagattctggttaacacgagttactaaaatttgtgaaataatagtatcacattgtgtttcttggtacacatttgaagtcagtcaaaacaatgtttgagaatgtgtctggctctttaatgccctatgcagcagaggactttgtaaaggatttcatttcaatcctaaatgacctgtgagaatctggtctcaggtaaaaatctagttacattttgagccactacctaatttaattatctttggatatacttgtttgcataaacatttaatatctgattgcataggtaatatgacattaccctctctatcccaattcctaccctctctcttgacacccagaagtttctgcagttggatttcctgtttcattgcaaggcagtattggagcctgcattcctagcagctgagaatagaaataacaaataattattattaatttaataattgttaatagtgtaaatagttcattgttcctacagactgcattttgagaactggtattcctaatgtatttcatatattaaaaatgaagtcaagcgttttagatttaggcaggtagcacttagagaaaggatctcacaatctctgctcctctttggacaagtctagcaaaagtgaaactatgtttatagcttcagctttgatacaaacacttttctcaaacagattctagacccatgggaaaaggcttctttccttgtgctccttgagaacactgtgtaaagaacgtactaatgaaagaatctaaggtcaagaagaatgaatgcacctttaaaatgacaagttttatcttgttactctcctgctaaaaacagtctgttgcattctatgagatggtatggatggtgtccagatgcctcactaggccacactcagggtccttgaatagctgcagtttgccaggcttttctgcattgtcgtggtggtccttcccttgttgctgctgcctgagagatactgcctggttcttacagacacagattatgtcatccttgcagccttcacccaaagttgctccctccttctagggcattttgttttcctacttaataccaagtgtcagcatgttagtaataaacaggtgtctctaccattagtcaaaggtgggagttaagcctttcatctttgtagctttctccagtacctaaccatgatttacttcatgggaagtccctcaaagtactattaattatcctgtgttctcctgccttgcctcttaacaaaaattctgctgttcctgattatttccattttaccagtgttttgttccttttctatccaggcagcataattcgttgtatgaggcgcctggaagaattgcttcgacaaatgtgtcaagcagcaaaagccattggaaacactgagctggaaaataaatttgcagaaggtcagtatcaaatggataagctgtttctaatttagacaaatttggtgaagcaaatcttgagccctggaccacaacctaggaggacgttttgagatgttcttcactgcattgtcatggagagctatctactagtgtttctataaaatttagtgtgttgggggaaaagttgagattttatatatacatgcatttacgtatattaattgtacgctaactacatgccaggcattgttttaagcactaggggatatagtgaacaaaaagacacccctgccttcatggagtttacattctagtgtggggagatagacaataagtcaacaattaaatttatcagatggtgataagtctgtaagataaaaacaaagcagaaaagacaatagaattggcagatggatatgatggtctagggcctccacagggaaggtggcagttaaggcctttggtgtatgcttgatgtacgtgaacaccagcaagaggccagtgtggctggagcagaatgggcagtgagtagaggagtaggggttgaagtgagaaaggaaatgattccatagttcccagccccaggcttctcaactctgcagtgactggaggtgtggagtttgggagtgacctgccccaacttggactttacaaggtaattgttgctcttacattcagggcaagtctgtagagtagcacagtagaagtggggagaacagatcaagaaaggatggctaaaccaaggtggtagtaatggagtggtggtgggggggcaaggggcataagcttcagtcctgtctactgactcttgaccaagaaaaaggactaagttaatcaaagaatataaccacattgttgctgagtcagtcaatgctagtgatttctgcaaacaacttagtgtcctaagaagaggtttgcaaaaactggctgatatttccacagttgataaatgtaggcctgtttaatgactcagaatttaagtgtaggtgtcaaagttttaaaaataatttgtaatcaaaatttgtatttgtccttccttggcctagaaagaatttcacatgggaactgaaaaaaaagtgtcttctgatataggttgaaaatccaagtctttggattttacatttctttagacagtttagtccttccctataattttttttatttttatttttatttatttatttagtgtgtggagacagagtttcgctcttgttgccccaggctggagtgcaatggcgcaatctcggctcactgcaacctccacatccacctcccaggttcaagcgattctcctgcctcagcctcctgagtagctgaactacaggcatgcgccaccacgcccggctgattttgtatttctagtagagacggggtttctccatgttggtcgggctgctcttgaactcctgacctcaggtgatccgctcgcctcggcctcccagagtgctgggattacaggcatgagctactgcgcccgacctagcatttatctttttaaacagttctagacacctctttcctggccagcccccatggagtatttcagagtcaaaagaacaggggtctggcttgtatgttttccacctcacagaggtggctgcaaattcctctaggtgttcagcaaggtgtttgactttctaggctgctcgcttaccagttgaatcagggttggtatactggctttaaaatttcggtagaggcaagttaggtgttttgtggtcttgaaagtttaaaccttactttcttttctcttaggaatcaccaaaatcaagagagatattgtgtttgctgccagcctctacttgtagagtcagctaaaggaatgtgagattttaaattattgaccacctgtttgattacagttgactacaaatgcctgcaagtgtggatttggttctcccatacattttaatatgtattatatttaaatcaaacatcattcatagaaagcatattacatacatgtttatacataagcattacatttttttaataaaaatgtatacaggtggggcactgttttggtggaaggcttggagtttttttaatgagtttagagctattagataaccactgagttaaaggtaactatgtacacacaaagtgtgcatccaagaggcatagcagcagcagaagtctttaaaggcttgtacaccaggaagaaagatgcatcctcttgccttgtggcaatcattttcctttagaaaacaggccagcttcacctgggcaccctgctgcctttcaaggctggtgattgctcggatagtgattcccagttgttggtgtttcatgcagagttgtatgagagtcctcctcttttctttctttaaaagaagttctttctttgaagaaatccgatacatatacagcctacagtgcaaaatatttaatggtataatttagatcaagttaaaaactacatacaaagttgtgatcaacagcatcctaagataaatataaacaaaaggatatactttgaggtgtacagattaagcatataaaaaattagagactaactgggattttttaaagattattccaaattaagagttgctttgttatgccttcagcaaatagcttcattttgccaatactgaataaaagagttatttctacatgtgaattagttttttcaagtcataatcccctaaaaaaactatttctagccagagcctttcacaataaaaatactaagattttacaaaaatactaagttttagaaagagcaacctagtttttaacctggtgtgtatcctgaagtgacttttaataacattgagattcttgcccactgcatagtcttctcctcagctggggattttttggatttttttttttctatttacttatctaaatgtttagcaatatcaagatgtaggctgttgacctgtatacttacaactaatattgcaaccagagctccctgaatgagtccagtcaacacatcgctccagtggtgtttataatcagaaactcgagaaaggcccacataaatggatacggcaacaagaccaaattgcagtgtggggcgtaagagtcttgcccagtctcccttcatcctggcttgaagataaagctaaaagaaaagaataaagaaaaaaatagtttatttaacataacgcaaaacttttatattaaggaagggttggcatttgaaatgattatcaaagtattattatatagggaacaggacttctaggcaaacattcacgtacgcattattacctaaatgttaatcctttaaagaaacaaaactattgccctactaacttgttcacaagaatctattgccagtctagctataccacccttcaaactgtatacaaacaggtgtttccttgtttatggctttctaaacaggatttcagggacagttcctccccttgcaatttgggttataattctcatagtcaagaccagtgctgccattggtttttttattgttttccttaaagaaatggggtgttg

SEQ ID NO: 6716 - DNA, 26197 bp, Homo sapiens
caggaagttcagaaacgttttcctgacggcatccccttattagaccctattgatgatatgggcattcaagatcaagggctgaaaaaagtcattcagaaagtagaagcttttgagcatcgaatgtattctcatccacttcacaatgatccaaatttggaaactgtgtatacgctttgtgaaaaaaaagcacaggtatggcagaaatttggtttttatagtagaattctatatgtttcactgaataaatatgtgtttgtcattttcttatcctgttggtttaattggctaaaacaggaaaatgtgagctatcttttaaataaactgtcagctctgaacctgtcagctctcatcagcaagacaagataaagttcattttgctatagtttgatatttcacataggatgttctgttttttcttcttttttaaatttgagatataatttacacagcatagcattcacccttttaaaatgtccaactcactggtttttagtgtattcacagatacttgcaaccatcaccactatgtaacttcagaacattcttctcaccctctgaaggaactttatacccattagcagccactctctgtttctcccatcctccagcccttggcaatcacaaatctttctatctgtatggttttgcctattctggatatttcttataaatagaatcatgtaatatatgatgtttgtgtctgctgtctttcagttagcatgtcttcagggtttatgcctgtcatagcataaatcagtacttcattccttttaaggccaaatcttgtgtgtgtgcgtgcgtccgtgcatgcgtgtgtgtgtgtgagacagagtcctgctccgtcacccaggcttcagtccagtggcatgattatggctcactgcaacctctgcctcccgggttcaagtgattcttctgcctcagcctccctagtagctgggattacaggcacgcaccaccatgcccagctaatttttgtatttttattagagacggggtttcgccatgttggccaggctggtcttgaactcctgacctcatattatccacttgcctcagcctcccaaagtgccgggattacaggcatgagccaccgcacctggcctggctaaattatattttgttatgtggatatgccatattttgtttacccattcatcagttgatggacaggacatttgtttttttctaactttttggctctgatgaataatgctgctgtgaacatttgtatacaagtttttgtatggatgttttgagttctcttgagtggaattaggtaggattgatggatcatatggtaactctatatttacctttattctcagaaactaccagactgtttccaaaatggctacaccactttatgttctcactagcaatttgcaagataactgctttctctacatcttcgccagcatgtgttattgtctgtggtttttgctgtagccatcttaatagcgtcaaatgttagtagttcagctttttagcataattagctgtaatatctaaccagtaaaaccattattataagcattctgtatagcaaatttagaaaaagctttttgacgtgaacacaatcctttccactacctactttttttcaactggaatgtattatactatacaaatctcctttcctccatgaaacttacaactccttgctgttgtactttttcaacttttatcacataccacttttatcaatacatttgtctttgtgtctcacaaactagattttaagctccttagagtcagatgtttcattttaactttacattttctcataatggtctgtctttataaagtaaatgcccagtgtttattggataaatacatgagtagaaactcctttaatagagtaatgtgttcagttcatagttttaaagcactctcccttctagctttttgtgaacttacatcatatggtgctgtagcatatacacaatactggctgcatgctcagtgaacacatctatgctctgacccaccttcaagtgctgctaggcaggaagcttgccaggtacttctcaagatgaggaaactgggacacaacaaactttcattacttacacagatatccagttgtgattctcacctgttcatctcttaaccaggaccattgcagcagctctctccctgctgtcagtccctccatggccaccagggtcggccttatgttttcacaacacaagaacaggtagacttgagcgtgattgaatgattggaaagcatccttggaggtggtttgaaggcattatctgagctgctcaaatatactgaaaaagaccttgtctggctgaagggactggctaaataaagttgttatggagactctgcaataacatgtaagaaagctcatgcataagcataacatgaaaaaaggatctgaaattgaagtggactatgattactatttagcaaaaatataaaatacaccagaaaagactgaaaggaaaactttaagtggttgtgttacagcaataagattatagtggtcttttttttttcttttcctgccccctccccatcattgtctataatgtgcttatatgtatataagcacatgatatataaatataagcacattatatgtgtgtgtgtgtgtgtgtatgtgtatgtatgtgtgtgtgtgtgtgtgtgtatatatataatttcttttttttttaatggaagaaaaatacagcctgggcacagtggcttactcctgtaatcccaacactttgggaggccaaggcgggaagatcacttgaagcccagaagtttgagaccaccctggacaagatgatgagacccccatcactgcaaaaaaattttaaaaattagccaggcatggtagcatgcacctgtcatcccaggtactcaggaggctgaggtaggaaggtcacttaagccaaggaggttgaggctacagtgagccatggttgcacgactgtactccagcctgggtgacagagtgagaccctatctctttaaaaaaaaacaaaaacaaaaaaaaagtgtacatgtgcagtccagacattttttttcccaatatttttgatccacagttggttcaatccatggatgtggaacccacggatatgtagggccaactgtatatctgtgttcttttataaatatgttgggaaagatcttgtacagcattgtctggtgtcagccacatttaaattttttagtagccacattttaaaaaagaaagaaaaaaccagtggcattaacttcagtaatatttttatttaacccattatatctaaaatatttcacgtatttttatattcaaaatacaaacattactcaagaaaaaatgtcttaaatattggactctcttctaccttctaagctttataagcctcacagttattagcacgatgctttgctctgctcacataggcatcctcagtcacttcagtcaaagaaaccctaaaaaacaatggtttgttccttttactctggtaggcctgataagtcatgctaggtagcatagcattcattgtctagcttggaaagcattgcttcctatgacatggcattgtgactacacatctgttcatagaaatataaataatcactaagagcttgcatctagggtctgataccctgggtttgaaccccatctttatcactcagtagccctgttcacagcaatataaataattgaaaagagcttggattctagggtctgctagcctggctttgaactccatctttatcactcagtagctctgtattcttgaccaatttacttagtaatctctccgtgcctcagttttctcatctgtaaaatgcagatttaatattagttccctaccttttaggattgctataagaatgaaataatgtaaagcactagaaatagaggacattggtagtctctgaataaatatcagttgctgatcaccttcataatttttcctccttagtagaagtttaataaacagtctaaaaaattccattatcttcggatttcaacttatcaaaacttttctgtcggtgtttttctgaaccaccacttcaggataccattgttttttgttcttgtactactgtatgcttgtcatagtcagaaaatatgtaatatttactgattaactaaattttaaaacttatctactctaaaggatgacatcaaggtgatacattttcattttaaggtttcatttatgttttgaataaaggcctattctctttgctaaaaccatttccagcctaggcaaattcgtgatttaacttaagggcaaagagaaggaatagttttcaggacatcatgggggaaatatagatagtcaagagaaaagatttctgtaccctcatttttctttccctgttctctaagctaccccctgatgccctaaggatgaaaagctagagctgctgggattggtacttttggaccgtgattaattgtctagtgaatcctgtcttgggagagcctatcctaaattcaccactgactttttctactcttacagcctaccttgtctagctcacaatatccagctcactctcctccttctagccttcctccttacctctctccatttaagcaagagctgtgctctgttctcttttttttttttcttttttttttttaagacggaatctcgctttcttgccaggctggagtgcagtggcatcatcacggctcagtgcaacctctacctcccgggttaaagcaattctcctgcctcagcctcctgagtagctgggactacaggcatgcgcccgccaccatgcccagctgattttttgtatgtgtgtttttagtacagacggagtttcaccatgttggccaggaacctcgtgatccacccacctcagcctcccaaagtgctgggattacaggtgtgagccattgcgcccggcctctgttctctgtctcaagctttttacactttctaacatctgcttgctctgcctcaaatttttcaaatggacattttgtattttccatgtacttaatattttaggtagtatttaataactttacagatacatcattactcttgtgtaatgttccgggaatgtatctaagaagctccagtttccccagtctccccagcactgaagctttaacccagaagtatactgtaagatgttctttaaaaatattttttgtttgatttcatgaataaatctccttgtacattgttcactttattattgaactttctttatactttcatgtgctttagattgcaatagatattaaatctgcaaagcgagaactgaagaaagcaagaacagtcctacaaatggatgaactcaaatgtcgcaaacgtgttttaagaaggttgggatttgctacttcttctgatgtaatagagatgaaaggacgagtggcttgtgagataagcaggtaaaatctggttattgttctagaaagttcattttttttttcatttttaattttaatttttgtttattttttttgagatggagtctcactgttgcccaggctggagtgcactggcgcaatctcagctcactgcaactccgcctcgcagttttaagtgattttaaaaataaccattatctttaggaaaaaagagctttcttaaaaatataaagtttgtacaatatcttccacactaaatacagttttgaaccatgaaattgagaaattagaaaaatcttagatctcagtaattaacacaagcgctcctagcatttgtatgtatttcctttgactttttttaatgccttgtgggatttttacataatcttagcttatatataattttgtatactttttaaaaattattaacattttcccaccttgaaacttagcctagtaaccattatcttgttacgtgcatagcaaattgtaatgagattttgggctaataataggattttacaacagaacttattataagccacagattaaaactggttatattattttctgtttcagtaatcttttgtcacaaatgacctcaaaactaaattatttacaacatcaacagtgactttatcctcttattgtttttatgggtcagaaattcaggaagagctcatttggatggttctggctctgtcccccaggattgccgtcagacaggtggttaagctgaaacagtaggagtccggagcggctggggaatgttaggacctctctctctctgttagagcttctccatgtggtctctccatgtgggctggtttgggcttcttcacagtatggcagcagcctcaggatgcttacatggtagctgaaggctccagtgtgagtcttctagctggctaaggttgccttttctgacctagctttaccttttgtaacctagctttgttatcatacaccatcatttccaccacattctcttgattacaggtgagtcataaaccctcctggattcaagtgggggataattagattccaactcttgatggggaagtggctattgttcagtatggctttctgtgataattggattgttctgtgtctacactgttcagtatagtagccactatttagcatttgatgtgtgcttagacaaaggaactgaattttataatttatatcattttaattgaaattgaaatttccacgtatgcacatggcagtctttatagatcagtgcaattctagaagaatgtggtataggagatgctgttgtggccatctttagaaaatacaatttatgatactgttctaaaaaatgtgttcgttatttcccaccacgaggaatgtctcctgccttaggagccagcttgcctctgtcctccttaactggaaagtcataaactggtagctcaagcaatatccagtctgaagatatatcttgttttgtccatatagtgatgatcataattctcagtgaatatataaaagacacttttgaaacagttttttatgtactcagcatggccaggatggacaggactagagaattacaggccttgtaaatgatttcagactttcttggtaaaaatgtaattatatcgttcatctgtccagatgttacagactcagatgtcttcatagaaccaggagactgtggtgaacaggacaactcttagccaccaaaagggggcagtgactacccagccctagttagttgttatcacaggataatgtgctattggattttaattaataacatatccaggattaaatctaaactgcagtactggtctactgatttatatgctaatgttattgggattatttccttctaataattacctgttttacaattaatatagaaattaatttcctttagatatctacaactagattttgtgttgaaagaatggaaattgattttattccaagatacatttttcatttatagtaataacaatattatatcaaagtttgttaactttcccccaaatttgcaaaaactggggcatcatcctagactccttctctcacccattttgcctttttaaacattgccactggctaatgtgtatccctcattatttttggcctcaattactgcagttgccctcctgattattcgttgcctcccttcttgagttttcaaaacccaaagcacaaatctggtatgtcgttcctctttccttcttgagatgggattttgctctgttgcccaggctggggtgcagtggtgcaatctcggctcaccgcagcctcaacttgccaggctcaagtgatcttcctgcctcagtctcccaagaacctgggactgtaagtgtgtgccatcaagcctggctaatttcttttttaagtttctgtagagatagggtcttgctatgttgcccaggctggtcttgaactcctgtaattaagcagtccgcccaccttaccacccaaattgctgggattacaggtgtgagccacttcacccagcacccagcccctttgtgccattctatttggtaaaagtccctcagtgattccttattgcttttagaatagattccataatttagtatattgttactctccctctccagcagtctgttgccacaccccacacatgcttttccttttgcttcatatgacctttcacccccaccccatatcctgcgattcttgcatatttttgcaaagaacttcgaaacttgctctgaacttcttcaatctggttttaggctcctcacctttttttcctcataacacttgtataaatcaattattagagcactctgttaaaccactgttctgtgattatcaccttacttgtctgcccccaatgttagactgtagcttcttgaaatagtctttcctcgtttgtattgttgcactctttgcttgacttaactcttaagcttaacactagagacccaaatttagtttttgacttttatttataaatattttaactgttagtaaagattataatagttcatggctttattcttttttaaagactttgcaaaaaataaaggcaaagtttacttttttaataatacagtacagttattgtatgggtcaattgaaccctgattatagaagtctagaaacatcatctttgtagtgtttcttttttagcttgaattgaacacagttgcaaattcagaatttttcattttccacccaagaagaaaaataagtgaagatattttgcagttattactcaaatcagaagataaacacaaagggacaaaaagcactgtagtcaaagtgataatggtgagattgattatataagcaaagtctcagaccctaagtaaattctcagacataataactagtgcatgaacaatatttttatttatttatttatttatttatttatttatttatttatttatttattttgagacaaggtctagctctgtcacccaggctggaatgcagtggcaagatcatggctcagtgcagtcttgacctcctgggcttaagtgatcctcccacctcagcctcctgagtagctgggactacaggcgtgtgccaccacgctcagcttatttttgtattgctttgtagagacagggttttgccatgttgctaggctagtcttgaactcctgggctcaagagatctacctgtttcagcttcccaaatgagccaggagccactgtgctctgctgaacaatatatttctagggatatatatatatatgagattattattcatgtaatcattcaacagaaagggcctagttatgtaacgtctatgataagaacctggaccatctcattttgctaaaaggacttgtaataatagtctttcatcttttattatttgtgcaccaaagtttccttatatggtccacaagtggtcaaatacacagttgtgtatataaggaaattggaaagagatgatgaagaaattttttaaaacctgttgaattgatcattctaatctttgtaataataaatatattgtccttataagtctgtatatgaaaatgtttcacaattatggagcaaagaagatgaccttcctctcaacaaaatcaagttgtcagtttaaaaaactgtattttgatgatgcaaaagaggaatcaaaagtaataagctagaacttaaaagagatgtaaatctggacttgtacattttgacagtgcaagtgcaagaagaaacagacgtagtgatgagctagtacctacctgttagagatgtacttgaaatctagaattgtatttcctagatggatatttttcagatttgtggatgacaattggtgagcagcagtttgttgcatttaaaggctcttgcccatcttggttatatacactttcagcctttggaaaatatgaattaaaatgtgagtcttctggccaggtgtagtgtctcacacctgtaatcccagcatttggggagaccgaggtgggaggactacttgagctcaggagttctagaccagcctggacaacatagcaagaccccatctctactataatataaaaactttaaaaaattaaaacataaaaataaaaaaatgtggttcttcttatgagtacattctaattaagatttctagtaaaattgtttttcattatctttattctacagattatttgtaaaataactgaaaaataattaaaagagtcctttggccctagaaaataaatgacagtgatgatttttcctagcatactaaaggttaagaaattgttcttatttcacgaatgtgtgcattttgatatttggaatctttatgtgaaatccccattttacattgattatataatatattggtaattattaaagatctactatgtccttaaataaatcattgtcattcctcattgattactccttaaggtcaaataatatattttattaaaaactacacgttaagggcatatgtgtgtgcatgtgtgtctttatattctgacattttattcttttgttttgccattgtagtgctgatgagctccttctaactgagatgatgtttaatggccttttcaatgacctttctgcagaacaggcaacagcattattaagctgctttgtgtttcaagagaatgtaagttaattgattcagcacatcttatttattaattcacacatcatgtagttaatagtgttatggctatattatcaaatattactaatatttacatattataaggtaatgttaattggaaatcacagcaactttaacacaaatgtactaagaaaattaaatgattaaatacgtattattagaaaggagaataaaataagatttgtcaacaatcaccattaattagattttaagttttaaatttgttctgtaacccaattcattgaacatttggccaagtcctagacagtcctagaaataaaaagatgagtgagaagaaaactaggaaagtctgataaaaataaaagggggaagtgaggttgaattaactctcctccccggtgttgaagaataatgacgaagcagtccatcctgctaggaactgaaacattagttttcatgggcacggtttgaggtagtgaatataagatccttgttggtttggcagcagtttttttcatatgagtaattagttcactttcaacagttcttaagaaatcaaaaaatgaagtgctgggtggaacacataagaacactaattatccttgtactgcattccaaaaaccagtttgattcatttttaaaagtaagatatattgttttgcatttcaaatttaagactttatttattgtagatgaagtggatagaatgagaataagacaaggacatctgccttctaaaaataatttaatattctaaatttttggaggaccttttactatacatacttagtttaacttttaagtaaattgtgtagaacaaattgtttagtttttttttaagttccacagctcttaaatcttggggcaagatgtccgtatatgcagttaagatgtattcagtgaaaccacacttaattggtctgtttacctgttaactgtttccatatttattaatcagatcaaatatattacttcttgaagtagatgggtacttttctcaggtccctgattactgattagaatcacagctgttagtggcaatgataacaaataggacaataatccaaaaacagtttatgctttcctgggattgcctaccatgcatctatgaaatatgcatacaaaaggaatgcattactttacaaaatattgtgtttgtttttccttaggctcaaaattttattatatcaatttccaagataaagataattaagaacatttgtcaaacttacttggaataggaaggttcagagatgtaggtttgtaaatagtttggggataagtggtcttccacccatgtcaaattttgtcttacttttcattatttgcatgttcttgttgttttatattttggcactattacaatagttcctttttctgagaagccaattatattccctcttcaaaggagttggttaagctaaaccacagctcttaaatcttggggcaagatgtcaatatatacagttaagatttattcagtgaaaccacacttttttatatacagtgtcatcaattcttgtggtggcgccttttaacattgagatggaagattgtactgattgtcatgtggatttttcttgatgcttttaacagaatgttttctgccaaaaagaacattgtcttctagtaaatatagtaaaatacttgttataagtaagatgaaatttgcttgatataataacttctattttaaaatgtatttataaaactgtctctacattttaaaaataatatttaaaaggttatgtaaatctttataatataaagatcaagtgcatacaaaaatttattaagcacccaatgtgggcagtgtacaggtctaagcaccagagatgcagcagaaatgtttgctttcctgatacttacatgttagtggatgaagataaagaaatacagtacacatacattctgtcaaataggggtgaaggtttttggagaaaagtgagaagaatcaaagatcactggggagatggtgttactattttaaataagatgattagaaaaggcctcactaatgaagtgaaacttatattgaggcctataggagagatgagggaacaaactgtacatacctggtgggagaacattgttaaaatcacaattaacctcctcacatcaggactggtgccttccacctatagtgaatagcagagaggaatgtgatgagtagctgttgaccatgaatagacataatatcaaagacatttcgcagtcttgggttctttattaaactgagatgttaaggtcattctggctattttgcttttttgccattcatcaataatttttggttttagcagcaataatatggaatctggttcttgatttattatacatatatacatgttgcaaatcaaaatcaagtcctttataagtactggtgcttaaaataaaggcagatatgtcgcaactagcctacaattgctttaaaaaaaaaaaattagcgatcgggcacagtggctcatgcctgtaatcccagcactttaggaggctgaggcgggcagatcatgaggtcaggagtcgacaccagtctgaccaacatggtgaaaccccgtctctactaaaaatacaaaaattagctgggcgtggtggcactcctgtaatcccagctactcaggaggctgaggcaggggaatcgcttgaacccgggaggtggaggttgcagtgagccgagattgcaccattgcactccagctgggcaacagagcgagactctgtctcaaaaaaaaaaaaaaaaatagccataattactttaattaaaccctgtctcatacatacatacatatcattcttatagtaattttatttttgtacagtacctttgtcaaaaatttcttcacaaataatgtctgttattctcatcataagcctactcattttgaggatctggttttatttttctttgacagggcagaaaaccagtacacagaatttaagcagcttgtccaacttaatttggctacttagtgtacacctgaaactccattatctaattcagaaattgacagaattttcagctgtgggaaagcaatactaagaatactgaaactcagattaaacttttagctgtcttatactttgttagaacatctgggtaaaataaaaattagggacactatttttaacgtactttatcctgagttttcagtttcaaacttttcagtttctacagattgaaagttgcctagaaactaaaactgtttcaaagttaaactatgataaaaccctttaatgttgatgtaactaaactactatgtatgtttacaatatttaccctccctcagttccatatgtaatcacaaaaaggagctagttagcacactttgcaaatttagcggtgtattttcctctgaaatgtaataacagaatattataatttgggatgagaggaatagtgattttgcctgtgtaaactgaattgattagaaactctaaatgctgatgactaaggtcttataatttgatatgtgactatcttacaagctttaatttgttaaaacgggtagtgtgaaaaaccagtaactttaaacgtgggtttttatatcttgttttccttttcttttatagtctagtgagatgcccaaattaacagaacaattagcaggaccacttcgtcaaatgcaggtaaggttttttttttttttttttgaactacatattttatgaatagtagattgtaaaataaacatttttgataatctaatcatagtagtttatcatttcacagagataacctataaggattaaatgttacttgatgtcagtcatgtaatttaatgttactctgataacatctcttgtgatttttactttaataattaaacagtatttcttcccattattgtaatgaactgtatagcattgttgtgaacagagattaaaagcttcataatgtaaataggctgtattgacagctcagtgcatgtgtcattttcttcctcagtactgataatggtatcttgaaggactaggatttagtttatttttaattttttgcacattttttcattctggtttataacaaagtttggttgttttattgttttgtttttgagacagagtctcgctctcttaccaaggcctggagtgcagtggcgtgatctgggctcactgcaacctccaccttccacgttcaaatgattctcctgcctcagcctcctgagtagctgggattacaggcacccgccaccacactcagctaatttttgtatttttagtagagacgaggtttcaccatgttggccaggctggtctcgaactcctgagctcatgtgatcctcccacctcggcctcccaaagtgctgggattacagatgtgagccactgtgcccagcctataacaaagttttaaaatctgttttatcataagaaattgtctctggatcctcaaagccacagtagtttatagtaataaatttctctcttactattttcataggataagccgattttttctgtctgttcaacattagacaaagacaaggaaagatgagctaaggaattacaagagaggaacaaaaaaatgtgtcataaaagggccccttcagaacaacagacactggtgcctacttgagggaggagagtgggaggaaggagaggttgaggaagaaaaaagaaaaaaaaaacctgtggcatattatacttagtactcagctgactaaataatctatataccaaacccctgagtcacaagtttacctagataagaaacctgtacatgaacccctgagcctaaaataaaagttaaaatatttttaaaataataattcaaaaaattctgattaaaattaaaaggccagttcagtggaacatgtaacatgccttaaaatcactaagaaatttaaatttctagaaccagcaaagtcttcataggcctaggagtttttggccttttagattgccaagtaaagaagaatgaagtttctcaacttagaggaaaacaatatgaagatatgtacatttttaagcattgttgtggaaaaatgtattttgctctaggatttgtatttctctaaatctgttttgtaatgaaataattagagattagttaaatgctgctcttgaataattttaatgaagagttctgtttctttgttgaaaaggtatcactggctgaaaagcatgctcttgatacatttttcttagttaactacctcaacataatgggaaagattggccgtttaatcacttagcaatggaacaggcactgtgcctacttaggagcagaatgtccacattgcagacataatacctaggaagaaaaagggacctcctggaatactggcttggaaacctaaagaataaagtgatatgggagatcataagtaaggaattttaactcttttatctttaaaggaatgtgctaaaagaattgcaaaagtttcagcagaagccaaattggaaattgatgaggaaacttatctaagctcatttaaacctcacttaatggatgtagtatatacctgggcaactggagctacatttgcccatatctgcaaaatgacagatgtctttgaaggtatggttaaattttacacatatatatttacagtataagaaatacagttaggatggtattgttttaattaaacaagtataatatgtatttttaatatttggtaactaaatgaaatcttctccctattatatagattaaaaaatattctccacaaattctttgtattatttaataagcatagtctgttcattagaaagtcctttagaaactattttaaactgtataattctgtgcagttgtaattctatgagtttctacagtcacaagcagatgaccctaagaagtcatatttatgtgggtatttttccttttcacttttgttctcctggtgagctatataattccactaaaaatagcagagctgaaaatgatcagtcattgcatatgtaattgacttggctttagtcagactgttattgcagcatgaatcagattaaatttaatgagcaggattttaagagactgaagaataattgttactcaactgaagagaaattttaaatgaaaaaattaaggcaaaagaaatataaggaataagtgaataataagaagcaaaaaaataagtagactgtttaaacgaaaccatattttaaaatgctgcattcagtaggaaaagattggtttgtgtgtttataaatggccagttgtatttactgaatgagataatttacattgaactttcctaaaaatgaaaataaatgagtttgttctgtatagagattataataagaactgctactattgcttataggtttagtttgagaaaaattacatgtttaacatgccaaatattataggcctttcaactgatattattaaagaagtaatagattactgattttatgaatcagttatttttatgatgcataggttaaacttctctgcaacagaatattaaaaacttaaactgagggcctttactacattgaactttatgggttttaaggtttttaatgttaaagtttatagcacatttttaaattatggtgttgtatcttacatattttttctaaggtttataaacttctcagcctcctctaaatgatcatttagtcaaacagtcccaaagcatcctttgaattctgtattctgttactgggaaagtcattgcccagtaagtactatatgccaaacactgtgctaagagctctgtataatttacatgtaatcaccaaatagcaattcagggtagatattatctccactttgcacaaggagactatggtaaacagtttggccaaggtgatgtgagggcacgatgatttaaactctggtctctgtaactacatgtaagttcagttaagcaccataccaccttatccttaaattttggatcacctgaaaatttcttaaaccctacactagactataccatctccatccacagaaaagtcatgcttggagtaatactaaacaggtcttaatcctagatgatgtttagcaacatctctaattagttaatggtgtttagccgagtcagtgagaagagggatgttgcgtactcactgatgaaaattgcttaaaacaggagcacaggttggtgtatgacaattgtgtttcagcagcactagggcgatcacatagagcaccaccagtcttcagtctgacatctttttggaacataaggatgaaactagtaactgttcaatgcctaataataagacttgataatacaatactcatatttgtataatatctgcttctctgaaaagtcagaacacaatgacataaaacaatagtggtacatggcagagagtagcttttttttatttttttatttttatttttattttttattttttttagaaaagtaaaaagcaggccaggcacggtggcttacgccggtaatcccaacactttgggaggccgaggcgggcggatcaggaggtcaggaaatcgagaccatcctggctaacacggtgaaaccccgtctctacaaaaaatacaaaaaattagctgggtgtggtggcaggagcctgtagtcccagctactcgggaggctgaggcaggagaatggcgtgaacctgggaggcagagcttgcagtgagctgagattgtgccactgcactccagcctgggtgacagagcgagacaccatctcaaaaaaaaaaaaagaaaaaaagaaaagtaaaaagcaagggcagtagacctggcctgtcagatgagtatatttttttttaaatctaggaattcatataaaattgtctttatggattattttttctgttctttctacctaagtagaagttatcacagtatggaagataaatcctaaactgccaaattgaagatggtttgtagctcatactagatgccacctatgagttgactttttccacagcataccagcattcctgaagtctgttctgtcctctttcagttactcaggggctatttctacatcacagtttgcttgaaatttcagtttgaaaatttgagaaatccagttttttagctctaacttgaaattagatctaacatctgcataatttttatgtttttcttgtgtgtgagccagtagatgagcttaaacctttctaaaaattgggatatactatgtattcgcccttaaaactattttttgatttaagtagcaaaaaatgagaaccttcattttcttaggatagtatttctctcttttgtttttacagtgttacatagtgcttccatttcaagaatagccattccttcctcatctcgttattgtatgtggttgttttttattttttgcaacagggtctggctctgtcacccaggctggagtgcagtggcgtgatcttggctcactgcaccctccatctcccgggcttaagtgatccttccacctcagcctccagagtagctgggaccacaagcatgtaccaccatgcccagctaatttttgttaatttttgtagagatatgattttaccatgaagcctaggctggtctcaaactcctgggctcaagtgatccacctgcttcagcctcccaaggtgttgagattacaggcatgagccactgcagctggcctacacatgttttatgattggaaaaatactgtaatcaaagctgtagcacacagtacagtgtgtctgtttttacaggcagacaataattgcattggaactttctaatgtgctgtgtgcaaaccatatttgttcctaataagattcttaattttcttttcatatgaaaataaaagtgtctggtcatttcatatcctgagcctcagaagtagttttaagtattcttcaaacattaactgaggctagttaacactgtaatgattaaaaccatgtgtttgggggatgtgtaatgcaaaagaaaagttcatattgtgattcagttgagaaattttgaagactaagtatttattctgttatcaccctggaaaaaaaatgacagaatttagctgttttttatttccattaaactaaatttgaatgacagtttaaacaaactatttgtatgggctgatgcctagggttttagtcaagtaatccagaggctgttactatttatttctgactctacataaacaatattgtactcttaactatgaaggatgacaaaggatttgctttccactgagcaagtgtcattaggaaagcttctatgatgaattatctcttgaaactatttactgtacctctgcctgccatatgctttttattttttttcagtcctgctccctctgtatgccacatgttttgaaagcaaatactgtgaattgcattcctcaactctccccaccacacacattctctcacatgcctttcaagtagcagtttaaccctttcttagcatcatcagtgtcatgagtggttttccagtggatttgtcttttaaaagtattcttgctgataataatagagtaacaatttattagtaattgtttctgtctttacattttggcacagttttagtacctgatacttactcgtttaatgaataattctgagaccctagtgggaatcaggcaccatgctagttacagtgtgagcaatagtctctgctctcaagaaagggttcagcctaagctggggtttagcggcaagtagttgcaagatacatgtgtgattctaacctgaggccaggctggataggagtattaaattcgggtcagagcatgaactgtaggaaactgctttagggtatgccagaaagctgaaggcagaagttctgttcgggaaaatctgctgctttctctccttaatgagaatgatgctgttttgttcatcaaccgggtaaggctgatgtttattaaaatgctcttaaataaaagcatatagtcccaagtgtccatcgatagatgaataaattgtggtatatattaggttggtgccaaagtaattgtggtttttgccatttttaatggcaaggtgttccattgtaataaagattaaatggaacagctttcagttagaaaagacatactgactcatgctacaatatggacaaaccttaaacacattaagttgaaagaaggcagacacaaaggccacatagtgtataatttcacttatatgaaatgtccagagtaagcagattcatagagacaaagcatagacgtggttgccatgggctggagggacaggaagacatgtaactgcttaatgggaacaaggttttttgggggtggtaaaaatgctctaaaattagataatgatgatggttacacaagtctgaatatactaaaaaccactcagttgtacacttatttaaaataatttatggtgtgtgaattctgtctccatgtgagttcttccagaatgtagtaaacctgaatataaaaaagggcagtaactgacttgtatactttaacatggttaaaaaggtggattttatgttttatattttaccactatttgaaaaattttttaaagacaataactagaaagaattggatttctctttctactctggcaggaccaaaaaaaaaattttgtaacaaaccagtaggttaatgtggttttgttttgtttcggttttggtcagcttcatttagcctatgatgggtcatggctttgaaacttttgtctagcacttagtcaggctgatgaggcaggatgacttataaaggtgggtgtaagaagagcccttggattacagagaactgtagtaggtaggagagatgctagacaattcactacttaatcgtcagtcttcattaatccctggggggagtagcctctatgtttcaggcagctctggacagttagtgtttgtgcacatacccagtgatttgttgatgagactctgtgggcaacaaccacagtcattgtatatgcaaccttgtgcctactggcctaatttgcttgttacctgaaactgtgtcgaaactaaagtttccagaaattgagtcgaaatgtttacaaaatgtgacatgacagtgctctctggcctgaatgtgcatttacttgccttagtttattctttatcttagtaatttacttcgtatggtttggtctctgataactttcacagattctggttaacacgagttactaaaatttgtgaaataataatatcacattgtgtttcttggtacacatttgaagtcagtcaaaacaatgtttgagaatgtgtctggctctttaatgccctgtgcagcagaggactttgtaaaggatttcatttcaatcctaaatgacctgtgagaatctggtctcaggtaaaaatctagttacattttgagccactacctaatttaattatctttggatatacttgtttgcataaacatttaatatctgattgcataggtaatatgacattaccctctctatcccaattcctaccctctctcttgacacccagaagtttctgcagttggatttcctgtttcattgcaaggcagtattggagcctgcattcctagcagctgagaatagaaataacaaataattattattaatttaataattgttaatagtgtaaatagttcattgttcctacagactgcattttgagaactggtattcctaatgtatttcatatattaaaaatgaagtcaagcgttttagatttaggcaggtagcacttagagaaaggatctcacaatctctgctcctctttgcacaagtctagcaaaagtgaaactatgtttatagcttcagctttgatacaaacacttttctcaaacagattctagacccatgggaaaaggcttctttccttgtgctccttgagaacactgtgtaaagaacgtactaatgaaagaatctaaggtcaagaagaatgaatgcacctttaaaatgacaagttttatcttgttactctcctgctaaaaacagtctgttgcattctatgagatggtatggatggtgtccagatgcctcactaggccacactcagggtccttgaatagctgcagtttgccaggcttttctgcattgtcgtggtggtccttcccttgttgctgctgcctgagagatactgcctggttcttacagacacagattatgtcatctttgcagccttcacccaaagttgctccctccttctagggcattttgttttcctacttaataccaagtgtcagcatgttagtaataaacaggtgtctctaccattagtcaaaggtgggagttaagcctttcatctttgtagctttctccagtacctaaccatgatttacttcatgggaagtccctcaaagtactattaattatcgtgtgttctcctgccttgcctcttaacaaaaattctgctgttcctgattatttccattttaccagtgttttgttccttttctatccaggcagcataattcgttgtatgaggcgcctggaagaattgcttcgacaaatgtgtcaagcagcaaaagccattggaaacactgagctggaaaataaatttgcagaaggtcagtatcaaatggataagctgtttctaatttagacaaatttggtgaagcaaatcttgagccctggaccacaacctaggaggacgttttgagatgttcttcactgcattgtcatggagagctatctactagtgtttctataaaatttagtgtgttgggggaaaagttgagattttatatatacatgcatttacgtatattaattgtacgctaactacatgccaggcattgttttaagcactaggggatatagtgaacaaaaagacacccctgccttcatggagtttacattctagtgtggggagatagacaataagtcaacaattaaatttatcagatggtgataagtctgtaagataaaaacaaagcagaaaagacaatagaattggcagatggatatgatggtctagggcctccacagggaaggtggcagttaaggcctttggtgtatgcttgatgtacgtgaacaccagcaagaggccagtgtggctggagcagaatgggcagtgagtagaggagtaggggttgaagtgagaaaggaaatgattccatagttcccagccccaggcttctcaactctgcagtgactggaggtgtggagtttgggagtgacctgccccaacttggactttacaaggtaattgttgctcttacattcagggcaagtctgtagagtagcacagtagaagtggggagaacagatcaagaaaggatggctaaaccaaggtggtagtaatggagtggtggtgggggggcaaggggcataagcttcagtcctgtctactgactcttgaccaagaaaaaggactaagttaatcaaagaatataaccacattgttgctgagtcagtcaatgctagtgatttctgcaaacaacttagtgtcctaagaagaggtttgcaaaaactggctgatatttccacagttgataaatgtaggcctgtttaatgactcagaatttaagtgtaggtgtcaaagttttaaaaataatttgtaatcaaaatttgtatttgtccttccttggcctagaaagaatttcacatgggaactgaaaaaaaagtgtcttctgatataggttgaaaatccaagtctttggattttacatttctttagacagtttagtccttccctataattttttttatttttatttttatttatttatttagtgtgtggagacagagtttcgctcttgttgccccaggctggagtgcaatggcgcaatctcggctcactgcaacctccacatccacctcccaggttcaagcgattctcctgcctcagcctcctgagtagctgaactacaggcatgcgccaccacgcccggctgattttgtatttctagtagagacggggtttctccatgttggtcgggctgctcttgaactcctgacctcaggtgatccgctcgccttggcctcccagagtgctgggattacaggcatgagctactgcgcccgacctagcatttatctttttaaacagttctagacacctctttcctggccagcccccatggagtatttcagagtcaaaagaacaggggtctggcttgtatgttttccacctcacagaggtggctgcaaattcctctaggtgttcagcaaggtgtttgactttctaggctgctcgcttaccagttgaatcagggttggtatactggctttaaaatttcggtagaggcaagttaggtgttttgtggtcttgaaagtttaaaccttactttcttttctcttaggaatcaccaaaatcaagagagatattgtgtttgctgccagcctctacttgtagagtcagctaaaggaatgtgagattttaaattattgaccacctgtttgattacagttgactacaaatgcctgcaagtgtggatttggttctcccatacattttaatatgtattatatttaaatcaaacatcattcatagaaagcatattacatacatgtttatacataagcattacatttttttaataaaaatgtatacaggtggggcactgttttggtggaaggcttggagtttttttaatgagtttagagctattagataaccactgagttaaaggtaactatgtacacacaaagtgtgcatccaagaggcatagcagcagcagaagtctttaaaggcttgtacaccaggaagaaagatgcatcctcttgccttgtggcaatcattttcctttagaaaacaggccagcttcacctgggcaccctgctgcctttcaaggctggtgattgctcggatagtgattcccagttgttggtgtttcatgcagagttgtatgagagtcctcctcttttctttctttaaaagaagttctttctttgaagaaatccgatacatatacagcctacagtgcaaaatatttaatggtataatttagatcaagttaaaaactacatacaaagttgtgatcaacagcatcctaagataaatataaacaaaaggatatactttgaggtgtacagattaagcatataaaaaattagagactaactgggattttttaaagattattccaaattaagagttgctttgttatgccttcagcaaatagcttcattttgccaatactgaataaaagagttatttctacatgtgaattagttttttcaagtcataatcccctaaaaaaactatttctagccagagcctttcacaataaaaatactaagattttacaaaactactaagttttagaaagagcaacctagtttttaacctggtgtgtatcctgaagtgacttttaataacattgagattcttgcccactgcatagtcttctcctcagctggggattttttggattttttttttctatttacttatataaatgtttagcaatatcaagatgtaggctgttgacctgtatacttacaactaatattgcaaccagagctccctgaatgagtccagtcaacacatcgctccagtggtgtttataatcagaaactcgagaaaggcccacataaatggatacggcaacaagaccaaattgcagtgtggggcgtaagagtcttgcccagtctcccttcatcctggcttgaagataaagctaaaagaaaagaataaagaaaaaaatagtttatttaacataacgcaaaacttttatattaaggaagggttggcatttgaaatgattatcaaagtattattatatagggaacaggacttctaggcaaacattcacgtacgcattattacctaaatgttaatcctttaaagaaacaaaactattgccctactaacttgttcacaagaatctattgccagtctagctataccacccttcaaactgtatacaaacaggtgtttccttgtttatggctttctaaacaggatttcagggacagttcctccccttgcaatttgggttataattctcatagtcaagaccagtgctgccattggtttttttattgttttccttaaagaaatgggg

SEQ ID NO: 6717 - DNA, 291 bp, Homo sapiens
ttatttttttgagacggagtcttgctctgtcgctcaagccagagtgcagtggcgcaatctcggctcaccgcaagctccacctcccgggttcacgccattctcttgcctcagcctccctagtagctgggactacaggcgcccaccaccacgcctggctaattttttgtatttttagtagagacggggtttcaccgtgttagccaggatggtctcgatctcctgaccttgtgatccgcccacctcggcctcccaaagtgctgggattacaggcgtgagccaccgcgcctggcc

SEQ ID NO: 6718 - DNA, 530 bp, Homo sapiens
ttttttttttatagagatgggggtctcactatgttgcccaggctggtctcaaactcctcgtctcaagtaacccgcctgcattggcctcccaaagtgctgggattacagacatgcgccaccatgcctgacccagtatcgtggttagttctgagtcttgggataaagtgctagcattctgggcacaggttgccattgctctgggcctatctagggactatttcattaattaaccaaagagagctcttctaccctcaaattgtttaacaaggcaactgagactaaataatctgtatttgcaagtaatataggttgtagtttagttatgatccagccaagaagtgtattctttcaacagtacttgtatcccctttaagttaagttctatgagttttctgtacactaatcggacctaagaaattcccctttctcatgtcagtctgcctttgactttgggtgcatctctgaaggttttatgtagaaatgattctttttagggagtctgctctcattaaaaaaaagaaaaagaaaac

SEQ ID NO: 6719 - DNA, 530 bp, Homo sapiens
ttttttttttatagagatgggggtctcactgtgttgcccaggctggtctcaaactcctcgtctcaagtaacccgcctgcattggcctcccaaagtgctgggattacagacatgcgccaccatgcctgacccagtatcgtggttagttctgagtcttgggataaagtgctagcattctgggcacaggttgccattgctctgggcctatctagggactatttcattaattaaccaaagagagctcttctaccctcaaattgtttaacaaggcaactgagactaaataatctgtatttgcaagtaatataggttgtagtttagttatgatccagccaagaagtgtattctttcaacagtacttgtatcccctttaagttaagttctatgagttttctgtacactaatcggacctaagaaattcccctttctcatgtcagtctgcctttgactttgggtgcatctctgaaggttttatgtagaaatgattctttttagggagtctgctctcattaaaaaaaaaaaaaaaaagaa

SEQ ID NO: 6720 - DNA, 310 bp, Homo sapiens
ccttttattttttatttttttatttttttgagacggagtcttgctctgtcgctcaagccagagtgcagtggcgcaatctcggctcaccgcaagctccacctcccgggttcacgccattctcttgcctcagcctccctagtagctgggactacaggcgcccaccaccacgcctggctaattttttgtatttttagtagagacggggtttcaccgtgttagccaggatggtctcgatctcctgaccttgtgatccgcccacctcggcctcccaaagtgctgggattacaggcgtgagccaccgcgcctggcc

SEQ ID NO: 6721 - DNA, 17691 bp, Homo sapiens
tagacaatgcagatagtagtacactccatgctgtaacctttcttcgaactcctgagattcttactgtaaattcaattggacagttgaaaatatgggatttcagacaacaaggaaatgagccttctcagatattgtcactgtaagtgttgatttgtaatttcagtaatgtaatccacaaattaatgtgttaggttgtttatagctactggctttaagccatattgaattttaattgcattttaagagggagatccctgattaaaatttggtagagcaagcataacttgacggggttggtactactatgcttcatttagtaattatttgttatagtgattcagagcctttactctttgaagtttgtattatttcatggagaacttatttctgctctttcaatgattgtttaatggataaaatatactccagatgtaatgattgggggaaaaatataattccaaatattttttctgagcagaaatccccctttgtaggtgtacaacgttctctcgtaagaaaatagaatgtgtcacactgaaaaaatagttacataaactaagcattaaataagatgataaataatatttagtatataattgatgtatgagtttttaaataatttaacaagtggaaatgtgatttgtacatcttaccatcggattgtctttcattccatgtctccaaattgaagtgaaaatgaataattgtggccttgaattatttcaaaattgtactatttagaaatatatctaatttagttcattttttttggtatcattaagattcagccaggctgggcgtggttgctcatgcttgtaatcccagcactttgggaggccgaggcaggcagatcacttgaggtcaggagttcaataccagcctggccaacacagtgaaaccccgtctctactaaaaatacaaaaactagccaggcatggtggcacgtgcctatagaccccgctactcaggaggctgaggcaggagaatcacttgaacctgggagccagagtttgcaggagaatcacttgaacctgggaggcagagtttgcaggagaatcacttgaacctgggaggcagagtttgcagtgagctaagatcgtgccattgcactccagcctgggcaacaagaacaaaactctgtctcaaataaaaaaaagattcagccagtagctccagccactaagttgacacttagttaccatataaaacatgtttcttggctgagcatggtgactcatgcctgtaatcccaacattttggaaggattatctgcggtgagaagtttgagaccagctagggcaacacagtgagaccccatctctaccaaaatttcttaaaatagcctggcacggtagcatgtgcctgtagtcctagctacttgggaggctgaggcaaaaggctcttttgagcccagcttgcagcaagctgtagataggccattgcactgtagcctgggtgacaagacaagaccctgtctctcttttttttttttttctttgagacagagtcttactctgtcacccaggctggagtgcagtggcatgatcttggctcactgcaacttctgcctactgggttcaggcgattctcatgcctcagcctcccaagtagctggaactacaggcatgtgccaccatgcctggctagtttttgtatttttagtagagatggggtttcgccattttggcctggttggtcttgaacctcaagtcatccacctgccttggcctcccaaagtgctgggattacaggtgtgagccactgagcctggtctcttaaaaaataaacaaaaaaaaacaggctgggcacggttaccagtcatcccagcactttggaaggccagggtggctagatcactggagcctgggagtttgagaccaacctgggcaacatggagaaaccccatctctacaaaaatacaaaaagttaaccaggcatgatggtacacacatgtactcccagcaactcaggaggctgaggtgggaggatacctgagcccagggagtttgagcctacagtaagcaatgattgcagcgctgcattccagcctgggtaagtgaggccttgtctcaaaacaaacaaaaaacgtgtttcctgtgttacacaaagataaattatactttatttgattttgacgtcattgttatctcccacaaaaggactggtgaccgagtgccactccactgtgttgatagacatcccaaccaacagcatgttgtagctactggtggccaagatggaatgttgagtatttgggatgttagacaaggtactatgcctgtatctctgctgaaggctcatgaagctgaaagtaagtattgtgaagatacagaaagtttatattgggtgagttatatgacatataataagcacctttccataatgatacatgtggatcattttacatcatagcttttaatggctgaattgtgtaaatttaaatagttatgtaatttctttttactcgacatttaagttctttaacatttgtttttgtttttttggagacggagattcacccttgttgcccaggctggagtgcaatggcgctatcttggcccaccgcaacctctgcctcctgggttcaagcgattctcctgcctcagcctcccgagtagctgggattacaggcatgcaccaccacacctggctaattttatatttttagtagagactgggtttctccatgttggtcaggctggtcttgaactcctgacctgaggtgatctgcccagctcggcctcctaaagtgctgggattacaggcatgagccgccgtgcctggtttttttttttttttttttttaaagagacagggtctggttctgtcgcccaggctggagtgcagtggtgcagtcacggctcactacagccttgacttccagggctcaggtgatcctcccgcatcagcctcccaagtagataggactataggtgtgtgtcaccatgcctagctgattttttgttgttgtttgcttttttttttgtagatatggggtttcactttattgcccaggctggtctcaaactcctgggctcaagtgatcctcaggaagtgctgagattacaggtatgagttatgagccaccacatcaaccacaggtttaattcttatatccaaaaactgtagttagaatccttagatatttatctctgtgtgtgttttttttttttttttttttttggagacagggtctctctctgttgcctaggccagagtgcagtagtggtgtgatcatagctcattgcagccttgaactcctggacttacacgattctcccaaagtgctgggcatagccattatgcccatgcccagccttatgtacttattttcttaggataattttttagaagtagaattgctaggccaaacattttgcatagcgcattgacagatttttctacacaaaaataataccagtttaagccaggcacattggcacatgcctgtagttccaggctcctcctactcaggagcctgaggcaggaagattgcttgagcctgagagtttgaggccagcttaggcaacataacctctttaaaaagttaataatactagtttaatccaggtgagtggcatgcaccagcttctcaggaggccgaggcaggaggattgcttgagtccaggaattcaaggctgtagtgcattatgattgcacctatgcactccagcctggacaatatagtgagaccccactccctgaaaagtgataaaaatcataccattttatatgccatagtgaagtgtgcaagaatgcccttttcccatgcaaatgcaggctgtcatatttgttaataaatgttgtgctcctcaatttattgttgcatcacatcattttttttaacatgaacaatagatttataagcttttttttttcttttgattctggtggagatgatttagccggacagaaatttttcattttctcactctgtctttgatatcatgccagaatggattatccttttttttttttttttttgagacagagtcttgttctgtcgcccaggctggagtgcagtggcacaatcgcggttcactgaaacctctgcctcctgggttcaagccattcttctgcctcagcctccctagtagctgggactaaaggcatttgccaccatgcctagctaatttttgtatttttagtaggaatggggtttcaccatgttggccaggctggtctcaaactcctgacctcaggttatctgcctgccttggcatcccaaagtgctgggattacaggtgtgagccactgcgcccggccctatatatttttttaaaaatggggtctctctcacccaggttggaatgcagtggcatgatcacagcccactgcagcctcagccttgcctccctggctcaatcagtcctcccacctcagcctcccgagtagctgaggctacaggcacgcacccctactacacccggctaattttttattttttgtagagacagggtctcaatatgttgcccaggctggagtgcagtggcatggtacctcacttaagcctcaacctcctggggtcaagtgatcctcttgccttgcccttctgagtagctgggactacaggtatatgccactacacctagctaattttttttattattagatttctatagaaattatgattccataaaagattttgaggaaatgatggccgggggcggtggcttatgcttgtaatcccagcactttgggaggccgaggcaggtggatcacctgaggtcaggagttcgagaccagcctgaccaacatggagaaagcccgtcgctactaaaaatacaaaattagccgggcgtggtggcacatgcctgtaatcccagctactagggaggcagaggcaggacagtcacttgaacctgggaggcagaggttgtggtgagccaagatcgcaccattgcactccagcctgggcaacaagagtgaaactccgtctcaaaaaaaaaacaaaacaaaacagattttgaggaaatgaggaagactggtatctttcagaattgaaagtgattttggaatatatagaatttctttggggctgggcacggtagttcatgcctgtaattttagcactttgggagtccaaggcaaacagatctcttgagcccagttgtttgagaccagcctgggcaacatggagaaaccccatgtctgttaaaaatacaaaagttagccaggtatggtgatacatacctgtagtcctagctactcaggaggctgagataggcggattgcttaagccttggaggtcaaggctgcagtgagccatgaccatgccattctgcactccagcctgggcgccagagcaagaccctgtttcaaaaagagagagagaatttctttgagttgaattatgtagaagtttgtcactgacctatgttcctaaagtatgaagcatacatatgtgggctaagaaatagtttttcttgataaataatcaacaaataaaaaataaaaagccctccatctgagactggatccaaattcttggaacatttccaaattttggtttggtagaagtcagttgctatttctgtgataaagaccagaagtattcagaatcttggcattaaccaatattggatattgcctcttagaaattcatttttatatttcattaggatctttctcagttttttccaataatataatcttgcatatattaatgacacaggaattgaaaaataagacaactaaccaatttaaaaaaaaattttccgtaaaagacagtcattcctagctgggcacacacctataattccagcacttttgggaggctgaggcaggaggattgcttgacgccaggagtagaagaccaaggtagacaacatagcaaaaccctgtctctatttaaaaaaataaaaataaaataaaataagctttttcataaagtaatagggttaaatgttttagcaatgattttcttttcttttttttgagacgtagttttgctctttttgcccaggctggagtgcagtgatgcaatctcagctcactgcaaccttgcctcccgggttcaagcaattctcctacctcaccctcccaagtagctgggattacaggcacctgccaccacgccgggctaattttttgtatttttggtagagatggggtttcaccatgttggttagctggtcttgaactccagatctcaggtgatccactcacctcggcctcccaaagtggtaggattacaggcatgagccactgcgcctggacatttttttttttccttgagacagagtctcactcttgttgcccagactggagtgcaatggtgtgatgttggctcattgcaacctctgcctcccgggttcaagcgattctcctgcctcagcctcctgagtagctgggattataggcacccaccaccatgcctggctaatttttagtatttttagtagagacggagtttcaccacgttggccaggctggtcttgaactcctgacctcaagtgatccacccaccttggcctcccaaagtgttaggattacaagcatgagccactgtgcctggctactattttcatttatttccttgcccagtacgcaaatttagttggcttctttttcctttcttttcttttttttttttttttctcagacagtgtctcactttgtcgcccaggctggagtgcagtggtgcgagctcggctcactgcaacctccgcctcccaggttcaagtgattttcctgtctcagcctcctaagtagctgggactacaagcacgcgccaccacgcctggctaacttttgtatttttagtagagatggtgtttcaccatgttgcccaggctggtcctgacctcaggtgatccacccgccttagcctcctaaagtgttctttttcctttctatgtgttatagccattggaaagttacattatgtcttttctttaattctgaagcctttaatttttaggacagacttgaggctcgaaggtatgtgatggaggataatggaagatgatgcctagagatgggggtttaatgttgtttgttcagcgaatctgcacaggaatgagcttattgattcttgtctcttagtgtgggaagttcactttcacccatccaacccagaacatctttttacctgctctgaagatggatccctctggcactgggatgcttccacagatgtacctgaaaagtcgtcactctttcaccaaggtaaaactttttaatgaatactgttatgtgtactttttttttttttttttaagacagagtctcactctatcacccaggctggaatgcagtggcacgatctcagctcactgcaacctccgcctcctgggttcaagcgattctcgtgcctcagcctcccgagtagccaggactactagtcatgcaccaccgtgcccggctaatttttttgtatttttagtggagatggggtttcaccatgttggccaggctggtctcgaactcctgacctcaaatgatccgcctgcctcagcctcccaaagtgctgagattacaggagtgagccaccacacctggccttttttttgagacagagtcttactcagtcacccagaatggagtgtagtggtgcagtctcagctcactgcaacctctgcctctcaggttcaagcttttcttgtgccttagcttccctagtagctgggattacaggtgtgtgccaccacaactggctaatttttttgtatttttagtagagatggggttttgctatgttggccaggctggtctcaaactcctggcctcaagtgatctgaccacctcagcctccccaaagtgctgggattacaggcatgagccactgtgcccagcctgttatgtgtaattttatcatacttttattttgttttttttttgtttgagacagcgtctcactctgacatgcaggctggactgcagtggcatgatcacagctcgctacatcctcgccctcctgggcttaagtggtcctcctgccccagcctcccaaatagctaagaccagagatgcttgcaaccacaaccagctaattttttttttttaatttttttgtagagatgagctctcactatgctgcccaggctgctctcaaactcctgagctcaagcaatcttcctgcctgggcctcccgaggtattgcaattataagcatgagctggctgtacccagccattttatacttttaaataccaaattagacatcctcgtattttttacttaatggcaaaacatttttattctcttgcctcagagtaaatttgagtatcacagggcttgaaatctgactgtcaagttacttactactgtatggctgatggctagaaatgctgtaagctggctcacttgagacagccaaggttctcctttgtgagtgccattaacctggaccctcatgccatagcatagacagtggcaaatctttcatattgcattgccaagtttgtgtgaatggcaagaaaaaagttgatatttgatgtaactgagggtactggttaaatggcctgatctcaggccgggtgtggtggctcatgcctgtaatcccagcactttgggaggccaaggcaggtggatcacctgagtttgggagttcgagaccagcctgaccaacatggagaaaccccgtctctactaaaaatacaaaattagccgggtgtggtggctcatgcctgtaatcctagctattcaggaggctgaggcaggagaattgcttttacccaggagacagaggtttcagcgagccgagattgcaccattgcactccagcctggatagcaaaagcgaaactccgtctcaaaaaaaaaaaaaaagggcgtgctttcctcattacagtcagttgtaggttatggtcagccaaagaccatgcacttgtaatcggggtttatgtgtttttgcattttccaagtttcctgtttttgagggtttgtctgtggctccaaagttcttttgcttattcatttattcagaaatatttactgaatgcctaccatgtggtaggcattcttctaggtgttaggacgtgtaacagtgagcagaacgaaatgtcgaaacgcatagagcaaatattctaatagttaaaaaaatagataatgtatcagtaagagtccaattagaatgtcagaaactaccttagatgtagaaggaattggtctcacatgtgttagaagggctgggaaaacaaaaggtaataggaggggtgctgggagaacaaataggaagaaaagggaaaacccagaaatagtaattgttagtacccctgctacttgactgttgaaaatgctgtaaaagtttgttctgaattaggagaaaaggcgctccctcaaccaggctgaaactaccaccagtgttgttgccagaaacctggagcaggaaggagctgcttctcccttccgccttccagtcacccaccattaatacctgctattggcaaggcccatctggatggcagatggcaaagcagcctggaaagtggagtttaccaacttctacctcctacagtatatagtggagcacagcaaagtggaaaaggaggccgggcgcggtggctcacacctgtaatcccagcaatttgggaggccgaggtgggcagatgacctgaggccaggagttcaagaccagcctggtccaacatggtgaaaccctgtgtctactaaaaatacaaaaattagctgaacgtggtggtgggtgcctgtaatcccagctactctggaggctgaggcaggagaattgcttgaacccgggagttggaggttgcagtgagccaaggtcacgccactgcactccagcctgggcaacagagcaagactccatctcaaaaaaaaagaaaaaggaaaataacatggccaaatacactgctaattaccatgaagaagaatacagcagagtaggaggataaagaataaagacaggggtgaggggagctactctagtgagagtcagaagaggccacttggcagaaggaacatttgagcagagacttaagagaagtgaaggcataagtgacatgaaagcattccaggcagaggaaacagcaaatgctgagggcctgagacaggcagagaactgcaaggacaccacggttggagctcaggcagcagggtacagtggtgggagataaggactggtggctgaggagcccctgggactttgtagcccatgataaggactttagacttatgggagggggaggagaaaagtggaaaacagggagatgaggaaggagtcttatcacagtggcttgaataatgtgttaatctttacagcgtccaagagcaatgtaaaatgtaggggcagtaaaagataaacagaaaaactaaggggaaaaaaattctaaaacttcttcagaaaaattctggagcggagagcatgtgtggagcatgcatgcatgtccatgctataacttcatctacagagaaacaaacagtttcatctaaggattaactaagtatgtacttcgtttttacttccttcctcccctaaccgcacagtcttgaacttgcaagtttacttttaaggaaccttggttagactggaaataaaactttattctgtgtctactattgcaaggcacagtattagacactgtgaaaaagtaaaacatataaaatatgcatcctgctcttaagacatatttagtcatggacagaggcatggatagttcaattaggatataagaattgttataaagtagtaaattaatggtacatacaagtgctgagggttcaaggaaagagaaaaacatgaagtagaggttgtcttcaaagttttcttagagaaggaagttcagccatattttaaaggatcagcaagattttaaatgtactaatctttaagcttcaagacatagggacttggcacagagcacttagcacagagcctggcacatagtaggtactcagtcatttgttgagtgaattaaatttgtacttatttgatatgacagcaagttgagaggaaagtaagttgcgaataatgactaaaattgaaatatactgcctctgcctcactttattctatagtaagtacagtgcgctgttagagataaaaccttataatctagtagtgttctaatctgcttgtaagaacatttatctaaaaagcataagaatgaaagatttgaggtaaggcgattatattttaagaaatatagtaacaaatatatatttagaaatatatttctagaaatgttcatctagaaatatgtctagaaattctttctcatgatcattttattttgttattacccaagagtttatatttccatgtattacctacatttttggtttcttttttttctttccttattcaacttgtatgctggccgttttgctacctttctgagactttccattaaaagatgaacagaaagtcagttgaaatcacctgcttttcctgaagacttcgagtttggtatccatattatcccatggaaatttgaatatttaatatcactgaataagcctttggtccaaagtggtgatgtataataatggaattattagcctattattctgagaattaaacacattgatatcatcacctttctaaatatcagtagaagtttgaatgtttactaatataaaaatcatcttgaaagatttcttccttttctttttttctcccaggaggaagaagcagtacttttttgtctcatagcattagtaaccaagctaatgttcaccagtctgtcattagctcctggctcagcactgatcctgcaaaagaccgaattgaaatcacaagcttacttcccagtaggtctctgtctgtgaacactttggatgttttaggtccttgtcttgtttgtggaaccgatgcagaagcaatttatgttactagacatcttttttcgtagaagtactataattataagatttcagatagaacatgcaattagccttttgaaatccaacttctgtgcaaaattttagtatcagaaaatacgagatttgcaggggaaacatcagtaaactaccattaatgtcaatgcccagttttgacttttgttagcctgacactcccaaacagttgtagaatccgatagatgactgatggcaaaagattgtgaacatgtggaagaaaatcagtgggattctggtgctgatgaataggttgccttcagagtattattgacagacagcttgtggaactaattctttatttttgatgttgtgggaattaacacatcaatggtggttatgggaactaccaatgggttcctacaatttttatcagtagtatgtggcatatacaccttcctagtggcagttgccaatgttaatgattattctttttattgcaagtatttcctatgatccttccacactttatttccttaataataataaactttttcagaaagaattgagtagagcaaaaatgacaaagatgtgtagctgtgttcaatttttttttttttttttttttgaggcagagtcttgctctgctggagtgcggtggtgcaatctcggctcactgcaacctccacctcccaggttcaagcaattctcctgcctcagtctcctgagtagctggaactacaggtgtgcgccaccacgcccagctaatttttgtaattttagtagagacagagtttcaccatgttggccaggatggtctcgatctcttgacctcatgatccacccgcctcgacctcccaaagtgctgtgattacaggtgtgagccactgcacccggcctgaaatttttttaaggtgaaaatgttttgacaagttcctttttcagaataggtttttgagcagaactctttcagcttgttagacccaactttgcttttgtttagcttcacagcatagctgaaagttgccaaactggacattgtgcaataaagtagaattctatattgataagcaaactatttccaaactaaaaatgtgatagataaaagtgtgattaatcaaatgatatgatcagagtaaagaattttgccattttgatccttttactttgttttagccacctatagtgttaccaaccatctttatccttgtctgcagggataataatgaactaatgtagtgttttaagataatttaatgatactatctttccaaactttgttagattttaaatgtattattgacctgagaccttaatgacaaatcactgctattagacaattgaagtgttcatttactttgtaattccaataatcatagttatggaattatggtaaggttttgcttttctgtcctaataaatatatatattttttgagatggagttttgctcttgttgctgaggctggagtgaaatggcatgatctcagctcactgcaacctccgtctcttaggttcaagcaattctcctgcctcagcctcccgagtagctgggattacaggtgctcaccaccacacccagctaatttttgtatttttagtagagatggggtttcactgtgttggccaggctggtcttgaactgacctcatgatccacctgcctcagcctcccaaaatgctgggattacaggcttgagccactgctcccggctgatttttgtattagtagagacgacagggtttcaccatgttggccagggctggtctcgaactcctgaccacaggtaatcagcccgcctcggcctcccaaagtgctgggattacaggcgtgagccacttagtatttgtaaccataagagaaagtatattttaacagcattacatttcatgccaattgacaagttttgccaattttaataagaaactaagctttatgtaatgtaacaccgtaatttatgaatttgttcattgtcactgcctttattcatgaaactgtcaaatagagtgtctttcaagggttgcaggatcttagagatagaaagtaccttggtgatcatctccagcctaaatttcatcatcccttctatggtattcccaacaaattatcatccaacctatacttaaaaacatatggtggccaggcatggtggctcacgcctgtaatgctagcactttgggaggccgaggtgggtgaagcacctgaggtcaagagttcgagatcagcctggccaacatggcgaaaccccgtctccactaaaaatgcaaaaaaaaaattaaccgggcgtggtggcaggcatctataatcccagctacttgggaggctgaggcaggagaattgctcaaacccgggaggcagaggttgcagtgacccaagatcgtgccacttcactccagcctgggcaaaagagcaaaacgccatctcaaaaaatatacatatataaggagataaagtttcccattttccaatacagtttcacatttgaacagccctaattgatacaactttatggcagggttttagtgtgtgagtgggatccaaaacactcaatcctgtaaaagggtacagtcctattgtatgttaacacactgatgatgtgagcctgtgagatgagccaatcaccagttgttatgttcgaatctgctttgtgttgggacgctttaatgtcagggtttcactaaataaatgaattttcatatactgaactgaaatttgcttctatctgtcttatctcgggagccacacacacaaaattcctctcatcacatattcaaatattcaaaattgattattatagtctctccagtgaaggtttccttctctttctttccatttttggctaaatccttcttatccttcaagactccttctaggtgtcattttctccagacagcttttattggcctccagcaatccggactaaattgcactctgcttcaaaagcccattgtgcagaacttaaattgtgcgcaaagcagtgtgttaaggagcctgtctccccctactgggccacaagatcaagaacagcgcccatgtcttcgtgtaacagtgtttaacagtatctgaaccatagtaagcaatgagtcactgttaattgaccttgttttcacaatcttgttttccctttaaaaattactgctctttgtcaaaggcctttttttttttttttgagactttaagtctcgctctgtcgcccaggcaggagtgcaatggcacgatctcagctcactgcaacctctgcctcccaggttcaagcaattctcctgtttcagcctcccgagtagcagggattacaggtgtgcgcccagctaattttttgtatttttagtagagacagggtttcaccatgttggccaggctggtcttgaactcctgacctcaagtgatccaccctcctccacctccgaaagtgctgggattataggcatgagccaccgtgctcggccagaggccttcttttaagtgtgacttccaagataaacactttttcatatattgtctaccttggtgattatgacagaaatcttgccatcctgttaataggaatgatattcctttgtaatgctgtgtcagctttctgaagtgttcacatgtgatactcctaagccacacttcctatattcggaagttaatacaaatggtttttaatccttaatatgggcctttcttgttctaagaaaaatttcatttcaatataggaaaggactaactattttctttgaatcttttgtagaagctattattttctccataattagcccagcgtgctctctccactttcatcccattgattaagaaagatgtttgagacaggatttcactctgtcacccaggctggagtgcagtggtgtgatccccagctcactacagcctcgatatcctgggcccaagtgatccttccacctcggtctcccaagtatctgggactgcaggcatgtaccaccaagcctgactaatttttgcaatttttattgagatggtgtttcactatattgcccaggctggtcttgaactcctgggctcaagcaatctacttgccttggcctcccgaagtgctaggattacaggcaagagccaccatgcccagccagaaagatgttaaatgaaatgaagtttttaggcccactgctggagtcttctcaattatcaatgaaacatgaatctctggtatttggctacagttactgaaatatttataaaacaacctaatttattgacatttcattccatttatcttatttccaaggttattgtgagaaaatgtgctgtagttatactatcaaaaatttggcataattgaaaaattcctggtcctttgtgaatagtacttttatttaattgtattgtggaaacatccttttaataatccactctagactcttgtccaagaagcatattaaattcaacagtatatagtttatattgaacctttagttaagcttatggtgtcaatagtatctagctcagactaatagaaggtctggccaggtgcagtggctcacgcctgtaatcccagcactttgggaggccaaggggggtggatcacctgagatcaggtgttcaagaccaacatggtgaaaccccgtctctactaaaaacacaaaaattagcctggcctggtggcaggcacctgtagtcccagctactcaggaggctgaggcaggagaattgcttgaacccaggaggcagaggttgcagtgagcggagatcgtgccactgcactccagcctggcaacacagcaagactccatctcaaaaaaagaaaaaatggggctgggcacggtggctcacacctgtaattccagcactttgggaggcggaggcaggcggatcacctggggtgggaagttcgagaccagcctgaccaacatggtgaaaccccatctctactaaaaaaaaaaaaaaagaaaattagccaggcatattggcacatgcctgtaatcccagctacttgggaggctgagccaggaggattgcttgagcctgggaggcagaggtgcagtgagtgagccgagattgcaccattgcattctagcctgggtgacacagcatgactcaaaactaaattacattaatttaaatttaattaaagtattttttaaaaaatttgtagctgcaaaaaatcagaagagtttttacccctctataggggtagaataaactaaaaaatcttagccagagaagtcttagaatccatgatacaccagtagcaaggcatacacctagcacccagatttggtttcttataccatattccaataaaaggaaccagggatccttggaggaatggtgatccctgaaccggggcaagaaatatacaagatatcttggagaactgggcgcggcagctcaagcttgtaatcccgcactttgggaggccaaggcgggcggatcgcttgagctcaggagttcaaggccagcctgggtgacatagggagacctggtctcgacaaaaaatacaaaaattaggcgtgccaggcgcggtggctcacgcctgtaatgccagcactttgggaggccgagatgggcagatcatctgaggtcgggagttcaagaccagcttgaccaacatggagaaaccccttctctactaaaaatacaaaattagccaggcatggtggcgcatgcctgtaatcccagcttctcagggaggctgaggcagaagaattgcttgaacccagcaggcggaggttgcggtgagcagagatggcgccactgtactccagcctgggcaacaagagaaacttggtctcaaaaaaaaaaaaagttggacatggtggcctgcgcctgtaatcccaagttacttggatgctgaggcatcacctgagtcccgggggttgaggctgcagtgagccataatcatgtcactgcacttcaaccagggtgacacagtgagaccccatctaaaaaaaaaaaaaaaaaaaaaaaaaaag

SEQ ID NO: 6722 - DNA, 109 bp, Homo sapiens
tttttttttttttttttttttttttgagacagggtcttgctctgtcacccaggctggagtgcagtggcatgatcccagctcattgcaacctctgcctcccaggttcaag

SEQ ID NO: 6723 - DNA, 1511 bp, Homo sapiens
tctgggctttctccaaggatgaacctgcttattagagcttggcctgtgatttcttacatttcttatagtttaatggttaagagtgtgggctgtgtaccaggttgcctgggttcaaatcccagctctgacacttaaaggttaagtggcctagacataacttccatgcacctaacctacctgaagagttgctaagcagattagatggattaatacatctgaagagcttagagtggtgcctggcacatgatgaacactccatcaactagtcatggattagtcgttcttttcctgccttcctctctagccttgctgctcaagagccatagactaagaatgagaagggctgttaaagacacctctagtgcagccttttaaatttaccgataagaaatcagaggcctgaagagaagtgagttgcctgaaagcccacagcaagtcagtgacaggccaagaccagatccaggctgcctgactccagtttcttcctcgggcccccatgacctttccaggcgccatgtatgtttctccctggtctcagggtgagggtagaagataacctttctgaaagaggccacgtccctggcctcccagtgaagcactaggtgaagccaggccaaaaagaaagcacttctctggagacagtttccaggagatttttactttcgagaagagctttattatttttgtgaaaatcatacatgcgcatagcttaaaagattcaagccatttgggaaagtacaacgaaaacagcaaaagtcccctttgattctaccactgggattcagccactgttatatgttggtaaacatccatctggacatcttgtacatatatgtagacattttatttctttaattatctttcttattgtgtttgatttgtcgagcaaagttcattttctggctctaggtaagcattccaaatagtgaaactcaaatagtgaagctgaaagtggggcagccttcatattggagaagtggccagccgtgcctaacgggctgtcagagatgatctcatagcatcagactgggctcaggcctcgggcacagagaggtcctcccctcccccagtctggccacagagcctttaaaatccagagaatcagggctgcagccctgccaggggtttggagaaccttccaacaccttcattttatagatgagcaaactaaggccctgagaagtgtccttcgctcttaacctagactttgtacatggtctcgttccccgctttaatagaggaattgctttatgtcgtaggactggaccttgctgcctttgggttggttcctggagaagcaggaataaccacctgccctcctgcccggaggcctttcttcccaggtgactcacagtgccaccctggggtggggctcacggtcaacctgataagggactgataatgaaatttctgtaccaactggctccacacaggggaaagatgttttctgggtaagtctggtcagaagaggttgatggggggaaaacaaaacagacaaaaaaaaaaaaaaa

SEQ ID NO: 6724 - DNA, 1511 bp, Homo sapiens; identical to SEQ ID NO: 6723

SEQ ID NO: 6725 - DNA, 2176 bp, Homo sapiens
aaaacaacaaagcagggtatctgtcaattgatctgtagacccatttcctcatcacaccccaaatctgttatgtggtggctatgcatttctggatctgaggcatttgtgtagttagttttaaggtatgtttatttattattttattactgtgaacagattgcagtgtgtgtatgtgtggtgtgtgtctgtgtcttctgcctagaacaataacctcctttcctttctcccacatcactgcacttttggctgccgctgtggtttgttgcaaatctgagctcatttaatcccacagagtattaaacaatatctggtctcggtggctctgtcattccactgcaggcgtcccaccttcatttgccagctgggatctcttaatgagctagctgtgcacagttcaatagtaaaacccttttagctggtgaaatatgtttgaagaactcactgttggagtgttccatgtgaggcctgcttccactcttgctggcattctcttttcaggatggctgcagctcctccaagttactgttttgttgccttccctccacgtgctaaggatggtctggtggtatttgggaaaaattcagcccggcccagagatgaagtgcaagaggttgtgtatttctcggctgctgatcacgaaccggagagcaaggttgaggtaagccgtgcattgcagtctcgcgagtcacactctcttttctctggctttgccgctagcacaaccctaacttcttgcttggaagcttgctcacaagtcagagctatcatgtcagttctgctgattcctgtttccatgcaggtttgctcatagccttgaaaacaaggtcatgggagagctctatgctcactgctatggccattgttttataattaagtgaaatatgtacatagttctgaaatcaaatctaaaaaacaagatttattcatagaagtctaacttgtatccttgtcccctttactccatgatcttttcccctataggtaatcatgttttggaagatcttggtttatccttccatttgcaaaattacacatatatatgtaacaaatcacacacacatgtgcatattcatcctggtccctttcctcctttcttcgattaacagcagcatgccatatatacttttctctactttgcattttttttcatttttatttttttattttcttcaatcagctttctcaggttgaatctctactttgtatttttcaactcaaaacatattctggagatcactccctacggtacatgcaggtcataattcctcatttagagctgcatggtgtttcattctatggatgtatcatagttaaccagccccatattactgctggacatttggattgttttcagtctattgctattacaaacagcactgaagtggataacagccttatgcatctgtcatagtgtctggtctcagtttatatatttttatcataataaaacattatccattaattcttatttcaaatcttttaaaaatactatttttgtcagtatttctttgggatagatgcctagaaatgaaattgctgggtcacaaggtaaataaaaatgtaattttattaaatattatcaaatttccttccataggtggtgtaccgttttgcattcccatcagcactgtatgacaatgcccatttcttcatattcccagaatgtgttgtcaaactttcacgatggctattttatgttaattatactttctgccattttactaaattcttttattggttgtgtcagcttttatcattgcttttcttggggttttcaggtatatttttatatcacttgcacatagagattgtttagttgttgttctgtctttaattgttttcttgtttgattgctttggcttatagctcgggttttatgttaagtagtagtggagatagtgggtgtccttggctctgcacctgacctgagtggggctgtctctagtgcttccctattaagtaagctgctggttttgggattgagatttatatagttttatgtgccactgcacctggcttatgataaaaagtatacatcagtcaggtacagtgacacatgcctgtagtcccagctaccctggaggctgaggtgagaggatcacgtgagcccaggaagttgagaccagcctggacaacatggtgagaccccatctctttaaaaaaaaaaaaaaaaaag

SEQ ID NO: 6726 - DNA, 102 bp, Homo sapiens
gatacagcttctctctctctctctctctctctctctctctctctctctctctctgtctctcggtctctctctctctgtctctctctctctctgtgtgtctct

SEQ ID NO: 6727 - DNA, 8207 bp, Homo sapiens
  SITE (2330): n equals a,t,g, or c
gctggtctcgaactcctgacctcaggtgatcctcccgccttggcctctgaaagtactgggattacaggcatgagccaccatgcctggcgtttttttttttttgtttttttttttaatagttattttggttgtgccttggtatcacagtgtagttttaatttgcatttttaatagatatttaaattgagcaccttttcttggtttattggctactcagacagcctcttttatgaagacatccaaatatattctacgtttgagtcttttgtccatttttctgttgggctgtcttttttttgtttaataggaattctttatgtaatctgtcaggtagtattttatctccccagattatatttttagtttttaaatgatgtcttctgatatacagaagttcatgatgttataattgaatatgtaacttttttctctttctgtatcctgttcaagaaatagttgtctactccaaggtcatgcagatgtttttttctaaatgctttattgtcttgtcttttattttttatatctatggtctatttggtatggcttcgtgtgtgtggtgtgaggtagggattgagattcttttttttccattgggatatctgattgacccagcatcattttctaaaagatgcctttcctcattgcactgcggcgcctcctgtgtgcttttgacagggatgacagggatgaggatgataaagaataggcatagcgtgtctttctcttgtgagacacagggattccaactcctattctcaatcttaaaaagaagttatttttcctcctccaagtgggaattttactagtgcttctgcttccaggataccaagggttcgagttttggaggatgaagaggggtcgaaggacattgaattgtcagatgacccttatgactgcatacgactaagtgtggagaatgtcccctgcattgtcactctgtgcaaggtataacttgtattttatggtttttgtcttccctgtgggtgtgggtctcctctaatcccaacctgctgaggttacttaataagttaagaagttgtaataccacacaccatatagaagtagcttttacccaaatccaataatttggttatactagaaaccactaccacgagtagctctttcttttctttttaattggaagatatgatgtggtcctgggagccatgagtgtgtttgtagtaatagtagccagagtttgttaagctccttccacataccatgtgcttcactaaagcaccatgtcttttaattacctcaactctatggggtctagggtggttgagtagtggcagggtggcgaacactgtcccccctatgaaatgggaggttggagcaggtcttgggtatcatgagtggttttcacatagagggctgtggagctgaacatcaggctgatgtgatatataactaatgctgccccaggctgtgcaaagaggcctgtattggctattgactgggattgtagctaattccactcaggattcattatctcaaaataaagctaaacaggtcaggtttaattccactgaaatcacttcatgaacaggatgtggtgaagtgttcagacaacaggatggcaggatgttgggtcttggccttttttttttttttttttttttttttttgagacagtcttgctgcagacgcccaggctggagtgcaatggcgcgatctcagctcactgcaacctccgcctcccaggttcaagcaattcttctgcctcagcctcccaaatagctgggattacaggcacgtgccatcatgcctggctaatttttgtatttttagtagagacggtgtttcaccatgttggccaggctggtctcaaactcctgacctcgggtgatctgcccacctcagcctcccaaagtgccgggattacaggcataagccaccgcacctagccggcttgttctttcttgttggttaattgtttttttttttttttttttttttgagacagagtctcgctctgtcgcccaggccggactgcggactgcagtggtgcaatctcggctcactgtaagccgcttcctgggttcacgccattctcctgcctcagcctcccgagtagctgggactacatgcgcccgccaccgcgcctggctaattttttgtatttttagtagagacggggtttcaccttgttagccaggatggtctcgatctcctgacctcatgatctgcccgcctcggcctcccaaagtgctgggattacaggcgtgagccaccgcgcccggccttgttttgagacagtgttgctctgttgcccaggctggagtgcagtagcacaatctaggctcactgcaacctctgctgcaacncccccacccgccccggctcaacctcaagcaacccttccacctcagcctcccaagtagctggtaccacaggctcacaccaccatatctggctatttttttgtatttttggtggagacagggtcttgccatgttgcctgggctggtctcaaactcctgagctcaagcattccattttcctcagcttcccaaagtgctgggaggcatgaggtccggcgccccagcataggcttgttcttgagtgtgtcccttagcatggaccctcttgattcccccttgccatcagtgaaacgtccatgtggccttgtgtgtgaatttctccctgtgtgcccctctgttggaaagccttggtggcctttgtcttggttggtctctgaattctagttttaaaccaccttgccctgtttttccatatcgtgtttttattgtaccacccacacagtggcctgtgagaattgttgaacaatccctcagctgttttcctcgtgagcagaatctaaaataagacctggaatgaccagtgcaaatacttttgcctggtgtagagattcccaccacgaggccatcaggggtgggactctggggcctgcgtgacccaccgtgtgccacgcaccctgcctttgcagattggctatcggcatgtggtggatgctactcttcaggaggaggcctgctcgctggccagcttgctggtgtcggtgaccagcaagggagttgtgacgtgcatgaggaaagtggggaagggcagcctggacccagagagcatcttcgagatgatggaggtgaggccttagttctgaggaaggtgcagggacctggccggggtgcctgctgcttcctgctcccttggtcataccgtggggattctccccattcacagccttgaccccaaacttggagatttgggaacagctggtttgagccaggggtctgctgacctaatcaaggggggttgtgggggtggatactctggactgggaggtaaggagcctaccagtaaccattaattgtcctcagtaagtaccccccatctcatttctatgtgtctaaataagactgttggactttcataatgtaaagagccactcgtaactccaaaagtgcaggcctttgtgacttgatgagggaatagaattcttggctcactgcttcctgtccctagaagtgggtgagtaaaggtggaagcacgggctgaactgtggctgtctcccaaattcgttacagctctagaagtgtttaaatggagacaagcagggatggtaagaaatctgacccactggagttgggttgggttgccctcatccctagcagagccatcaaggcgcttctacagttctctgtactgtttgccccacatgtctgtcacctcactggcctggaagccccgcagggcagggacagggtcctgctcacctgtttcccagaccttctttcccctatatccacctcacctttctgactgattgactgactgaacttccaggaacagagttagcaggatctgattattcatactttcttgcaacctctatatcaccacacatgcccagagatcattgcttaatagcaagcactcttcttttgtgtttagaaacaatgacttcatactgaagaatccaagaacatgacatctactttctctctttatcatgttatttaaaaggccaaaatgagcactgtatatagcatggagttcccaaccatgggctgtgagggtgtactgccctggctgcaaacctggctctgggccatagtccccctcatctgcaaagtgggactgataatagtaatatctgcccagacactgctgaggttgttattaggatgatgtgaggtgtagaggagaagcacatgtcacagtgcctgatatgtcatcagttctcagctaatggcagctcttattctctgtgctccatgaagcaccctgagttcaaatttctccagacttaatgctgcataaattctaccaaagtcctctaggcaagggactgtcaaaccttgttttagaaggtactcttccccctcccaggagagtttatgagaatttctttaaacagcaacaacaagcacagtaaacaaatagctggagtttattgtgtgcgtactatgtgccagatactgttttcactgctttaaatatatcatttagtcctcaacaacctgtgaggtaactattattattgtcctcatttttacagatgaggaaactgaggcacacagaggataagcagcttgcctacaggcctccctgctcataaatactggagctaggatttaagccaagactgtgtgcgtccagagcccctgctcccagccactgtgcaatgtcagccttataaaccagatctgccctggctgtcatagatggcagaaccagagctctgttcagtgagctgagctttgtcctcccctcaggtttggggagtgaggtctgctaactctggacaggggactatagctctgtggccctgtcttactgtttatctcacacagggatgcagcaatctggaaaatgacttggtggagctgagagccttgggggtagttgtgcaggctgccacccctagcctctgcagttgctttcctgcatctggattcagaggcgtcaaggccctctcaagtcctggcatcctgtccatctcatctcctcttgttgtcctctctccccaccctcatgtatatgaataatcagtacccctgtttgacagattcagacttttttttctttttctaatgttatgggaaaatctttccaaaggccctttttttttttgagatggagtctcacactatcgcccaggctggagtgcagtggtgcgatctcagctcactgcaacctccgcctccctggttcaagtgattctgcctcagcttcccgagtagctgggattgcaggtgcccgccaccactcccagttaatttttttgtatttttagtagagacggggtttcagtatgtttgccaggctggtcttgaactcctgaccttgtgatctgcctgcctcagcctcccaaagtgttgagattacaggcatcagccaccacatccagcccccgaaggcctttttgacctttaaccctgactttgcatttcatagaggtgatcacttcccagccttttagatcgaaatcatcttttcataagagttttagtcatacttgggatctcatcccatgttacagttaggggccaggggagaagacacacaagtcattactctggggaggatacacctgtaactgaagagattgaggcagggatttaggcatggatgtttttatctcaacattgttgagaatggaaccagtggcagagttgaatccacactgctatgggaatgtgaaagacctgataaggtagagatttgtggttggttctttgtattcttaaaatgattcttgggcccagagacagaataacagtttcataaagaaaaatatatttttttatattggggtggtggttgttttttgagacagggtcttgctctgttatccaggctggagtacagtggcacagtcacagctcactgcagccgtgaactcctgggctcaaacaatcctcccatctcagccccctgagtagctgggtctacaggcgcataccaccatgcacagctaatttttagttttttgtagagatggggtttcactctgttgcccagtctggtcttgatctcctggcctcaagcaaaatcctcttgccttggcctccaaaagtgctgggattacaagcatgagccactactcccagccatattgagtttttttgttttgttttgtttttgtttttgttttttttacctctcgtgtctgctctgtagggactgattattaattttgtgggttgtccctcttgatgtgtttcgattctaacatttcactgcctttagcatctcagcatggcagtaaacaccaaagatcccatccaggtactgactttggtcacacctgagcagttctgcttagaggcttcatgggaggtgaatgagaagctgcttactaaaatgtccttggcatcatctgtttcttctccagacagactctggattccctgtggtctccctatagtacagtgtcacctggctgtacccaagcccagatttgattgacaactttgttgcttgttgcagtggcagcaggatagtgaagcatgagctaatggccagggcaggctttgctgctctctgtttgttgcctggtgggggctggtgtttgtctctcttttttatttttttgatatgacgatttttacaaaatttattatgttgttggggtctgtggtttttgttttaatttgctttaattaaataaaagtcctctaaggcagatggaatgtgtacaatgtcagaaagactagctggcagaaaggaatgcttttctggtcagagtgtgtgtgccttacaagggggtgtgtgctctctcccgtcccttctccacagactggcaagcgtgtgggcaaggtactgcatgcctccttgcagagtgttgtgcacaaggaagaaagcctggggcccaagagacagaaagttggattcctgggatgatttgcacatcaactgctcaactgtggattgttttttacttttccttttaaaccggttcgtatatatttttcttcgctgttacgaatttacagcagcatttgtacatgtaaaattaaaggctattttctggtctggtttggtatgtctagagttcttcagttgaagccaaggcaccattcagtgacccatctgggtctggcccttatctagtgagtggcagacaaatccagagctctgccaccaagggagacccccacaagctggagtaaagacctgacagaaactggtttacaggaaatgcttatgatatgtattttgtgaatttttttccccttgaagaactttaaaaataagaatcacaaagaaaagttcattcaccttgtgtatttgggtggttctgggagaggaaaaaagaggaggcactctgctgcaggtacacacccagggcgtctgtctgtctggttagccatcccaaatcctgggaaagtccagctctgacttcctgccctccaagagatccgaatggaattccctaggttcaggggctttagtggcagccactttggcccttagccatcctttcttatcactcttgttttgaaattgctttgtgttttataaccactccctggtgtttcctaagattttgttttgtcagcattaagaaggcagctttcaagatgttgtcatttgataattcagctgccttcatgctctcagcattgaaaggaagactatgcttgctggcccagaaggctcttcctataagcctgtagtctcactgtgcagtgtgttaaaattaagtctcttcatgtgtagagcagcctttgtttttttttctaggggaactgaaactcctaaatcttaaaacaccctggggaaggagctgattcacgaaggagagcgtttcaaccgtggcatttgctctctgcattccagttagcaaatggggtaaggcgttaggaatttatcaccaaatggaaagaacataatgtgagctgaagcccttgggactgcttccagaggtcctggtgtgggcgttcctcccagcaaggccaggtccatccctgtggagagaagcagctgcctagacttgggcttaatgggggagcttctgccctgttgagagcatagcctgggttttcatcttttatgtttcttcagtgactatctacaggcaccatgacagtgttcccaacaaggcagaaatcagcctggtctctccttccctgctcctggttgactgcccgtgacatgacaaaacattggcagtggtggcgcagagatgcaactcgagtgtgaataaagtttagaagcatttgcttttgatggtt

SEQ ID NO: 6728 - DNA, 129 bp, Homo sapiens
accacacctgggtaattttttttattttattagagacagggtttcaccatgttggccaggatggtcttgatctcctgaccttgtgatccgcctgcctcggcctcccaatgtgctgggattacaagcgtg

SEQ ID NO: 6729 - DNA, 2163 bp, Homo sapiens
gtattaactcagaggaattgggcaatgtctagcaaaattaaatatgcatatacctttaattaagcaatcacacttttgggaatatatcccaaaggcaaatttgcaaaaaatataaaagaacatatctgtaaagtcattctttgtgcctttatttgtaatagcaaaagattggaaagaacacaaatggccatctctatggaaaaaacactcaaagtgctttttctgttctctcacccagcaacaatcaacacagtagacttctgtgaaatgtgtggggttttttccccagacaccaagcaagtgttaacctgaaataatcgaaagaatcagagtctagctttattcaagtgaaaagctgagaatggccatctgggaaacacaaactccagagaaatggagtctgtgctcccaaattaaaagttaagttcttgcttatacaggcagaaaacaaatgtattagggttatagcattttctatgcaaggctggtttatgagttataacaatctaatgagttacagcttgctttcatttccttttcaatttaaaagagtgtttttaacatttcatcttagacatgatagtctgtgtatgaaaaaagtaaaagggcagttaatctacagtgaagagagaatggggctgcctaggtgccctttaatcatttacaacattttataaaactatgtgggtaagagagaaggcaaatctaatcagagaaacagtggttacagttccctgttacgtgactgaggtcctataatcacattcctttaaggctcaaaatgttttgaagttccaacagcttagattttgaattacttattttcacacaatcagttctccagcagacagtagctgagtatcctctaattcagttcaattctgacactgcctggagacagtgtgagatctcacaggttgagggatcccacttctgatgccatttgcaaaccccaggttagtttgcctgtgcttctgactgaccggctataaactggggatcccacaaccccctccttggattcgattaatttactaaagcagctcacagaactcagggaagcatgtttactagcgtattataaaggacataacaaaggatacagaggaagagatgcatggggtgaggtatgggggaaggatagagcttccatgtcatttctaggtgagccacactccaggaaacttcatgtcttcagctatctggaagcttcccaaaccctgtccttttgggtttttatggaggcttcattacataggcatgattgattaattggccattggtgatcaacttaaccttcagccgctctccctatctggatctttctaatcatgccttgatctttctgcatgaccagcccacatcctgaagctacctacaggctgccagccatcagtcaactcattagaaagacatcactttagagagtccaaggattttaagagctgtatatcaggaaatgggtcaaagaccaaatatgtattttgtaatattacatcatcagtaaagcagttctgtgcaaccttaaaaaggagaataaagatgatctttatgtggtaatgtggtatgattttcaagaatattattaagaaaacaagatagcacttaatatgtagcacatgatatataggtttatagcataaactatataaaagcactgctaccttttatataagaagaagagacatgcatataatctaaatgttttcatataattttgaaaagaaacactggaagaataaatcaaaagcaaatatagttaccttttcggcagaggaaagggattagaagtgagactttgaattttcattttattttatttatatattttttcgagacagggtctggctctgtcacccaggctagagtgagggcagtggcacagtctctgcagcatctgcctcctggcctcaagccatcctcctacttcagcctcccaagtagctaggactacaggtgcacaccaccacgcctggctaatttttgtagagatggggttttgccatgttgtccaggctggtctcaaactcctggactcaagaaatccaccctcctcagtctcccaaagtgctgggattataggtgtgagacaccatacccagacagaatatgtttttaaaatattttgacttggaatcatccacatatttagccttcaaagaa

SEQ ID NO: 6730 - DNA, 544 bp, Homo sapiens
caccatatccaccaccaccagagctaccaccaaagccaccatgaccactaaagtttccaccacaaccaaaattgccattcccaccaaaaccacctccacaaccaccaccaaagtttccagaagcacttcacccttttcggctagatgaagcactaggcatctcttgatttgacacagcttccctaatttcacaattgtggccattcacagtatggtatttcagaatgacagtcttatccacagtcatgcttacaaaggcaaagccttttttcttgccattgccttggtcagtcatgatttcaatcacttcagtttttccatactgtttaaaataatctcttaggtgatgttcttcagtatactctttaatgccagcaacaaatatctttttcacagttaagtgggcactggtctctgagagtcttctcttgagacagctctctttggttccacaactcttccatccaccttgtgtagctttgcattcatgactgcatctacctcctccacagtggcatacgtgacaaacccaaagcccctggag

SEQ ID NO: 6731 - DNA, 4557 bp, Homo sapiens
ttttttttttttttttgccatcatcaacacttatttaaaaagtactttaaaatcattcattttctgaaaatgcttttcattattttccagggtccataaaaagcatagcacggggacgaaaagcttttctaagccagcagtgtttggtgaacactaacaatcccactggcataaagttaaagttttatttccttttttcttttcttcttaaaataaaattaaggctcaaatgttctattaagctctcattgcttatgtatattatattaaggcttataaatgcacctggtaaattaaattcaccctggattgaattaacacctgctatatgagttatttgctttatgtaatcagtaatctcaaggtttctcctctttctctggaaacacaatttaaatattaacctaatctttaaactgcggctgcttctttctgacatttggaaactggtcatccatacaaaaaaggcaaatatggatatattaatgaaaaggcagcttctcaaaaatcttaaagtatgtaactcaatgaattgggaaggaaaatgataaaagtagcaggaaagtcaagtctttgtgtcactttctagggaaaacaatgctggtcatctgccaacaacacctccagtctgagagcctggctgaagttgactgccaattgccaaagagtctttgggttttcttcatttgaatctctggaagaaccttgggaagctgccatgcgtgcaagagaattttaattttaaaaaatgcagtaaggtataacaagttccagggatgataaatcctgcagaaagacccatgagggtgtgtggtgcacttggcctgatccggtcccaacgtgcagccagggagagggactacgggcctcctcaagtcctgctcagctgacagcctctggagaatacgaagctttcaaagtgctggtcctcggctttttctctgatgcgttgttcctctaaggaatcgacgagtttgtccctttgctcaatcacttgcatcagctcggtgaatacttcttgctcttcgtttagatccttctcatctttctggctctctaaagaaaaaaaagaaaaccactgggctcagagaagattgggccccggcagagttcttggcatggacattctcgattgttatggacttgttctgcctttaattttaatggagaaaacaaggaaatgaatttaacaccaaggaaccgcccttagagtgagagatgagaaaggtgtgtgcggtgaaacagttcactcagttttcatcttgaagatatgtacaaagcgacagggaaaacccctttgtaagaaaaggaatttaataccagccaaaccctatcaaatcccccaaccttccctctgccccaaagagaagctaacaaaacaacaaaaaaggcggtttccataaacatagctgagccacagcaaagaaatctgtgagaagtttctaagtaaaccacctgcaccagtggctactgtttcaatgaccacaatcttttttttcttttttctttttttgagatggagtctcactctgttgcccaggctggagtgcagtggcatgatcttggctctctgcaacctccacctcctgggttcatgtgattctcctgcctcagcctcctgagtagctgggattacaggtgtctcccaccacgcctggccaattttttgtgtttttagtagagacggggtttcaccatgttggccagggtggtctcaaactcctgacctagtgatcagcccacctaagcctcccaaagtgctgggattacaggcatgaaccacagcgcccagccagaatctttttcatgtgtagttaatgacaaactagccttttgtttagggaccacagggaagcaaagtgaggctacaactgtctgataggaaggtgtttccacactgactttgcttttccctttgtcttctcgagtacctgaccttcttgataattggcctgaggcatttggttgcctgggggagataggattgttagaaaatgaaaggacagagtaggaaacaagtagtaatgagctttggacacagaaaacaggattctgaagccagatttaagtcttgtcaagcagacaattgccttgggagaagactttctaaattcctagagcccctgtgtctaacacacggaggactgggtggggagcctcctcccagagtagagagggtgccacttccttcatcaggcttagctctgaggtctgggccaggaagcaggtaggtctgatgaaagggagacaaagaaacaccatcccactgcacctcaagttttaagaagaaagaagagaggcaggaggggcagagggttagagccccatgctcggtctctccattctgggccttagaagccccaaaggggacaggtaatgtcatatctcattggtggatgggcaaaggactcttgccctgcccttgttcagaattctggaaagaagccagcttaaagggcatccctatgtataaacataagacagtacttcatggttgggcagagaagaagggtctgagtgtggccccccagatcttggtgtgctgtatgcggcatgggcggagcctagaagggtccacttgccccactgttaccagagacagctggctagtggacctgccacagggttcccccatggggcagagtgaccccacaggagagactgtctagccatgctgaatgaaggatgtgctgaggtgaggctgggtgagccaggaatgcccgcaggctctcaggcaccccgagagagtgggcaggctacggatgagaccagcacacacctcagttgcagatgccaccagagagagttgcagcccaatgatgggggatgccatgaggggactcaataagcacagcaccccacacagagtcctaatgccaccacaaggtcacacagacctgccttttcccattacttgccagtcaccctggggagagacagagaagggaggggtggcatcttcaagactgcacattttcatcccaaagagaccgagcatctcctacacggattgtttaagttattgcatcagattaagtttaccatggaggggtaaagagttcctattttttttccttgctaatcagtgggaggatgcataggcagaagatgagctcaggtacagacagaataaagaaactacattttttggatacatctgacagggttgagaaaaacctatgaccttcacttcttagtaagaatttttttaaaaagaatcaaaggtggcaaatagtctttggtggtatttatttagtatcctgaaacagaacaaattaaacttttcaaatctgatatataaatcagatatcagttagaacctatggtttattaagttaggtatattccaggattactattcatttaataaacagcacagaaaaataaaaaaaaaatcctctctcagtttaggcttgtcgtggatggacccatctgagcccctctgacatataaaaaatgatttataccactttagtctgtacagtgctgctgcataaggattttgttagaattctgttgctataaagaaacagtctgcaaattactgccatatgggaaagaacaggagaccctgatctgtgatctgttcctaaatcttagccctaccattcaccttgagcatgggatttaaattctctgagactcagttttctaatttgtaaattgggcgcgaaaatacctaaatacaaatcagtgataataatgcctaacatttgctcagtacttgccctatactgggcaacctcataaggtaggtgcagtattagatccctgaggtatagacattctttaagttgttcttttagatctaggtctgaatatgggaaggtcatgcatcgatctggcactgcaaacacacaggtgcaaaacggagtgaatatgcctttctggcaggaactaataaatgcatacagcagtatactgtgtcagttgagtttatctctactctccttgcttcctggtggaatcgttttctcatgtgtgatgccctggccctgcccacgctgggagggaacgtttcctttactagctctagtgcctggcagcactaggcccgcctttctctgggatcccaaagcccttctgatgtggccttcatctcactgaactagcattacggaactgggggtgttagtctccccagtgagaccacaaactcctagagggcaggacttgctcttcatcataaaccaggaccatagttcccagtaaatgtgtgttaaatgaatgggtggatacatgaatgaataagtgaacataggactttgttcctactgccacttgggatgggggaaagcactgccctcacagcccaagtgaatgaggctaaatggggcttgtggtgctgctggtgggaggcaggctggctttgtactttcctctaacttgcaggctggcaggcaggaagagcgccccactctgggatttgtggcacacgctgctcaggagcctttctagggggaagttctcaacaaaggcccaagcatactcaccctccttgagcattttctctctcagtttctgctccagtctgctttgatgatcttctaattccag

SEQ ID NO: 6732 - DNA, 739 bp, Homo sapiens
aaaaaaaaggaaggaaggaaagaaaaggaaaaagaactgcaacctttggaacttgctataacatagaaagattgtgcttaaatgtaacccaaagcattggctgactcagaggaaatccagttatacatctaatttctggcttgtgagctggccagattggtgcgtgcagagagcgtctctgacagaagtggtttatggattgatttgagagaaatttggtctccagtcagagccaactgttgcagagcaccttttgtctaatgacacatttaaacacttgccgaaatgagagcggccaaatacacaaccaagagttctttagtgtttctcttatcgataatagactaaatcttcaaagaatccgagcaaaaacaatcaaatgttttatgacaacacatcaccatattaaatcttctcttctttggcccccatgggaaccctcataatgccccaggaattccaacatgtcagcacacaaactccatcttccagctttcttttcaaactgaaatgtcattaaaaaaattcatgacccagtttgggatttggtaaatagggtcactgcattcagccctccctctaagtcagaagtggttttgtccttgctctgtagagttcctggggagagggagagatacttctctctttgagtctaagaagaccaccagcgagaagcattccttctcttgtaccctagtgtgttcagtttcagtagcggcaccaacctcaccaatatttt

SEQ ID NO: 6733 - DNA, 14273 bp, Homo sapiens
ggtagccgcagctgtcttttccggcccccgtgcactctccgcccgagcggagccccccggctcgcggggatcgcccccgagcgctgcgtcctgcgggtgggtgagtgagcgcctcgcggcccccgagctgtggggtgcacctggccggggagaaggatatcttggctcccttgcaccccaacgggcgcaaaggggcaggagcccggattgggggaggaggaggacccggggaccttgtgtcgctcggtgggagccggtctgtgtttctgtttcgctagggtgtgtttgggttggtagagtttgtggggaggggtgcctcgtgtggatgggaggaatcggggaggctaaggcgaggaggagggggtttgagatgggttgagggagaggattgacggagggtggggttttgaaagagttggaagtttcttgttacctgtgggtgcggtgattgcattggggggcttggtaggggcagctcaggacaccgaaggagaggatggggaaggctctcctgcccgtaacttacttcccttttgggagatttggttcctcttgcattgctagttaaggaaggagaggctggagaagcctgtgccgtcagagaacctttgcccctttccagaaccggtgccatccctagtctcaggaacataagggaaggggtggcccccaggagccgggaggggccttgaaacccctgctgacaggtttggggtaccacttttttgtggggcagtggctggtaccatttgcagcccacggacttttttgagttgccggtaagcagggtgtgggtgcgttcctgtttccttgcggttgtctctttttttttttttattgacacagggtctcgctctgtcacccaggctggagtgcagtggcatgatctcggctcgctgcagccctacgcctccaggactcaagcgattctcgtgtctcagcctcccaagtagctgtgattacaggcatgcaccttcacgcttggctaatttttttttttttcttgtgagacggagtctcactctgtcacccaggctggagtgcagtggtgtgatgtcggctcactgcaacctctgcctcctgggttcaagggattctcctgcctcagcctcccaagtagctgggactacaggcatgagccaccatgcccagctactttttgtatttttagtagagacggggtttcaccatgttgaccagggtggtctcgaactcctgacctcaggtgatccacctgcctcgtcctcccaaagtgctgggattacaggcatgaaccaccgagcctggccaatttttgtatttttagtagagagcagctctgtcttttggggaggcttcagggtgtttgattagtggtctttgggggtgggcgagctctgtgggggagcttttgatgcaacataatctcctttgcaggtcacctaacccatttgtggcttcctctacctgtgctcagccatggccagcgagagctcacctctgctggcctaccggctcctgggggaggagggggttgccctccctgccaatggggccgggggtcctggaggggcgtctgcccggaagctgtccaccttcctgggtgtggtggtgcccactgtcctgtccatgttcagcatagttgtttttctgaggattggtgagtgggtcctggggcgggtgtggactgactatagtatgggaggacatgatggggaggggtggagatgggactgggataagattaggaaggggacccaagagaagcggttggctgaagggtttggggaggggctctctgtgggcttgcatttagctccaccctggagctctgcagaaccagggggtgggggatatggggtgtgagtcccctgtgacctgatttgctgctcctgcctcagggttcgtggtgggtcatgctgggctactgcaggccctggccatgctgctggttgcctacttcatcctggcactcaccgtcctctctgtctgtgccatcgccaccaatggagccgtgcaggggggcggagcctactgtatcctccaacatcgatggactggggtctggcctgttctgcctgctagggagggtgtggaaggggccattacctttgttggctcaggggcaagacaagtgtttttttcattcttaaaatttttttaggctgggtgcggtggctcacatctgtaatcccagcactttgggaggctgaggtgggtggatcacttgaggccaggagttcaagaccagcctggccaacatagtgaaaccccgactccactaaaattacaaaaattagctgggcatgatggcacccgcctgtgattccagctactcgggaggctgaggcacgagaatcgcttgaacctgggaggtggaggttgcagcgtgccaagatcgcatcactgcactccaacctgggcaacagagcaagactctgactcccaggctgcagtgcagtggcgccatcatagctcactgtgatctcgacttcctgggctcaagtgatcctcctatctcagcctcctgagtagccagcactataggcatgtaccaccacccctgtttaatttttaaatatttgtagagatggaatcttgctatgtttcccaggctggtcttgaattcctggcctcaagtgatcctcctgcctcagcctcccaaaatgctaggattacaggcgtcagccactgtgcctggcctggcagggcaagttttaataaatgtgcagcaggcaggctggtatagtgaaggagatcaacattgccctgcacgttgatgccaatttctagtccaacaatctcatctgttaggcagtgattgttttacagatgcagaaactggcactcagaggatatgagtgacttgggcaaagccacatggctggggcctggctgcacttgggttcagtgcttggagctatggcaacttcctcacgtccatttcagtcttttcccttaatgctcacccctgcttccactttcagtcatgatcagccgcacactggggcccgaggtcgggggcagcattgggctcatgttctacctggctaacgtctgtggctgtgccgtctccctcctggggctggtggagtctgtgcttgatgtcttcggggccggtctgtgctctgtccgatctgggcagtgctgcgggtttacagggtctgggagtgtgggatcatgagggagaaggtcctctccagcagaggggcagactgagccattaccttggctttctggagcttctgctgtgtggccagcatcgtgcaggagatatggacatccctgagattgtccttgcctgcagggagctaaccatctaatcggagagaccaggctaagattcttaaaactgacagagaccaccagggagagctaagatgctaggatggagctaagagggaagtggggaaggtggactctctgatagcaggtgggcagaggagggcttgtcttgctttgggtcacagttggggctgggtcccttcttatttatttatttattttgagatggagtcttgctttgttgcccaggctggagtacagtggtgtgatctccgctcactgcaacctttgcctcccgggttcaagcaattctcctgccttagcctcttgagtagctgggattacaggcactcaccaccacgcctggctaatgtttgtatttttagtagagacggggtttcaccatgttggccaggctggtcttgaactcctgacctcaagtgatccacctgcctcagcttcccaaagtgttgggattacaggcgtgagccccggcgccctgccccttcttcttttttttttttttcttgagagaaggtctcactctgtcaccaaggctggagtgcagtggtaccatctcggctcaatgcaacttctgcctcccgggctcatgcgattctcccacctcagcctcccagtagctggactacaggcatgcctccccacacctggctaattttgcagtttttgtggagctggggtttcacaatgttgcccaggttagttttaaactcctggactcaagcaatcctcccacctcggcctcccaaagtgctggaattatagatgtgagccgcccaccatgcccggctggtggggtgccttaggatcgggccttctaactctgtccctacctctctccagatgccacagggcccagtgggctccgggtcctgccccagggctacggctggaacctgctgtatggctccctgctgctgggccttgtgggtggggtctgcaccctgggagccggcctctatgcccgggcctcattcctcacattcctgctggtctctggctccctggcctctgtgctcatcagttttgtggctgtggggccgagggacatccgcttgactcctaggcctggccccaatggctcctccctgccgccccggtttggccacttcaccggcttcaacagcagtaccctgaaggacaacttgggcggtgagctgggtgctgccgtggcagggatctcggggtgaggggtgggcagacgtcgggccgggcccgtaaaacctctggatgagcacaggtgtcagagggaatggagggcaggaggtctggactgcagagcagtgcaatttaattcaagcctgtctagcgtgtgcttggccggcagggcaggaggaagcccacaaaacagtccctgctttagaggaacttgtgttctagctgaggagagacatgcattcaggaatcagttaaatagcacagaatggcccagcatgacttaaacagatcaggatcacccaggagtggagagaagggaggcctgactatgggctggggagggcaggagccggggagctggaggtggcctgagatagacaggtgggggattcagccaggagctgggagcagagagggaaggcatctcaggaaagagcttgagaccaggtgcggtggctcacgcctgtaatcccagcattctgggaggccgaggcaggaggatcacctgaggtcaggagtttgagaccagtctggccaacatggtgaaaccctctccccgtctctactaaaaacacgaaaattagctgggcacgctggcttgcacctgtagtgccagacactcgggaagctgagggagaactgattgaacccgggaggaggagccgagattgtgccattcagtgagccgagattgcaccattgcactccagcctgggagacagtgaggttccctctccaaaaaacaaacaaacaaaaaaaacaccataaaataaaaatacaaaaattagccaggggtggtggtgcgcacctgtagtcccagctactcaggaggctgaggcatgagaatctcttgaacccgggaggcagaggctgcagtgagctaagatcgccaccactgccctccagcctgggcttcagaacgagactccgtctcaaaaaaataaataggctgggtgcggtggctcccgcctgtaatcccaggactttcggaggtcgaggcgggtggatcacctgagtccaggagttcgagatcagcctggccaacatggtgaaaccccatctctactaaaaatacaaaaattagccaggcgtggtggcgggcacctgtaatcccagctacctgagaggctgagacaggggaattgcttgaacctgggaggcagaagttgcagtgagccgagatcgcaccactgcactctcgcctgggtgacacagcgagactccatctcaaaataaataaataaataaaattaaaaagttagatgggcatggtggtgcacacctgtagtcccagctacttggcagactgaggcaggaggatcgctctagcccaggaggtagaggttgcagtgagctacgatggtgccactgcactccagcctggatgacagagccagaccctgtctctaaaaaataaataaataaataaaagagcgtggattagggtctggagggaggaatatcggagcactggggggacgtggcaatgtgtctggctgacccagggccagtgcaggaacaggctggggtcttagtgagggcagtgcaggggaggcaagaggaccgtgggaatgtgtggagagggtggctaagaggcctggatccctgagacggatgctgatgcactctcctccctgggaggatcctcctagctggctatgctgaggactacaccacgggagccgtgatgaattttgccagcgtctttgctgtcctctttaacggctgtacaggcatcatggctggggccaacatgtcaggtgagagtccctgcctgctgcctcctgggggtttggggctgccaccgtgagggacccagggggatggctggagggctgacctcactccctctgctccccctctccaggggagctgaaggaccccagccgggcgatccctctgggcacgatcgtcgccgtcgcctacaccttcttcgtctatgtcctgcttttctttctctccagcttcacttgtgacaggtgtctggggagggatgggggtggagtgtcgaacaagattggtgcacctgggtcaccaaggggaaacacaggctgggggactgggaagcagaaacccagcttgttggggtggagggtggctaccggcgattgacaacctatagccagcagctgccatggacccagtactgttgcaggcacttagcttgggagtgagggtgggtagtggctttctacccagtttgcatttccacaaatatttggcctcttgtgcatataccattaggtatgacagccgggtgcggtggctcacacctgtaatcccagcactttgggaggctgaggcaggaggatcgctggagcccaggagttccagaccagcctgggcaacagagcaagagcctccccccaaatacaaaaattagccaggtgtgatggcaaatgcttgtagtcttggctacttgggaggctgaggtgggaggattgcttgagtccaagaggtcgaggctgcagtgagctatgattacagcactgcactttagcctgggggttggagtgagaccttgtctcttaaaaaaaaggaaggaatgaccactgagtgattaaatccaaggctgcccaatgaataccaggcatatccctttagcacatttgatatctgagtctgatccttaagatcggggctggagattttcttaccccgtgacgcatgatcatccgtgtcctccttttcctccttcctaggaccctgctgcaggaagactatgggttcttccgcgccatcagcctgtggcccccactggtgttgatcggaatctatgccacagcgctctcagcgtccatgagctcgctcattggtgcctcccgcatcctccatgccctggcccgggatgacctctttggtgggttctctgcctccttgctggcttggagcacgccctcccttgtctgtctctccgtccccgctgagccctggctgatgtgtctgctgtggattctgtttttctaggcgtgatcttggcaccggccaaggttgtgtcccgagggggaaacccctgggcagctgtactttattcttggggcctggtgcaggtgagccttcttcttcaaggggccctttccctcaccccaccagctggcaggatgggggtgcagttagatgcaggctgggagacaaatgtaaagacaaatgcgtatgcacttggggttgcactggcactctgcagggttcactggcactttgtggggttcaccagcaccttgcaggttgccccagtgctttgcagagttcattggcaccctgggaggttcactggcactttttggggtacacgggcattgtgcagggttcactgacactttttggggtatactagtatttttcagtattcactggcactttgtggggtgccccagcactttgagggattcactggcactctgtgggatgtaccaacactttgtgggggttcactgatactttggaggtttggtggcactctgtgggagtgcattggccctttctggggatcactgacattgggggtgcacttgcactttacagggctcacgggcacttttcagggttcattgacactttggggtgcactggcactctctggggttcattgacactttgggggtgcgctggcactttgcatggttcactggtactttccagggttcactgacactttgggggtacactggcactttctggggttcactgacactggggatacactggcacttttggggtttaatagcattttaggggctcattgacactttgggggtgcactggcacttttggggtttaatagcattttgggggttcattgacactttgggggtgcactggcactttgcagggttcactggcactttctggggctcattgacactttggggtacactggcattctttggtgttcactggcattttgggggtgcactggcactttggaacaacggcacgcctcttggcccttgcccagctggtgctcctggctgggaagctgaacacactggctgctgtggtcactgtcttctacctggtggcctatgctgccgtggacctgtcctgcctgagcctggagtgggcctcggcccccaacttccggtgagagactcagatctgtgtccccagagagaagaagggaggactcgggctcaggcgtggggctggggactgcagcctcgtgtgcggcctgccctgagtttctgtccctcctcccctccatgcccgcagccccaccttcagcctgttctcctggcacacctgcctgctgggggtggcctcctgcctgctcatgatgttcctcatcagtcctggcgcggctggtggctccctgctcctcatgggtctgctggctgccctgctcaccgcgcgaggaggccccagtagctggggctatgtcagccaggccttgcttttccaccaggtatggggagctggtggggcggtggggaaatgggaggtggtcaaagaaccccctctctctttggctggagttggtgctcccgtccaggaggcgctgaacggggctgtgcatttgatcctgccacttccccactgcctcacccctatacccaggtgcgtaagtatctgcttcggctggacgtccggaaggatcacgtgaagttctggcggccccagctgctgctcctggtggggaacccccggggcgccctgcctctgctgcggttggccaaccagcttaagaagggggggctgtatgtgctgggccacgtcaccctgggagacctcggtgagctgccctcccactcactcactcactcccatccttctctccccctaccttttttttttttttgagatggagcttcgttctgttgcccaggctggagtgcagtgggacgatcttggctcactgcaacctccacctcccaggttcaagtaattctcctgccttagcctcctgagctgggattacaggcacacaccatcatgcctggctagtttttgtatttttagtagagaaggggtttcaccatgttggccaagctagtctcgaactcctgacctcaagtgctccgcccatctcggcctcccaaagtgctggaattgtaggtgtgagccaccacggccagaacccctcccccgcttttttttgagacaaggtcttgctctgtcacccaggctggagagcagtggtgccatcatagttcactgcagcctcaacctcttgggctcaagtaatcctcctgccttggcctcctgagtagctgggactacaggtgtgtgccaccaggcctggctcatttgtagagatgaggtctctttatgtttcccaggctgtctggaactcctggctcaagcagccctcccaccttggcttcccaaagggcagggattacaggcatgagccccgacaccagcccctctgccccttttatcctttcccatgacccctccaagtagccatagccctgcccaggcccgtctgtgatttggactctaggagacattgagtttggacaacactggctaccttcctttccttatcttctctgtagactccctgccctcggaccctgtacagccgcagtatggggcatggctcagcctggtggaccgtgcccaggtgaaggcttttgtggatctaaccctctcaccctccgtgcgccagggggctcagcatctgctgcgaatctccggcctcggtgagctgcttctccctggatgccctcggccttcctctgtggccacttcaaatctccgctcccctcccctagagagtcagccacagattgcaaactgcaaaaggaccttatagtcgagaggagataagacagtgctcaaagataatagcctcagacagtgtgtgataaggtctaataggagatgctagggactagtgatggggtgggcgatgttgtgggttttttttccttcttcttttttttttttttttttgagacggagtctcactctgtcttgcccaggctggagtacagtggcacgatcttggctcactgcctcctccacctcccaggttcaagtgattctcctgtcttagcctcccaaatatctgggactataggcatgtgctaccatacctggctaatttttgtatttttagtagagatgggggtttcaccatgttgcccaggccagtgtcgagctcctgacctcaggtgatctacccgcctcggcctcccaaagtgctgggattacaggcatgtaccactgtgcccagcctttccttctttttttttctgatccaaaaattggggcataggcactgaagagtgtatttttggagacaatggagcattatttgaatctccagctgcctcatcaaatcagatggtttttaaccaccagtgttcagaggaaggcaggccagccactatacactgatgtggccagcaaaggttttgcggagagatggtaattcatccagactttgaaagaggttgggatgtaggagatgtaacatgtctcccctgcccccgccacccaaagccacaaaggatgccggaggctgtgtggggcggacgtctgtggatggagcggtaaattctcagcttttagcgctgaggccaccagggttatctatgctcagtcactgccttttcccttaatcctggaccagtgcccgtcaccaaagtgcatgcttccttctctattcagagtctggctaaagttcaacagtgttggacattgcccagttcagtgtaaatcagaaccctgggaaatactgaggagggggcatgactagtttattttgcaagatcagctggaattcacacctgcggagatgttttggggtgtcgtcaagcatcattgacccacagaacatctgagagcctggtcttcactttttgtgcagagaccacaatgcttatgaaatacgaaatttttcctgtggaagatatcaggtcggtgcaaaagcaattgcggtttttgcctttttttttttttttttttggacagggtctcactctgttgcccaggctggagtgcagtggcacaatgtcagctcactgcaacctctgcctcccgggttcaagtattctcccatctcagcctcccaagtagctgggactacagatatacgccagcattgtccggctaatttttgtatatttttggtagagacggggtttcaccatattgcccaggctgatctcgaacttccaacctcaggtgatccgcctgcctcagcctcccaaagtgctgggatgccattttaatgggggaaaaaaagaaccacaattacttttgcaccaacctattccaataaaaggaaaagtagttcctttaaatggtggattctcctgtcatagaaaatttgatttatggcttgagcagtgtttgtttcatgagaaggggtcttggaagaggtctctgcgtctccctgtaaactcagcaattatccgattccacaagggttgttcaaaaattaagaacgaagagcttgtcagcagggacttggagcattgtggttgccacgtgcccagctcggtggctcagagtgtggcctctcacgctggatggaggcggattgcgttgacctacctgccccagtacctaccagatatgagcctatgggcaagtgacttcatcccttggtgctttgggctccttatcagtaaaaagaggagactaaatattacctacctcatagcattacttcgagtttcaaataagttaaaatataaagtgctttctacaggacatagcccctggtaagcggataccatgcaatgaaccaccatgattagggttttggtaaaacctactagggttagggtttactgcagtaaacatacggggtagccctgtttctttttttctttttttttgagatggagtctcgctctgttgcccaggctggagtgcagtggcgtgatctcggcttactacaaccaccaccttccgggttcaggcaattctcatgtctcagcctcctgagtagctgggattatagatgcccaccacaatgcccggctaatttttgtatttttagtagagatagcatttcaccgtattggccaggctggtctcaaactcctgatctcaggtgatcaacgtgcctcagcttcccaagatgctgcgattacaggtgtgagccacggtgccctgcctggtccattttttcatcttcccattgcagagtctgggacgctattaccctggggattcaggtcatgagcttggctgatcagggtgtctggtttgcacaacagagtcaaactcgcatcccctgccgtgaaacagatgccccgctagaagccgggagtggacagcatcctcctctccatagaattggagtgctcattagtggcaagaatcctaaggcgaactttgcctgtttaagtggaggagattagtcactgagataataaaataaatgcatgtgaaagtgtttaggaaaaatgaaaagtctttatgcaaatatgcagaatgttgccgtaagagcccgtacacagtgggaatgtcatacctatggctgacgcaccttgctgtcagtgtgtgggagcgtggtgtaaacttagcctgtgagcctgactcctgtctgttcctgccttccccgctctgcccccaggtggcatgaagcccaacacgttggtcctaggtttctacgatgacgctccaccgcaggaccatttcctgacggacccggctttctctgagcctgcagacagcaccagggagggcagttccccagctctgagcaccctgttccctcctccccgggctcctgggagcccccgggccctcaatccccaggactatgtggccacggtggccgacgccctcaagatgaacaagaatgtggtgctggcccgggccagcggggccttgccccctgagcggctgagccgggggtctgggggcacctctcagctgcaccatgtggacgtgtggcccctcaacctgctgcggccccggggtgggcccggctatgtggatgtctgcggcctcttcctgctgcagatggcaaccatcttgggcatggtgcccgcttggcatagcgcccggctccggatcttcctgtgcctggggcctcgggaggcgcctggggcggccgaggggcggctgcgggcactgctgagccaactgaggatccgggctgaggtgcaggaggtggtgtggggcgagggggccggggctggggaacccgaggcggaggaggaaggggactttgtgaacagtgggcggggagacgcagaggcagaggccctggcacgcagcgccaacgccctggttcgggcccagcaggggcgcggcacaggaggagggccgggtgggccggagggtggggatgctgagggccccatcacagccctcaccttcctgtacttgcctcggccgccagccgatcccgcccgatacccccgctacctggcgctactggagactctaacccgagacctgggccccacgctgctggttcatggggtcactccagtcacctgcactgatctgtgatgcccctgcctccagggctaggtagagagggcccaggcaggcggcctatcctgatccttggaggaggaggaagaggaggccactgtggcccgtggccctgcccttgggacgtggagcccaggggaggtttgaaggggatcctgggcttgggcatcacgcccacctcctttggcagagggaccccagcacactaactctgggtggctgtccccaccgtgcaggggagggagtccgcagcctcccttcactggtgccttgatgctaggggccaggcctcctctgtgactctgggctacctcagtttccccattttggccagactcaccggcccactggggtggtgatgttttcgttctgttttatttttctaactctgctgaccatgaataaaagaccaaaacactaca

SEQ ID NO: 6734 - DNA, 6198 bp, Homo sapiens
aatgtggtgacgtcatcggaggcgtggtcgtccccaaaattagggaggaagaggaaaaaaaaaagccagaaaaagttttcttttctggagtcccaaacgaggtgcgggacggaagagggggtgaaggccagaggctcggggcttcaagaccgctgtctggagtccccctttccaggccatgtcggggcccacctggctgcccccgaagcagccggagcccgccagagcccctcaggggagggcgatcccccgcggcaccccggggccaccaccggcccacggagcaggtaaggcagcccttgtgagacagaagagccacccagctgtggcgctcacctctgtcctaccgctccagcctcccgccctggctgcttcctcctgccccttccccaagccgaggcggggggaacagccgcctgcgctctcttgggaccctagatttgggggaggaggtaacgagaggcggagagggtggctcctcaaatatacacccctcctgtcctccgccaccccacctttgatttctcttccctcaacccagcactccagccccaccccagggtcaatttttgcccccttccatctgagcagtgttaccaggccccagggggaccggaggatcgggggccggcgtgggtggggtcccatggagtactccagcacacgcaggtgagacccgggatcgtggggtgggacatgtgggatcccccagaaccgagtctgagggacccaggacaggagaaggcctatggtgatttgcattcttcctgccctggctccatcctcaggggctccctgcagacagggggggccttcgccctggaagcctggacgccgagatagacttgctgagcagcacgctggccgagctgaatgggggtcggggtcatgcgtcacggcgaccagaccgacaggtgactctgcccctcctccccgtcagcaccctgcccccttctctggactctcagacccagcctgatcgatcccccatgtgtgtaatgtgcaccccagcatggaggaagcgtggctgcaagtaccaacatgtcagccacttgaggacgggaccttgtcaaatgcaaaaagcctgtgcttccccacagccagggtcatttccacaaatgtgggtcttggagtggggtccttgcttacgacttctggcctgcgtttctcctcaggcatatgagcccccgccacctcctgcctaccgcacgggctccctgaagccaaatccagcctcgccgctcccagcgtctccctatgggggccccactccagcctcttacactaccgccagcaccccggctggcccagccttccccgtgcaagtgaaggtggcacagccagtgaggggctgcggcccacccaggcggggagcctctcaggcctctgggcccctcccgggcccccactttcctctcccaggccgaggtgaagtctgggggcctggctataggagccagagagagccagggccaggggccaaagaggaagctgctggggtctctggccctgcaggaagaggaagaggaggcgagcacgggccccaggtgagccctggggaactgggatttcaggccctacagacaatgggacaccgactgggtggggtggctggtggtgttttagggggcttttttgttttttgagacagagttttgctcttgtttgcccaggctggggtgcagtggtgccatcttggctcactgcaacctctgcctcccgggttcaagtgattctcctgcctcagcctcctgaataactggattacaggcacacgctgccacgcttggttaatttttgtatttttagtacagacggggtttcactaaaaccccagtttgttggccaggctggtctcgaactcccgacctcaggtgatccgcctgcctcagcctcccaaagtgctgggattgcaggcctgagccaccgcgcctggccaaggggctggttttggagcagagtcagaggtctgggacgtggaataggtaagggcagggcagtgcgggggagcaggatagaactgcccattggggctgagcgcggtggctcatgcctgtaatcccagcactttgggaggctgaggtgggtggatcacctgaggtcacgagttcgagaccacactgaccaacatggagaaacctcgtctctactaaaaatacaaaattagccaggcatggtggcacatgcctgtaatcccagctactcgggaggttgaggcaggagaatcacttgaacctgggaggtggaggttgcggtgagccgagatcgcaccactgctctccaacctgggcaacaagagcaaaactctgtctcaaaaaaaaaaaaaaaaaaaaaaaagaactgcctacgggcccctgggctgagatgttctcagatgagctttctagctggaactgcctggccaccttcagagacattatagcagtccccaatctttttggcaccagggaccagttttggggaaaacaatttttccatggactggggagggggatgggagggggtgggagggggatggtttcaggatgattcaagcacattacattcattgtgcactttatttctgttataataataatagaatatatagtatatataattgtttcggtatatattacaatgtatattacaatgtaatatataccgaaacaattatacaattcaccatcatgtaggatcagtgggagccctgagcttgttttcctgcaactggacagtcccatctgggggtgatgggagacagtgacagatcatcaggcattagattctcataaggagcttgcaacctacatccttcgaacacacagttcacaatagggttcatgctcctatgagaatctaacgccgctgctgatctgacaggaggtggagctcaggcggtaatgcaagtgatggggagcagctgtaaatacagatgaagctttgcttgcccattgctcagctcctgctgtgtggcccagttcctaacaggccatggcctggcggctgagggccctggtattacagcatcaggagctagagtaggaccgagcccgattcccaccttccaggtgcccctgagccagcctccagaggatgagctggataggctgacgaagaagctggttcacgacatgaaccacccgcccagcggggagtactttggtgagctgaggctgtggggtgggtgggacgtgggaagggaggctgggagacagaggggacagtggcttcctgggtctgtgaagactgatgctgtttctccctgtcctcaggccagtgtggtggctgcggagaagatgtggttggggatggggctggggttgtggcccttgatcgcgtctttcacgtgggctgctttgtatgttctacatgccgggcccagcttcgcggccagcatttctacgccgtggagaggagggcatattgcgagggctgctacgtggtgagtggctggggctgggaggagggagtcagtggctggatgcagggggcttccatccaaggtggtaactagagcgtccaagaccaaaggaggaacggtgctaaaagccaggcgactgaaagtgatgtacaaacagggcggaattctgcaagtatcaagcaagtagcttaacactggtggctgaagggaaggacgcagctcttacaagtgtggagcatcttacagttaaagagaatgtgttagattcccatgacacccctgtgaggcaggtattactactgattcctggttttgttttttgtttttttttgagacagtctcgctctgttgcgcagactggagtgcagtggggtgatctctgctcactgcaacctcagcctgccctggttcaagcgattctcatgcctcaggctcccgagcagttgggattacaggtgcccaccaccacacccagctaatttttgtatttttagtagagacagggtttcgccatgttggccaggctgttttgaaactcctggcctcaagcagtccgcccactctggcctcccaaagtgctggcattacaggcgtgagccactgcacccagcctgattcctgtttttctcatagtgtttaaataccgtgtatagtgctgggacctgaactcagatctgctcaagtctgcctttcaccgaatcacatgcaggaggctgcatgcaggaggctgcagaaattagatggctgggttgctggggttcctgttgagctgccatggctcccgcccgctcccagatcttcctgccttccttcccaacaggccaccctggagaaatgtgccacgtgctcccagcccatcctggaccggatcctgcgggctatggggaaggcctaccaccctggctgcttcacctgcgtggtgtgtcaccgcggcctcgacggcatccccttcacagtggatgctacgagccagatccactgcattgaggactttcacaggtcaggcctggcctccaccttgtctcacaatgtctgacctttcctgtctctctcatctcttcatgccccaggactgtctcttcctgtttccaaccctggccctccttcgttctttgttattgttattttttagagacggagtttcactctgttgcccaggcaggagtgcaatggcatgatcatagctcactgcagcctccaactcctgggctcaagtgatcctcctacctcagcctcctgagtagctgggactacgggtgcacacgccaccatgcctggctagttttcttcgtttttttttttttttttttgagatggagtctcactctgtcacccaggctggagtgcagtggcacgatctcagctcactgcaacctccaccacctgggttcaagtgatttgcctgcctcaacctccccagtagctgggattacgggcgcatgccaccacgcctggctagtttttttttttttttttttttttgtatttttagtagagacaggctttcatcatgttggccaggctggtctcaaactcctgagctcaagcgatccacctgcctcggccgcccaaagtgcagggatagcaggcgtaagccactgcacccagtcttcttctttgtattttaataaagacagcgtcttgctgtgttgcctaggctggtcttgaacgcctggcctcaagtgatcctcctgccttggcctcccaaagtcgggggattgcaggctagagccactgcacctagcctctctcattctctttgacatcgtcccttccccaagacctaaggccatacctctggcctctctgattccctcctgtgccccaccttctctgggttccattgttggtgccctgcaaccccaaggcttgatggccttcttggttctcttcccctgcaggaagtttgccccaagatgctcagtgtgcggtggggccataatgcctgagccaggtcaggaggagactgtgagaattgttgctctggatcgaagttttcacattggctgttacaagtgcgaggtcaggggcccccagcacgtgcaaggggctggcagtgtctagggtgctgggtagagcatgagggggaacacagaggtctggggttgatggaaacctgttgcttctttcttttttttttttttttgagacggagtcttgctctgttgcccaggctggagtgcagtggcacaatcttggctcactgcaacctccacctcccgggttcaagtgattctcctgcctcagcctcctgagtagctgggattacaggtgctggccaccatgcctggctaatttttgtatttttagtagagacagggtttcaccatattggccaggctggtcttgaactcctgaccttgtgatcctcctgcctcggcttctcaaagtgctgggattacaggcgtgagccatcgcgcccggccaattgttgcttctttttcaacaggagtgtgggctgctgctctcctctgagggcgagtgtcagggctgctacccgctggatgggcacatcttgtgcaaggcctgcagcgcctggcgcatccaggagctctcagccaccgtcaccactgactgctgagtcttcctagaagtacctgctgggttctcagttccagttcccatcctttgattgatcactctccctgacatccacctgtatgactttgtcaccaaatgctgtcttctctttctccaatcaagaaataataatccctcgagtttacaaaacacttccaagtctgttgtctcatctgattctcccagtagcccattacaggcccagtcattgttac

SEQ ID NO: 6735 - DNA, 7720 bp, Homo sapiens; identical to SEQ ID NO: 6615

SEQ ID NO: 6736 - DNA, 6746 bp, Homo sapiens; identical to SEQ ID NO: 6616

SEQ ID NO: 6737 - DNA, 297 bp, Homo sapiens; identical to SEQ ID NO: 6617

SEQ ID NO: 6738 - DNA, 481 bp, Homo sapiens; identical to SEQ ID NO: 6618

SEQ ID NO: 6739 - DNA, 89 bp, Homo sapiens; identical to SEQ ID NO: 6619

SEQ ID NO: 6740 - DNA, 6333 bp, Homo sapiens
gctccttttcaaacatcaggggaaaatgagaaaggctgtcgtgactcaaagaccccatctgagtccattgtggccatttctgagtgtcacaccttactttcttgtaaggtgcagctgttggggagccaagaaagtgaatgtccagactcggtacagcgtgacgttctttctggaggaagacacacacatgtcaaaagaaaaaaggtttgtttcttgtcttttaacatgcctgatatgttctgactgtttttatatgcttaaatatagcagcatgactttggaggcttaggagtgcatgtatttttgaggaaggcctctaaattcatatacttggattgagaaatatgtaaatgacccttctcctcctgtccctcaccccccaccccaatgcacattgttgctgtccaaaacgaacataccagtgtgtagatgttagcaggaaagtgccatttttatttgggttggtagttctggactgtttccttacaagcttcaatttttcacactttttaacggactattaaactttgtgtgtacacgatttaatttttctagagattgaaaaggtcctgttacagccatagagttttaaaatgattttaaatgtatgttgtctgcaaatacttaatattttttttgcatataacaagagtgtcttcattcctgtccattacaacccaaagggatgatgatatcaagtagcaagtcagatttatctggtccaattggccatgaaattaaatagtaatttcactggttttgacattacatggttttaattgaaagtcaaagccagtacaggaaatggtattgccttttcttaggaatgcaatgctagttatcagtggtcagctacaggttaatattaataataaacagtgatggccacttacttggtttatcttgactagttgcttccttttcccaggctagtcttaaaacttcatgcagcattttacgctttaattacattgtcaggttaaccttattttgggagtctttagagttggtttgtttttctttatagttgattcaactaaagttattaattgaactcttctccaaactcaaaggtgtctattattgtagagggaacgtttttttagttttctataccgttacttggagagagaagttagtgggtgagttattattgacctcagattctgcctcactggggcgtttcaaatggacagtaccataatctcttggctccacatggccagcttactactttgaaattattcctgggtagaaaatgtctcaaaatggtgataatcttacgtcttacctttagggcagaataagtcatgttaaagattaaattttagttcacactttgtaaatgccatctctctttgtccttttaaggggcccctgacaaaatgacctatttagaatgaataggtaagaaacaaagtggggcaatggaatgagcacttggcagctggagccctgtgttctctactcctcagtggttaaggcgcagagatttggaaggcagccagacctgggaagttgcttgactctcatggcctcaattcactcttacttgatgggtaaaataataatatctattgtacaagttattgcaagatttaaatgagacaagtaaataaaactcagaatttattgccttgcctttaaatgctagctcttattgagagacctcaggccagtctcatgtcttgttttagcttgctcgttgagtaaaatgaaatgagtggagtagatgatactattgactatgaactagaagcagaatttataaatgattatgtctgaatatgatataattatttgacagcctttgactacctgccattggtatatatggggaatggtgtatggaatatatggagtatataggatgatggacagtgagtctaaaaaacccttctacctctgttttcttatcggtataatggggatgataatagtccatacctcatagggttaatgtgaggattagatgagataaaaatgtaaagctctttaaaaaaagcctggtatatggtaaacactgtacgtttttattatttatcttaatgacacaatgaatgagtagtattcaagactagaatgcaataactagtaaggtgttacatacctgctaattgtcctcaggggcatcccttggcttgatgtaaagggaacgaaagtagtaggccacattggggttagctgatgtaactattaaacatacttgaaagcaagtatttacttttggagtttgatatcttagaaagaaacttcattagaaattaagtagtgattagtaatgagtagggattgtcactcattacatgtcattatgtatattagaatcacaatttcatatatagtgatagcatattgaatacaaaggtttttaaaatcttaactacaaagtttcttagagtaacacagctttaaaaatactaattttgctatactttgtttactaagtaactttttctcttctgtattgttattgccaaagtaatgatacaaaaatagtacaacatgttgatttaaaagttggaaagtgaaaaaaatttttaaaaggaaaaagaatagaagtaagcaaaaatattgttaaagcctttatgcagtgataaaaacagtgacttccagggatatagtggttattttcagaaatattttgcttgtcattttgagggaaaaatatcacagaactgtatttccctaaggattaaaaaatagcaggggttaataacagcatgaaaaattcaattccctatctggattcattttattaacaccaaaagccaagggctggtgggggattggggggggcagacgactgtgtgtgtatattatgcagatatagataaatgaagtatatatagatgaaagatatatatctctatatgaaatatttaggtgacatttgttcactattttatccaaatgccatctaatctgaactttttttttttttgagacagagttttgctcttgttgcacaggctagagtgtagtggcgcgatattggctcactgcaacctccacctcccaggttcaaactgttctcctacctcagcctcctgcgtagctgggattacaggcatgtgccaccacgcctggctaattttttcgtatttttactagagacagggtttcactgtgttggtcaggctggtcttgaactcgtgacctcaggtgatccgcctgcttccgcctcccaaaatgctgggattacaggcgtgacagaactttttttttaacttcaaatatagctgggaccaaatattcctaataataatatgttattcttagttgggaatattctgaaagaattggtagcataaagggttattgacctcaatgctgattgtaagatcctagacagttattaaaattagtctttgtttttgtaggtaaccttccttgaagaagttactgagtattatataagtggtgatgaggatcgcaaaggaccatgggaagaatttgcaagggatggatgcaggttccagaaacgaattcaagaaacagaagatgctattggatattgcttgacatttgaacacagagaaagaatgtttaatagactccagggaacatgcttcaaaggacttaatgttctcaagcaatgttgagttggcagcctgtagtcctagctagcatacactacctcttacctgagaggtgtcttttaaaaacaaatcttggcagctgtcctttgacatttttttttttagaggaaatgtaacttggatctagtttaatttttttttttgcaacatatcccactcagaaacattcaggtttgaagccagccctgataatgaaggatgaactagtgtgatttctaatcctcccttttttgatttagttggatgtgcttttaaatgtcctttgcctgcatgaggtggaaaggggacctttttgagttgtcattttgcactttcaaaacttattttcttggaaaacaatatttatagggcttaaagcccattttcatttctaatctaaattatgtgtgcctatctgaaaactttgggctctttcttgtttctttcccaaaattcagaagttaatgggcttttatgtttttctatattttttttatttcaatgatttggcctgtctatgttaggctaaaaaataaccttgtgtatgctaccaacttaaagtgcattattttgtgtcacttttttttttcttgtaaaaatgacttggattgaaaatatgtggtagcctttttatttctacattaagttctacctaggatatttccaaggactgccacaaaacccatatgtgcagtactttactactttgggaaagctgcatctttctaccacattttaacatctaatatatttaatttctttgaagagggttctgtgtacgttattgtagttcccagtttaatatagttctttgtatctcttaacaggttgaagttattgcaaaacactctggaaagtaataattacatcataatcatttattttttaaacttaaaagcctagaaatttcctagaaagaaaataggagacatctcagagcaatttggttttggtgtatatgttctcaacagaaaaccagtgttaatgaatatcatgcctcagcactgtcacttttaaaacctgtcaggatcccactgtaaaattggaaatgggcagttctgaattttcacgtttgaaatgtaaaatataaacttcagtcaatatccaggtttattgtgtcctactatttaataatgagagaagtaatggcaaggcctttactttcaggaaaggatagaagtatagattaatgactggaaagttttaatatatttagcccaaaggttactttgaattgaagtctttgcattgactgtttgtgtttggtttatttgtttagctttacaaggtacacataagttaggttgaggggttgttaacccttccgtggtctgctttcattccgtgtgcttcctgtcacaggtaatggaaaacataagtagaataggtgacctcttagttttgaacttatttaagtgtggggatgaatttttcatcagaagtgcttacagggttactacctcagtttacaatctacctggtcattattttatttctatccagttctaagaactgcctccactgtttatatattcataattaaacacattgagaatgcaacactataaaagctggtcaaatttttgcagagcccttattctgtgtgttttttgtttttttcttttttttttgagacagagtctcgttcggtcccccagcttggagtgcagtggcgcgatctcggctcactgcaacctccgcctcctgggttcacgcgattctcctgcctcagcctcccgagtagctgggattacaggcacacaccaccacgcccggctaattttttgtgtctttttagtagagacggggtttcgctatgttggccagactggtcttgaactgctgacctcgtgatccgcccgcctcggcctctcaaagtgctgggattctgtgtgttttgtgcacctccactttaggtaatcatagggagcacatttacaggatggtctaataacatgaaaacaggctagtttcaagcaacagcaatgtcggttggaaagcaggcgtcatttgccttgaaaaaagccttttgacaacatacaggcattcttttaaaaccaggctgaaacattttatttccgagacttaacgttgtgtttcctgtttcttaaacctagcacctctgtgtatttgaaaataatgagacatctttcattggattttggaaaattgttccccatgggattctaacctcactaccaaatgagtgaaagcttgattaagagttcttccatatactagcctccttggaagaagtgatcagaaggtgataagaaggacagaaaggactattttaaagttggactgaaggagaaaaaagcaaaattcttgtttcatcccaattctagttagaacaaagttaaacccccgtaatcttaaagagaaaatctttggaggttttaattaaacattttatacatttaaagtcttgttaatggtgctttaagtgtcaatgtagcatgtaaaaggctttgtacagacaggtaaaagttccatttctgagtgatgaaatgtaacacttcttcatctttaacttgaaatcaaaactatcagattttatttttgtataatttaaggaaggtaaagttaggggactagaagactctaaattggcttctacagatcaataatttaaatgtaactagttgggattttatagttaaaattatatttgtgtatataacataactaatctgtaaattgtaataaatatatttgcaattattaaatgttaagtgatattttggttcaa

SEQ ID NO: 6741 - DNA, 90 bp, Homo sapiens; identical to SEQ ID NO: 5398

SEQ ID NO: 6742 - DNA, 102 bp, Homo sapiens; identical to SEQ ID NO: 5404

SEQ ID NO: 6743 - DNA, 168 bp, Homo sapiens; identical to SEQ ID NO: 5968

SEQ ID NO: 6744 - DNA, 170 bp, Homo sapiens; identical to SEQ ID NO: 5414

SEQ ID NO: 6745 - DNA, 235 bp, Homo sapiens; identical to SEQ ID NO: 5438
  SITE (230): n equals a,t,g, or c

SEQ ID NO: 6746 - DNA, 135 bp, Homo sapiens; identical to SEQ ID NO: 5451

SEQ ID NO: 6747 - DNA, 196 bp, Homo sapiens; identical to SEQ ID NO: 5455
  SITE (106): n equals a,t,g, or c

SEQ ID NO: 6748 - DNA, 175 bp, Homo sapiens; identical to SEQ ID NO: 5462

SEQ ID NO: 6749 - DNA, 101 bp, Homo sapiens
cagagcttgcagtgagccgagatcgcgccactgcactccagcctgggcgatagagcgagactctgtctcaaaaaaaaaaaaaaaaaaaaaaaaaaaagagt

SEQ ID NO: 6750 - DNA, 159 bp, Homo sapiens; identical to SEQ ID NO: 5465

SEQ ID NO: 6751 - DNA, 176 bp, Homo sapiens; identical to SEQ ID NO: 5473

SEQ ID NO: 6752 - DNA, 207 bp, Homo sapiens; identical to SEQ ID NO: 5474

SEQ ID NO: 6753 - DNA, 230 bp, Homo sapiens; identical to SEQ ID NO: 5475

SEQ ID NO: 6754 - DNA, 207 bp, Homo sapiens; identical to SEQ ID NO: 5480

SEQ ID NO: 6755 - DNA, 116 bp, Homo sapiens; identical to SEQ ID NO: 5481

SEQ ID NO: 6756 - DNA, 162 bp, Homo sapiens; identical to SEQ ID NO: 5244

SEQ ID NO: 6757 - DNA, 129 bp, Homo sapiens; identical to SEQ ID NO: 5494

SEQ ID NO: 6758 - DNA, 193 bp, Homo sapiens; identical to SEQ ID NO: 5245

SEQ ID NO: 6759 - DNA, 3991 bp, Homo sapiens; identical to SEQ ID NO: 5499

SEQ ID NO: 6760 - DNA, 140 bp, Homo sapiens; identical to SEQ ID NO: 5978

SEQ ID NO: 6761 - DNA, 39 bp, Homo sapiens
gactctgtctcaaacaaaaaaaaaaaaaaaaaaaaggaa

SEQ ID NO: 6762 - DNA, 153 bp, Homo sapiens; identical to SEQ ID NO: 5246

SEQ ID NO: 6763 - DNA, 202 bp, Homo sapiens; identical to SEQ ID NO: 5516

SEQ ID NO: 6764 - DNA, 203 bp, Homo sapiens; identical to SEQ ID NO: 5247

SEQ ID NO: 6765 - DNA, 190 bp, Homo sapiens; identical to SEQ ID NO: 5523

SEQ ID NO: 6766 - DNA, 158 bp, Homo sapiens; identical to SEQ ID NO: 5531

SEQ ID NO: 6767 - DNA, 191 bp, Homo sapiens; identical to SEQ ID NO: 5538

SEQ ID NO: 6768 - DNA, 193 bp, Homo sapiens; identical to SEQ ID NO: 5539

SEQ ID NO: 6769 - DNA, 183 bp, Homo sapiens; identical to SEQ ID NO: 5556

SEQ ID NO: 6770 - DNA, 93 bp, Homo sapiens; identical to SEQ ID NO: 5558

SEQ ID NO: 6771 - DNA, 136 bp, Homo sapiens; identical to SEQ ID NO: 5560

SEQ ID NO: 6772 - DNA, 138 bp, Homo sapiens; identical to SEQ ID NO: 5564

SEQ ID NO: 6773 - DNA, 40 bp, Homo sapiens; identical to SEQ ID NO: 5585

SEQ ID NO: 6774 - DNA, 181 bp, Homo sapiens; identical to SEQ ID NO: 5586

SEQ ID NO: 6775 - DNA, 214 bp, Homo sapiens; identical to SEQ ID NO: 5597

SEQ ID NO: 6776 - DNA, 177 bp, Homo sapiens; identical to SEQ ID NO: 5600

SEQ ID NO: 6777 - DNA, 154 bp, Homo sapiens; identical to SEQ ID NO: 5604

SEQ ID NO: 6778 - DNA, 166 bp, Homo sapiens; identical to SEQ ID NO: 5608

SEQ ID NO: 6779 - DNA, 3098 bp, Homo sapiens; identical to SEQ ID NO: 5612

SEQ ID NO: 6780 - DNA, 2705 bp, Homo sapiens; identical to SEQ ID NO: 5621

SEQ ID NO: 6781 - DNA, 368 bp, Homo sapiens; identical to SEQ ID NO: 5252

SEQ ID NO: 6782 - DNA, 2925 bp, Homo sapiens; identical to SEQ ID NO: 5990

SEQ ID NO: 6783 - DNA, 212 bp, Homo sapiens
tatagagaaagaaataagggggcccaggggaccagcgttcagcatatggaggatcctgccagcctctgagttcccttagtatttattgatcatttttgggtgtttctcagagagggggatgtggcagggtcataggataatagtggagagaaggtcagcagataaacacgtgaacaaaggtctctgcatcatagacaaggtaaagaattaag

SEQ ID NO: 6784 - DNA, 131 bp, Homo sapiens; identical to SEQ ID NO: 5630

SEQ ID NO: 6785 - DNA, 8562 bp, Homo sapiens
tagacatagttttacttcctccttacccgtctgtatgcctttatctcttttccctaatttgctctgctagaacttacagtcatgttgaatagcagtggtaaaagcatgcatcttgtctttaatttttcccacttttaagataaagttttccactgaattttttgaaaggattatacataattaactgattctcttgatcttaattactctttttttcttttgcagcacaaagaatgaaccagcagtggaagagaaaatactgtaagctggctgactgctggtgaagaaaatgctttatttttgtggcaggcatctgtgggatctgtaatagaaatgtaagtgtagcatcatggtttttttcagtgctgcagtaaattaaatggattggtttaacgtgtggtaaattgagtatctgtcatatgtagttttaattatattaaatgagcattttcttttgacttataggtgctttattaacaatttatttacattaagttatcgttaatgtagatttccaagtctcctcaaaaggaaaagtctctataagaaaaactgaagacacaggagtttgctcaaagaatgctgaaatagatctccaggtcctctgggttctaccttctttttacataataattttcttaaataactaagctaggcaagtagtactagcttttgtaaataagacagactactaggttataaaaactctagttactaaaaacttgtttcactaaattaaaggaatttctacataattgatttttttaatgtaataatacatcactgcattttattcatatcacttcactctgatccccagttttactagttgtgctttcatcatttatctttgcatgatatgctttaaagtgttacacactaccttggatttgtccatatttaacttcaccgtattgatgaaacatttttcactatgaatatatttctgttttctaaattcatataagccctatgcaacttgatgtcattcatgaaaaatgtagtgaatattttattgacttttaattacagtgtttttcttattagagcaagagtgaccttggtagatgctatttcacattttcccagtttgacataaaactcttgctttctactcttccagtatgatactggttacatgtaatgatatgtattaacaataattaatttattattaaaagtatgaccatattatttttattcagtattgaaaatttgataattgaaaaatgatactaataagcatttgtctttaaaaatatatattttatttaatcctgtccatttatctatctgtatacattttttaaaatcttaataggtcagatagtctaggtgctggtcatcaaggaacttactgtgatccagtaaatgagacatgtatgtaattaacaaacagtggaatagatgccatattaaggtaacaatcagatgctattgaaactgaacagaggaagagattaatttcatctgaagggttcagaatgaacagaataagtttcaccttgccttcaaagaatgagtagaattttaacagtcaaagaaaattaggaaatatttttcaagccaagggaatgaggagggaaacagctgcctaatcatcaacacattttagaggagtcagggaacagtaatatgtgggaaggcagggtaggagaaagagacttcaaaataagtgcagggagtgaacatttatttagtacttactatattaccagattttacatttatttaacatacaatcaatcttaattgattttgatacttagggacagagtatattgatcagtcttggaggagttaggggacagtacttactagatgttgaggggttagctttgtaaacaagtagcagtaccccatattgagccaggaggaataatgataagacagtaaaggtaaagatagattttcaggatttatttttgacttacctaatttctcagtgatacaggtgttagtatatcgataaactaggagggagaagttttatgatagtctctggggaatagggaaagaaagatgtcttggccgagtaaaagtttactgggattgatggtgtttaggaaatcaaaatagctattaagtgtgtggggttcacaacttttgcaccacacaaaagtgaattgtatggtgaaatttttgtcacttagagtaacttgcttgattattcttttttgcgaatgtctcccttgttggcttttgtggtggtggtctatctttatttcctgttcttctctgaccattccttacaccccttcctggctattttacctcacagatattggagtaattcaagattctgtggttggcccttttgactgctctctctacaggtttaatttgggcatttactcattttcatggctccaaggaccatgtatgtgttggtgagtcaccagacttttttcagctcagatttattcttggagtatcaaactagtaaattcagctgtcatctacctatctccacctggagaccttaataaagtcattatgtctgagacagaactctcctcaaattctgaattttggtgaatgtgtcaccatccatcagtaatcaaatgctttcatttctttttccttagcattcttctattctattgttggaaacttacatcagcaacctccctctaattatcttatacttgcattactacctggatattctagtttccctttcgccatacctcctcctgcattaccaaactttcctccaacctgctgttcaaatggtctggaagctactaaactggctgttatttcctgacgtaaaacctttcagtgaactcctcttgtctcattagtggttcatatgtggaccagcttcatagaaatccttaagccccttgaaattatatgtaggattgttccctttttgtgtgtctgtaattggattctaaattcagactttaaaaatctgatttttaatatttggagtttttattgcaagctaaaaatttcttgaatactacacatactaaagatcttttttgcttataataattttgcctttcatttgactagttgtccaagaagtttcaaggaaatctgagttcttggagatttccactaactctgcccatacccctctatattttgtcttcttgagaagaagacttagtattaatagactcttattagtctggcagaaatatttcacatggtttatctattggaagaaggggatttatacttaaaagttggaatatcacatgaagaattcagtaaaaacgtctttgaaagtaaatgatgtattatacttattaatagaattggactaacgtcactccaaatttctgtgtattaaattcttagtttagtaaactggaaataaattccctttttcaaaattagaattttctgagacatttatgagatagggaatacctcttttgattagcattaatacttgctctacacaaagggaggggaaaagctttcttatttacatattggtatgatcatctgcatacatttagtctcccacctattttaagatcattggaactgcaaaacagagactgtgtagggtagattaaaatggttttttaaaaagccttgaagtatgtcttataggtagactagcagtttggggttactttgtgtctatcttgttacacattttatctctatcttacttattgcatgtgcctcattcagaattaaataagaaatatcactaagtttttctgcccatttgttagttggtgatagactaacagtatacttgatgggctaaacagaatcagaatttataaattgctatggcaaattgatagttaagagtgcttcagatgaaataatgaccatttagctgtctggtgtccattgtttgcagattaactttgtccaacttcacttcattctgatgatggaaccaaaatacctgcacaaacaggattgttttgcctttccaattatgttattataattcatgccttctcctgggatgattgtaattgctttcttagttttgaaattatgtgttttggtttattcataaatgcaagagtaagagtcatgcaaaatattaatcatattaagtagggtggaggataatgtttttaggttggaaacttttttttctgtagataaacgagctgtatgtgatggaaaactgacttcttgggcccattttacttaaagcaaatacaataggtttggaattatgtatttaaaagcatggcattggtccacgtgacatgttgggtgtcttgttttcattttaccagactctgtttttatttatgttttcagtttatgatcctgtcctttgttcataaggtacttagatggtttaagatgtagacttcttatatgaagatgttgctgttgtttttccaaagtaatggtggtcatcagcccatttttctatttagtctcatgaatagaatcatgagtagaatctttcttaaattattacttgtaaatggatcactttcttgttttctttttcttaattggagctttaaataaatatggaacttggaacaaaaagattttcaggaattttatggaaactaacttttttgacctaaatcgaaagggatgaaagtttctgaaaacctaacaaaatgtgtgcacagccaattcttttaggggaggaaataggcagggaatgtgtaattggctattttaaaaacatatgccttcttttgtaacttattgttgtttcaagttacaagatctttgaaggcaagtgtttatctcaaaatatttgaaagcttttatagtgcttaacatactaagacgtcctattagggtttacttagaacaagcttatccaacttgtgggccacatgtggcccaggatggctttgaaagcggcctaacacaaattcataagctttcttaaaacattatgtgatttttttttttagcttatcagctatcattagtgttaatgcattttatgtgtggcccaagacaattctttttcttccagtgtggcccagggaaaccaaaagattagacacccctgacttagaactttccataggttaggagaaagttgtactttcttgatgtctataacctagaatttctggtaaaggaattgattggaaatgttattaaaagttgaaaataatttggaaattaaacattttagtgatcagttcttccattgagactgtgttggttcctttactagatatgtgccatctttttaaaaacttactgtgttgcttcctttactagaaaattgccatctttttgagccttgtctattgaggaaccaagaacacagaaaaggcagtaaaaagaaaaaaaaggattgtttgaagattgaatgtgctgtgatgatagcctaggattattgtttttcaatttttgatgagcgtaagcattcttgttgactatatcttttgtaactactgacccatttagaatggcagaattagctggcagagagattgtcattcattttaagctttcaatctctgacatcttcatctttatttctcagtcttttttacttatcagtggtttactccattattttctccccttttaaaatgtctttttttttttttttttaccatggggaaaaaaattagatgtttccttggcagggcacaataacacaataaggctttcatgacttaacttttgattacctttacaccttcatctcctgctcttccattgcttgtatgactatttgactcagtgtcttgcatgtgcttctgcctggaatctgctccactgcccagcccctctgaatgaacactaaactttctaacctatgtccatcctctcatctctctcttactgttattttagtaagtatgttaacacattttgattacgcaggaatcaggccatattgtaattatctgcatgtatgtttccttatttaacagagtagttgtgtgtcttatttatctttagacccatcagtacttagtattgtatctggaacatggcaggtgtttagtaaatgtttatctgaatcaataaggcagaaattataaattttatgtcagtgtttaagctagatacatccaatttgacaaatcttttttcttcttcctcttcaggggatcttcaatattcatgttattttctcctttggtcttatatgattgttacctttatgaagctttagtgattacaaagcactttttttgtccatttttacctgagctttgtaaactctgatttgcaggtaaggaaatttagactaatggtttaactgagtgcctaagagcacataattaataaaggactctaaaactcagatttttagatttcttgtctagcattcatttcactgtataatagctgccatgattcaaggtatccttttcccctcactggatgcagcttttcattatatagttcttcagtgtgtttctccagggctgatctgttaagtgcactgatggaatttttatacattcccaaggtatgtacaagtagatgcttacaaaaaattttcatcggttggagagtttttcctctactttcatcttcatatccccattgtctagtatgtggcttgcatataatgcacatcataggtggttagtgttttcataattgttaaattaagatattgcaagaattaaaacatgactttaatattatatgtattttttcttaggatggctggctgtggtgaaattgatcattcaataaacatgcttcctacaaacaggaaagcgaacgagtcctgttctaatactgcaccttctttaaccgtccctgaatgtgccatttgtctgcaaacatgtgttcatccagtcagtctgccctgtaagcacgttttctgctatctatgtgtaaaaggagcttcatggcttggaaagcggtgtgctctttgtcgacaagaaattcccgaggatttccttgacaagccaaccttgttgtcaccagaagaactcaaggcagcaagtagaggaaatggtgaatatgcatggtattatgaaggaagaaatgggtggtggcagtacgatgagcgcactagtagagagctggaagatgctttttccaaaggtaaaaagaacactgaaatgttaattgctggctttctgtatgtcgctgatcttgaaaacatggttcaatataggagaaatgaacatggacgtcgcaggaagattaagcgagatataatagatataccaaagaagggagtagctggacttaggctagactgtgatgctaataccgtaaacctagcaagagagagctctgctgacggagcggacagtgtatcagcacagagtggagcttctgttcagcccctagtgtcttctgtaaggcccctaacatcagtagatggtcagttaacaagccctgcaacaccatcccctgatgcaagcacttctctggaagactcttttgctcatttacaactcagtggagacaacacagctgaaaggagtcataggggagaaggagaagaagatcatgaatcaccatcttcaggcagggtaccagcaccagacacctccattgaagaaactgaatcagatgccagtagtgatagtgaggatgtatctgcagttgttgcacagcactccttgacccaacagagacttttggtttctaatgcaaaccagacagtacccgatcgatcagatcgatcgggaactgatcgatcagtagcagggggtggaacagtgagtgtcagtgtcagatctagaaggcctgatggacagtgcacagtaactgaagtttaaataaaaatgtcttcagctccatgctcaaggttgaaagggttacctgtaaatttctgcccacataacattatactcatccctagtagtgcattttgggagttggggtgggaaggggtatgggaaggatagactcataattaaaatgtctaacatgtctctgttgagaaatttatttaatgtaaggaacttgggtgttaatagttgagagctgtttagtaataacccagttttcttgaggtctgtttactttatactttttaaaaacttctgtagttcttttggccagtgtgtttgtattatctgtgcattaatggtcctcatctgactcctgcattgtgtcttatttttctgcatggattggcataagaccattactaaaatttggcacctgtgagatgtttgatattatgaacaggaaacataatttaatgtatgaatagatgtgaatttgggatttcaaaatagatgaataacaactattttatagtaaagttattgaaatggaaatgaaaacagccagtaacttatgtttcagaatgtttgtaacacacttcatggtgttcccataggctttgctgtctagtcttatagtttgaggtttttttggtctgcatttttctttttgattacaaaatttataatttaataaatactagagtttatcaaaaacagtttgtctcttgtttgagggtggaaagggtgtggaaacattttgacatttgtgaccaaaggtcacttaaaaagtggtggttttaattggttgttttcagcttaatcacctgctcagaaaagtttgatttttttcttagagattatttaaacagaatctataggcagtgtgtatataataaacatgtatggaaataaaactaaa

SEQ ID NO: 6786 - DNA, 42324 bp, Homo sapiens
atgttgtagaccacaaaatccacttttatttggtagtttttacatctatggccaaatagtattgggttgacacagtaatctagagtttacctctgaaaaaaagtaatgtgagtctgtctaaccatattttcctaactcaacagtaggatcatgatggtaaggcaaatgcaagttatttttaccatgattctcaaatgtgaattgaatgttacagtagcaaatacttttgacctcttgtgatgagtcagaactagaacttaattctttgactttcacattttttaaaaagtgtattgctgggatcataaacattttatgttgtgcatttttattacatttacttttgaaagatagttgttagaaggttagttgtttttcaggaaaaaaaagaaatctgatgtaaaaatgcaaatttatgttgcaggatgcttcatgagtcccttcaagtggtttaaaactacatcaacagtagttgtttattactagttggaaattccagggcacacaaatgaatgtccaattgtagaatcagttgactttccatgtcatggctaccactgtttagtaggtaatttacaatagaaaactaattattgaaaagaacaaagttccaaatttgtagtgggtagtgaggtacatctttttttaaatgaagggccatttcccatgaattttactccagctgtttggagcagaagaaaatgattgatcataccctttcttgttttcttgttccctgatacctccccacttttgttctttagcagcaacactcagttattttggtaaattatttccaggtaaaacagaacaaaaattgtatgaaaagtaacgccaggaataggttttgtatagaagctctccttttaaacactgctctttggttataagctaagaattattattggaattgacagcaataatttttaagccaaaagtgtatattttagctaaatgttccagattacgcagtaaatacccaagtgagtaattggcaagaaatgaggtaaatgagttcagatattcaaatgattaaaagtaagtctgcatattaatagtagccttcaaagtaattctgatgttcatatttaatatcatttaacatttatacatattagtcactggagctttacttggagtacatccacacgaaaaaccaattatttattaaattttcctttcttagcaatagcctctaaatttgcaggcccaccccaaactgttcctaaaagatctctttcgttctgtaatgcttcctccaaatatagctctctgcctgaacaaacagattttttcaaagctctaattacttccggtggcccttggatgaattgctttagccattcttgtgcctcttctagagatttagtttcatctgaagactgcaagacctcttcaaccattcctatgtttagagcattttttgaatccagtttaagggccccactcaacactttgagagcttgtctacttccgattatttcaactagccgggtggtgccaccccagcttggtattatgcccatctctttgtggacgaatctgatcttactctctggagtcattaacctgtaaaagaaaaaagaaaagcttaattgtaactctctctgtatgctctaatcataaagtactatccattcatgatctgatgtgaattctccatagatctttataggtaggtatattaaaaacaatgtttgaaaaatatggctgtttcatctagaatttaatttactaatagtatttaaaacttccctttgaaaacagtatcattttttgttgtgcttgtttaccctttgcaaacaagaaccttctaaaagcccaaagttgatctttcttaagtgagtggtgacctaatgagaggatgtggatcaagtgaaagtatgggagtaggaaatgttaggtgcatactaagaaaaacaaaccgaaaagcatagtaagttaaggttctcaaaagtccttagtggggaaaaatgctttttaaatacagcatctattcagcaagtatttacaaagaactaccagtgccaggtggtggtttaggtgctgagactacaggaatgaccaaaacaaaacccttgtgctcaggagctgttttcagtttggagagaaaggcattaaaccatataaagtcagtggcaatgagtgctttatagcaaaaagagaaaaagaaaatgaggcaggagacaaatgaattgaggatatgtgtgctgggggtgtgctattttcgatgaagaaggacactgaatatttgagcagccacctgaggaaatgagcaatgcaaaaatctgggaaaagatgttccaggaagaaggaattgcaagtgcaaaagtcttgaagtagagaactgcttagtatctctggggacgagtacagtgtaactggaacatgggggataaaatgagaagcatacttaacaggccttagtaaggagttcggattttattttttaagtgtaaagttatttagaggaggtcaaccaaagcattaacatctgacattttacaagggctgctctagttgccatgtgcatgaagagcttatttagcatttcaaagctcttatacctttttttttttttttttttaaggaactggcaatacagctattgcagagctaggatttaaacccaggcaggttggcttcagttatcttcatggtacacataatagctagacgaggtggaagcagggataccagtaagaaagttattgatagtggcttggattagactgatagcagtgagtttccctaacgggttcattttccccagtcatgggatttttatgaataggatgattaataagaaagtataacaataaaggggagttaacatttgccagttcaacagactgagtaaagctacacgatttagctttactaaataaacgcccatgcgttttattttgactgcatgcttcaagaagctttcactttcaaattactcattacaaaaaagaagaccttaagttgggttggctttccaacgtgttaaatactcaaatgcaggtgatttggttctattagcactaagaacaaaaaactcagtctttgacccgagagaattctgacaaatgccaacttattaactcactgggaaactttctcttcacagctgtgaatttctacaaaggaaaatatgcctccattatgaacaattgcttctagaggcaaatagctatgaaaaataatagttttcaagaaataattttaaaattgggaggaaaaaagaacaagtcttataaaaatctgaatttatcacaatattgtaagaggagtactgccttgttaaaacaatatcaaaaggaatagaaattacagaaataatgtctaatattcttagaaataggaatattgtcaatattgaacccaatcctataaagctttttacataatacactaaatatgtaactgttctgaattgaatcctagaattggttcagagctgtgcctataatggagtaaaggactatgccaggaatagattcatttagaatcagctgaacataaaaactggttaaagtcctagatgttggaataatgtagatgagcttatgacaacaaaagttattacctatgtaagcacattcatatttggaattatttgcttctaaagaaaaatcatcatctctatggtgatttttttccatttgccttattttataaggtaaagtgtgtcttttggaatcatattttacaactccaacaaatcttgaggttatctttgtaaaaataccttttgtgatcaaaatctaacatccattctttgcaaattgtatacctcgggtgtgcttatgtactgatatacattaaatatatattaaataaatatgaccaaaaaattcattggtgataaaagaacacaagtagtttcctctaataaacagagcattcagatggtaacctttacaggactcttttaacctaaaaatgaaagtttaaatataaaatttaaaatgctgaaaaacctaatttaagaaggacattattatattaacaacaagatatatcccaaaatagtttcctgatagaccctacaggattatacactaattctttctagagtttagatgcagttacctagtaatataattattgcaagggataatctacgtagagtaatggaagacttagctcttataattttgaagactaatgacagactcaatttataaaaccatattaaacttgcttattttgacaagtaaaagaatgataagtgtcttctaactgtttaatagcataatcattggcaatgtttaaaatttcctctgacatcctggggcaaaggagatgagattaatcaaatgtggatatatttcttgttactactgtctggatgaaacaatgttataagaaagactactcataactggggaaagagttacacctttgacaggtgatacaaagtcaagtgttgatgataccaggaaggactgttcagtgagttactacttcttgatgagttaactcttaagtttcaggtcttgaacaaatgtattcaagaacattctaaaaagaaattaccaaattttactaaaataggaagtttttagtggaaaagttgcaaaaaaacagcctttttgtaatgttgattattaaagcaaggtacttctagtaaattctgtgatgaaggatggaaatataaataattgaattggaagagtgtacagctttgatgtgaagtgcatacactcagaagccagactgctgggcttgaaatcctaggatggccactagactggctacatatccacacattgtaaaatacagcaaaggcaaaagaaacatggtacaaagaggagaggaagattcatctctagatcttaggaagttacttaacatctctgtgtctcttgatagatactttgaacatatgtactccacaattcttttatagatagagtgtgtctgtatgttttaaaaaattgtgtgaaattgcctcaaacacatctacaagagaatacagtattacctacttttatttggaaatataaaagttgtatatattttgtagtctgatacataataaactctgtatactagcttttaatactattaagttggtggtattgataggtccgtaaaaataacagtagtgtttctgctagtgaagtagtataaagttgtcccctggactaaaatcccataatctctaaaatattcagagtaaaagagctatactcaacactgtataaccagcaaatactcttcttcttcgatgttggttttataaatggagagcacaagaaatattcaatttttatattgccaaataaagttagaaataatactgtattctaatacagatatggttgaagcagaagattgcaagctgatcttttttaaaaaacaggtaagacagttatccctctaagatttcttagaactgtccaatacaagtaacaagataaatatcttgaaattttaaagaaaaccattgatgttacaaaattaacatgatgttatacatttaaagtttggaatcactgatttaaatataaataagctttagtgtagggccagaaacggctagtccttttacactgattgcataaagggccaaagacaacaaagtaaacttgctcgcatggggaaatatagcatagaaaattatagaattcgcaacagcatctctgaccacaaacaatactttaaaattatgcctcgaacataaacttacttgttcacacgtatattttcctggcactttctcccttttgttttctaccatctataacatcacaaaacaatggaaaagagaaagaacccaaaaattctccctataatctcacctttctgatttccaagtctcagatgattggcttcatgagtttccattcattatatgcaaacagactgcttgagtaagaaggtatatagtcgaatgtgtgaaaacttttatttgttgtgtggttgtgagggggggagcagatataaaaatgttttgtgatactgaagtctgattttaacatttagtaatcctggcatgatcagaggtaaattttcttgatgtcacagctctaaagtaagaacttccaagtaatgtgataactacaaaacaaagcatcatgggcagtgtgactacttcctgaggtggacatctcctattcagagtaaagttacttccaaatcaaaaatgggatttgttatttttgaattggggtgggggcgggattgtgtgtgtgcatgcatttatttgtgtgtgcaagtgtgtgtaatattgtactttatgaagccagtattttttttttttttgagacagagtctcactctgttgcccaggctggagtgtagtggtacaatcttggctcactgcaacctctgcctcctgggttcaagtgattctcctgcctcagcctcccaagtagctgggattacaggtgcccgccaccaagcccagctaatttttgtatttttagtatagacgaggtttcaccatgttggccaggctggtcttgaactccttacatcaggtgatccacccacttcggcctcccaaagtgcaaaaggctaccttgtaagttcccttgggataagaacgtttacagctccctttctttataatatactttgaactaatggctagcagctggaaatgctaataccttggctgagggttatttatattgatgaaaacagcattagaggttgaaaacagataggcaggctctaaattggatagttgagaattttatttcactagggaggaataaaaatgtgcttttcatttggtgtataaacagctcaatatcccaaaggagaaatgggaaaagaaaatgcagagaattcatacacatataaatcaaccaacatatgaaaatttatgcatcaccaaaaatctctaaaaaggcaaatttaatttttgattatcaaaattataaaagatatcttaaaagattatactcattgtaagaaaggatgctctcaaatagacacttattttctgctggtggtaatataaattagtagaatctttcctagaagataacgtggctattaccaaaagccttgaacactgcatatcctttcattaagtatttgtgctacttacatgattttttcaggaaataatctgaaatgtggataaagccttttgcataaggtaattatcacagcattaatcattttagagaaaaattggaaacaacagacctaactgcaagtggaaatctagtacacgatcaggtgttacctcaaatcactggaacacagaaggcagaaggctttctaaaacaaatagtgttgggacaaattgccatttggaaaaaagatgaaataagatccattactcacagcatacatgaaaataagctcaaaatggattagatatataaatgtaaaacacaaaaccattcaagtactagaagaaacacgcatgaacttttctataaccttgatatatggaaaggcttttaaactaccacttgaaatccagatgcaacttttaaaaagattgatagatatgactacttttgtgtgtgtgtgtctgtttttttttagacagggtcttattactccattgcccaggctggagtgcagtggcacgatcttggctcattgcaacctccgcctcccaggttcaagtgactctcctgcctcagcctccagagtagctgcaactacacgtgcgccatcacacccggctaaatttttatacatttttagtagagacagggtttcaccatactggccaggctggtctcaaactcctgatcttgtgatccgcctgcctcggcctcccacagtggaccatgtttttttaaaaaggcttgtgtggcaaaaaagaataaaaacaaaaaacaagcaaagtcaaaaaacaagctgagcaaatatatgcaaaacacttcacagataatgacattatccctaatacttgaagaactttaaaaaattgaaggaaaaaaacaaatatcctgttgagaaataagcaaaatatgaataaataattcaccaaaaaaaattttttaatggtccttaagacatatgaaactataatcaacttcactttaatataaatgggctgtgcgcagtggctcatgcctgcaatcccagcactttgggaggctgtggatcacttgagctcacaagtttgagaccagcctgggcaacatgacaaaaccccgtctctacaaaaaatacacaaattagccaagtgtggtggtgcactcctgtagtcccagttactccggaggctgaggtgggaggatgacttgagtcctagaggcggaagttgcagtgagcagtgatcgtaccactatacaccccagcctgggtgagacagagcaagaccttgcctcaaaaagaaaaaaaaagagaaaaaaaagaaatgcatattaaaactatgctgaaatattgttccttacccatgaaattggcaaattccaaagcttaatagtaggctctgttgacaaggctaagtgaaacagactagagggaatgcaagacttgtctatctcttatggaagaaaattaggcaataattaataaatattcattaactcattaatatttatttaacttttgatttagcaatcctatttctagtgtttatccttaagatatgccattagtattactaaaaagtatagataaagttattcactacaacattctaacatattcaagacataaaataaggctggaaacaagggaaaaaatttaaactgaatgcaaaaactaaatcaaggtattttcaaatgaaatcacattgagggataagaaaaggaaaaatcaggcagacagctaaggctagtccttggagaaatagcctgaaaaatcacagctacaggcacaaacagaacaacctggggaaaaactaaactgcaactacactaataagaaagcaaggcccaacagagaagccttttttcctttgtgtgattagcgggcttccaggaaaaaggttcctccccttttcaggcatatacatggtaggctctgtgggaacctgcaaaggaatgggggtgggcttacctgaaacagacctgcagttaaacaaacaagagaagcttcactttgtgcttacccaagacatacccacagctgcagagataaggagagttacacaaatagctacagagatgaggggagtttcttataaaagcttttggattcaactgtaaaaacagcaacccactcaggccccctctccactacaaagagctttcttctttcacttattaaactttgactccaacctcccccttgcgtccatgctccttagttttcttgattgtgagacaaggagctcggataacacctcagacaacgagaccattcaccccagaccatttcaacatcaaagaaggagaaacaacaaaaacaacagtgaactaatgtaagtaacttttggacacagtacaatactttatttacccttagtctgggtgaaaaaaatatatgatacacaaagataaaacacaatagcaaaatgttaaaaattgttggacctgaatgaatggcacagggaaattatttgtattactgtcacgcctttcctgcaagtttgtaattatttcaaaattaaaaattaaaaaatacaattccagtttctctctcacaccaaattcaatagtaaaatattaaatattagacatataaaaatgtgtacatgcttttttttgccaaaagttgatgctaaaagccaagcagtctgagtttgtcattttctattttctaaggtagttttgagagatttttctctattttcccatgtttttagaataactggaattagaaagtagaatcaaggaatgagtgttttaagtacttcctgaagcacattctggaatcttgatcttgaaaccaagctaaccatccatactacaggtataattatgtttaaaataatgtctatatcagagaatcctttataaataaggtatacagtcatgcactgaataacaacattttagtcagcaatggactgtatgacaatgatcccataagattataatggggctgaaaaatttctatagcctggtgacatcatcgccattgtaatgtcatagaacaatgctttactcacatttttgtggtgatgctgttaaaaacaaacttactgcactgctacctgtacagaagtatagcacatacaattatgtatgttacataatacttgataataataaatgaccatgttaatggttcgggtatttactgtactatattttttttttttttgagaaagggtctcactctgtcccgcaggctggagtgcagtggtgccataatggctcaatgcagccttgacctcctggcctcaagcgatcctcctgcctcatcctccctcaggaatgggactacaggcgtgtgccaccatgcctggctattttttttattttttgtgtctcactatgttgcccaggctggtctccaactcctgagctcaagcaatcctcctgccttggccttccaaaatgctgggattgcaggcataagccaccacagctgacctatactttttatgttattttagagtgttattttacttttatatgtagaaaattaaatgtaaaatagcctcaggcaggtccttcaggaggaattccagaagacagcattattatcataggagatcacagctccatgcatgttactgcccctgaagatgttccagtggggtaagatgtggaggggtaggacaatgatatatgtggaggggtaggacaatgatatggatgatcctgactctatgtaggcctaggctaatgtgtgtgtttgtcttagcttttaataaaaaaaaaaaaaaacttttaaaaaagatgaataaaataaaaatagaaaaagcttatagaataaggatataaaaaaagaaaatactttcgttcagctgtaaaatgtgtttgtgttttacatgaagtgctattacaaaagaataaaaaagttttttaaaattaaaaagcttatatagtacaaaagttacagttaatactgtcttctggaatttcttctgaaggacctgcctgaggctgtttacatttaattttttatgtgtaaaagtaaaaggagtacattctaagtgtacagtaatgtcctaggccttcacattcacttgccactcactcactcacttacccagagagactttcagtcctgcaagctcgattcaccataaataccctatatgagcattcaattttttatcttttatacagtatttttactgtaccttttcatttagatacacaaatacttaccattgtgttacaactgcctatagtattcaatacagtaacaggctttacaggtttgtagcctaggagcaataagctataccatatagccgaggtatgtagtaagctgcaccctagatggtatcattaggtttgtttagctacatactatgatgtctgcacaacaacaaaatcacgtaatgacacatttgtcataatgtgttcctatcattaagcaatacatgactgtatgtgggtactattactgttttctaaaaagcatctaagcaagcatttaaaaaaataaaaatacagtttacaaaattaacttagagtaacaaagttagcacttttcactggcaatcaaacagaaatataaaagttagcaacaaatctgacaattaaattccctatgccaagcccatacgtggtaggtagattggccccgaagagatgacctaatctctggcaactgtgcatgtgttaccatacatggcaaaagagactgcagatgtaactaaagttaaatccttaaaataggaaaattatcctggattaactgagtggacccaatctaatcatgagaacacttaaaagcagagaaatgtttccagctgtagtcagagaaatgcagcataaggataaataagagagattcaaagtatgagaggaacttgactcaccactgctggaggagccacatggaaagcatgagaaagaattcagaaagcatctaggagcaaagactcatcccccatctggcagcaaggaaacagggacttcagtccttcaagtgcatgtaaccaaattctaccagttggaacctgggtgagcctgggaatgaatcctcccctagagtcttcagagcccactgcaactgacacttagattttggtctcatgagacaaggtttagaaaaaccagctgagcccagctagacttcagacctatacatctgtgagataataacgtgttgttttaagccacagaatttgtggtagtttgttatagcagcaatagaaaactacatgtattagcattttcttaatttatatttcattctaaatatctttaatttgtcaaggtggattaaaaaatgagaggctatattaccacatttctagcttttcatttcctcacattaattttgtcactaaaatggaaacataatgcttgactagattctgaccattgaaaaataccaatttttaattcatgttagtcttttacttttaaaaatgttttttaaaagccattttctcttggaatattttacatgaaaagtatgactcaagtgagggtctatctatgcaaagtagaactgagtgtttccgacatacgtatacattacatctattaccagctggtgctcacagggttttgcgggaaggggacagtgttagaatgctacatgagttcatttcttttatatattcatattaagtgtatctccatctgctgaagtacttccattggcatggatgaaaatgtcagttgagtgaattccaggcaattctccaaggtaagaaagttaaacaagcgaaaagggccaacacatataaagaaggaacttatctttttagcaaacgctatgaaagctttcggtgtttttttagaacaagcagacattcttaggaaataattaaaataatctgtcatagaaagtaactgatgaggtactgataaaattaagtggaaaaaatcagctagaggaacttgtactgatttatcacttcctggaaactggggctagtaatgtagttcattcagtatgcaatcctctctattagcctctaacatttaagaactatagttgcttttggtatgcgggttttaaaagggctgagtagcctaggacagtgcttgtcaaatttctctggtcaaggatcaatttcttcttcatttttaaagaaactttctaatcgattgcagaccaataattttgtaaaatataacaaaaacatattactagaaaaatgaaacaaaaaaccaagacacaaggtttgtgaatggctgtgcctagcacatgtgggtgctgaaatatgtttaataaacagacaccactttcagaaaagctggttcaaaaatggataggttttcatcagaagcttctcaacaaaagcacctggtatatccagatactgagagtaggcagtaccctcagacatcttgtaacaaataaaattaaatatttaatgaagctctaggatgcattacattttcttcaattagagaatgacagctaggcaatttagcagtattaaaggattaaataatctctgattatttttcctgctattgtgcttttttgtcctaaaccctaactacacttaaacatagatgagaaatcaatatgaagaatagtacaaaagtctaataaaggtgaacaccggaatctatgttagagggttttcacttgttccaaataacatctaaaaagtcttaattttcatttccttttacacagaggatttttcagtgtaataatgcacacttgcatgtagcttaagattctttttttttttctttttgagacagagtctcgctcttgttgcccaggttggagtgcagtgccgccatctcagctcactgcaacctctgcctcccgggttcaagtgattctcctgcctcagtctcctgagtagctggaattacaggcgcctgccaccatgcccggctaatttttgtatttttagtagagacgggttttcaccaagttggccaggctggtctcgaactcctgacctcaggtgatccacccacctcgatctcccaaagtgctggaattacaggcctgacccactgtgcccagccttaaaattcttttaattatatacttagatgtacgttttatatttatatatgtattgaaattatatatttcataactacctgtattcagtgtaaagtgaggaatgcatttaatactttcacacatacagcatttcctgtttagtctcatatcaagcataaagccaatgactgcttcctcttcgcagaataaaatgtaataatagcagcattctaatgcaatctgcactgatgacagcagagggcactgtcatataaaataacttttttttattgtgcataagaattttgtgcattattgaacactagttttcaagaggctaggatttctgtaaacggtcttatataccaaaaaaactagaaaatctctatttgtgtgagcatgaagtgacatattttaactgatgaattgaaacctgagtcataaattataaaaagaaaaattaatataaaatttactgtttttcataagttagcatactgaaacttttctcattctatttctactactatatgatgccatttatatgaagtcaaaaaaataaaaaatatatttattatagaatatttagcttataaaactataaaggaaagcaagaaagtaattaccataaaattcagggtaaaagccaagttgtgaatacaacaggaaagttcttgaaggaaattcaaagtgctaatccagtgaacacatgaataataaggaagcgaaacagtcttattgccgatgtgaagaaagttttagtggtctggatagaagaccaaaccagccacagcatttccttaagccaaaggctaatccagaacaaggctctaactctcttcaacactacaaaggctgagagtggtaaggaagctgcagaagaaaaatctgacgccagcagaggttggtttatgaggtttaaggaaagaagtcatctccataatataaaggtgcaaactgaagcagtaaggggtaacacagaagctgcagcaagtgatcctgaagatctagctagggttattgatgaaggtggctacactagctaacagatttttactgtaatattaatgatcatttggcagtattccctgtgagccagtggtgacagtggccatggggcgacactcctccacctttggaaaggggagaaaagactggaaaggtctatgtcttgtggtctgagttacagctcagacaagtcagaacaccagctagacttctaaagtttttgactctagtgtcaggctcccagacagcacctctggacttttccagagtctagtggaaatcaccaccctgcagggaagaacacaggcctggatggctttgccacttgctgattgtagagtcctagtccctcaagtgaacataggcagtatccagggggtggttatggaaggccttgggcaagacccagtgctgtgttagcttcagatgtgacccagcacagtcctagtggcggtggccatagggttacttagttcacttcaccctcagctccacggggctcagcagagagagagagagatgtcatttgtttgggagaaagtgagggaagagaacaagagtctctgcctggtaatccagagaattcttccggatcttctccaagaccatcaaggcagtatctccagaagtctgcaagaaccagagcattacggggcttcgggtgccctctaaagcagatacagcttagatcacaacacctacgtccttctgaatatctagaaagcctttccaagaaggaccactacgaacaagctcagactgtgaagattataataaatacctaattcttcaatgcccagataccaaagaacatctacaagtaccaaggccgcctaggaaaacatgtacccaccaaatgaactaaacaaggcaccacagaccaatactggaaaaagagatacgtgacttttcagacagagaattcaaagtagctgttttgacaaaactcaaagaaattcaagataacacagaggaggaattcagaatcctatcagataaatttaagaacaagattgaaataaaaagaaccaagcagaaattctagagctgaaaaatgcaactggcatactattgaagaatgcatcagaactttttatggcataactttttatggcagaaatgatctagcagaagaaagaattagtgagcttgaagacaggctatttgaaaatatagtcagagaagacaaaagaaaaaagataaaaaagcatccctacaggatatagaaaatagtctcaaaagggcaaatctaagagttattggccttaaagaagaggtagagcaagagacagggttagaaagtttattcaaaggaataataacaaagagcttccaacacctagagatagatatcaatatccaagtacaagaaggttatagagcagcaaagcagattgaacccaaacaaaagtacctcaaagcatttaataaacttccaaaggtcaaggataaaaacatggtctgtaataaagaaaggatcctaaaagcagcaagagaaaagaaacaacacacaattaagctccaatatgtctgggagaagacttttcagtgaaaaccttacaggccaggagagaatggtacgacatactgcaagtgctgagggaaaaatcctttcatgctagaatagtatattctgcaaaaataccttcaaacatgaaagagaaataaagacttccagacaaacaaaagctgagggatttcatcaacaccagacctgtcctacaagaaatattaaagggagcactctaatcagaaagaaaacgatgtcaatgagccataagaaatcatctgaaggtaaaaaactcactgataatagtaagcatacagaaaaacacagaatattaaaacactgtaactgtgtcttatcttaagtagaaagaccaaatgatgaaccaatcaaaaataataactacaacttttcatgacatagacagtatacaacaaaaaattaaaaagccagaggataaagttaaggcataaagtttttattattttctttttgcatgtttgcttgtttatccaaacaatgttcagttgttatcagcttaaaataatgggtgataagatagtatttgcaagcctaataagatgcagtatttgcaagccaaaaaacataaaagatacacaaaacaattaaaagcaagaagctaaatcaaatcactgagaacatcatcatcacaaaaaggaagaagaaaagaaagagaagaccacaaaacaacccaaaaaacaaataaaatggcaggagtaagtccttacctaccaataataatattgaatgtacatggactaaactctccaatcaaaagacacagactggttgatagattaaaaaaaaaaaaaaaagaccaaatgatctgttgtgtaccagaaacacatttcacctataaagacacacgaagactgaaaataaagaaatggaaaaagatattccatgacaatgaaaacaaaaagaaaacatgagtatctatatttatttcagacaaaatagatttcaagacaaaaattgttaagaagagatgaagaaagtcactatataatgataaatgggtcaattaagcaagaggatatgacaatttttatgccacccatcactggagcacccagatatatacaggaaacattattagagctaaagtgagagataggccccaatacaataatagctagagacttcaacaccccacgttcagcatttgatacggtttggatttgggtcctcacccaaatctcatgtagaattgtaatccctaatgttgtaggaggaggtgattggatcatgggggcagccttcccccttggtgttcttgtgatagtgaatgagttctcatgagattttgtttaaaagtgtgtagtacccttccccttttctctctttctcctgctccagccatgtaggacgtgcctgcttccccttcatcttctgccatgagtgtacatttcctgaggattccccagccatgcttcctgtacagcctgtgggactatgagccaattaaacctctcttctttataaattacccagtctcaggtagttctttatagcaatgcaagaatggactaatacagcactggacagatcttagagacaaaaaatcaacaaagaaacatcagacttaatctgcactatagaaacaaatgtacctaatagatattcatgcaatatttcctccaagagctggagaatacacattcttttcctcagcacatggatcattcttaaaagtagaccatatgtttggtcaaaagacaaatcttaaaatattcaaaaaattaaaataataaacatcttctgtgatcacaatggaaactacaaatcaataacaagaggaattttggaaactacacaaatacatggaaattagacaatatgctcctgaatggccaatgggtcaattaaaaaattaagaaggaaactgaaaattctcttagaacaaatgataatgaagtacaacataccaaaacctatgggatacagcaaaagcagtactaacagggagtttatagctataagtgcctacatcaaaaaacaagaaaaatttcaaataacctaataatgcatcttaaagaactagaaaagcaagagcaagccaaactcaaaattagtagaagaaatactaaagatcagagcagaaataaatgaaatctaaattaaaaaaatattgactgggcatggtggctcacgcctgtaatcccaacactttgggagaccaaggcgggcagatcacgaggtcaggagtttgagaccagcctgaccaacatggtgaaagcccatctctactaaaaatacaaaaattagctgggcatggtggcatgcacctgtaatcccagctactcaggaggctgaggcaggagaatcacttgaacctaggaggtggaggaggttgcagtgagctgagattacaccactgcactccagcctactgcactccagcctgggtgacagagtgatactctgtctcagaaaaaaaaaaaaaagacagaaagaaaataatacaaaagagcaatgaaacaaaaagttgttttttttgaaaagttaaacaaaattgaaaaatctctagccagactaacaaagaaaaaaaaaaagagaaattccaaataaataaaaccagacatgaaaaaggagacattataactgatactgcagaaattcaaggattattagtggctacaatgagcaactacatgtcaataaattgggaaatctagaagaaatggacaaattcctagacacataaaacctaccaagattgagtaggaagaaattcaaaacctgaacagaccaataactagtaaggagattgaagatgtaataaaaagtctcccagtaaagaaaagcccaggatgcaatggcttcattgctaaattctgccaaacatttaaagaagaactaatggcaatcctactcaaactattccgatattctgaaaaatagaggaggggatacttccgaactcattctgtgaggcaagtattaccctgataccaaaccagataaagacacatcaaaaaaagaaaactataggccaatatctccaatgaatattggtgcaaaaatcatcaacaaaatactagcaaactgaattcaacaatatattaaaaagatcattcaacatgaccaagtgaaatttatctctgggatgcaaggatggttcaacatacacaaatcagtcaatgtgaaacatcataccaacagaatgaaggacaaaagctatataataatttggactcatgctgaaaaagcatttgataaaattcaatatcccttcatgataaaaaactaccaagaaactaggtatagaaggaacatacatcaacataataaaggccatatacatatatgacagaccttcagttagtatcatactgaatggggaaaaggtaaaagccttctctctaagatctacaacacaacaaggatgcctacgttcacaactgttattcaacatagtactggaagtcctagctagagtaatcagacaagaaaaagatataaaggacatccaaattggaaaggaagaaatcaaattatccttgtttgtagattatacaatctatgtctggaaaaagcctaaagttgcaaaataaaaaatcaacatacaaaaatcagtagcttttctatatgtaaacagtgaacaatttgaaaaagaaatcaaaacagtaatcccatttacaatagccacacataaaattaaatacctaggaattaaccaaggaagtgaaacatgtctataatgaaaactataaaacaccaatgaaagaaattgaagtggacattaaaaatgaaaagatatcccatgttcgtggattggaagaatcaacattgttaaaatgtccattctacccaaagcaatctagatattcagtgtaattcccatcaaaataccaatgacattcttcacataaatcgaaaaaaagatcctaaaatttatatggaaccacaaaaaacacagaatagccaaaactatgctcagcacaaagaacagccctggaggaatcacattacctgacttcaaattataccacagagctacaaaaaccaaaatagcataaaaacagacaaccagtgaaacagaatagagaacccagaaacaaatctacacatatacaggcaactcattttcaacaaaggtaccaagaacatacactggagaaaacacagtctcttcaataaatgatgctgggaaaactggatatttatatgcagaagaatgaaattagacccctatctatcaccacagacaaaaatcaaatcaaaataaagaaaaagaaaaaacccagaaaacaaacaacaaaacacacacacacacacacacacacacacacacacacacacacacacacacacacacaggaaaaaatagattaaagacaaatttaagacctcaaactctggaaccactaccagaaaacactggcgaaaatcttagggtcactgtacttggcaaaaatttcttgagcaatattccacaagccctttctcacactgctattaagaactacttgatactgggtaatttatgaagaaaagaggtttaattgactcatagttccacagattgtatgggaagcatggctggggaggcctccagaaatttacaatcatggcagaaggcgaagcggaagcaggcatatcttcacatgacagagcaggagagaaagagcgaaaggagaagtgctacacacttttaaaccaccagttcttgtgagaacttacgcacttatcatgagaagagcaagggggaagtctgcccccatgattcaatcacctcccaccagacccttcctccaaaattgaggattacaattcaacatgagatttgggtggtgacacagagccaaaccatatcaacaactgaattcatggagatagagagtaaaaagataattaccagagtctgggaaaggtagtgtggagttggcagggggatggggatagttaatgggtacaaaaaaatagaaagaatgaataaggtctattgtacagaacagggtgactatagttaataatataataataacctaattatacatttaaaaacaactaaaagagtataattggattttttgtaacacaaagggtaaatgcttgaggggatggaaaccccattttccataatgtgattattacatattgcatgcctgtagcaaaacatctcatgtaccccataaatatatacatctactatgtactcatgaaagttaaaaattaaaaaaaaaaagttgttttcaatcctcatggttggctttcaaccctcaggaagatttaaggagttcaagacttcaatggaggaagtaactgcagatgtgatggaagtagcaagacaattggaattagaagtagaacctgaagatgtaaccaaattgctacaatctcatgataaaacctgactagatgaggaatggcttcttatggatgaacaaaatatgtggtttcttaagatggaatttaattttggtgaagatgctgtgaacactgttgaaatgacaacaaaggatttagaatattacataaatttatatttgataaatcaacggcagaaagaagttctactatgggtaaaatgctatcaaacagcactgcatgctacacagaaatcttttgtgaaacagtcaatcggttaacaaacttttgttgtcttagtttaagaagttgtcacatccacctcaatcatcaggaagcaccactctgatcagttagctgccatcaaaattgaggcaagattccccaccagattacatctcggtgaaggctcagatgattggtagcatttctcagcaataaattaccttttaattaagatagatgcattgttttttcaaacataatgctattacatacttaacagactatagtacagtgtacacataacttatatacgcactgggaaaccaaacagttcgtgtgactcactttattgtgatattaactttagaggggtggtctggaggaaaccaaacctgtgatatctatgaattatgcctgtaccaagatggcagatttaaacccaattatatccatgcaacactgactatgtatatggaacaaacactccaattaaaaggcagaaattgtcattctgaataaaaaagcaaaaccgtagtatatgttgtctactagaatctactttgaacaaggcagccaagttaaaaatgaaaggacagaaaaagatacaccacagaaatgttaaccataagaaaactgggggccaggcgtggtggctcacgcctgtaatcccagcactttgggaggcagaggcaggccctggatcacgaggtcaggagttcgagaccaacctggccaacatggtgaaaccccatctctactaaaagtacaaaaattaaccaggcgtggtggcaggcgcctgtaatcgcagctactaggaggctgaggcaggagaattgcttgaacctgggaggtggaggttgcagtgagctgagatcgtgccattgcactccagcctgggtgacagaggctctgtctcaaaaaaaaaaaaaaaaaaaaaaaaaaaaagaaaagaaaaaagaaagaaagaaagaaagaaaactgggatggctatatttatatcagaaaaaaaacagatcttgactgaatcctggaccagaaaaaaaaaaaaacattagtatgataaatgaaaaaaactgaatgaggtctgtagattaattacaagtattgtatcaatgttaatttcccagttgtataattgcactgtggctctataggatactaacatttggggaaactgattgaaaggtatatgggagttatatgtatgatttcgtcaagtttttcataagtgtatagttagtgcaaatgagaagttgaaaacattttaaaaattcaaatttctgctcttccaaagatactactgataaaaaaaaaactcacaggctgggagaaagtattctttctcctaaggctgtgaataatagtatttagtattaaagtagagatagacatagacacacgagcatacttcacctctgctactataattattgctatcccaaggaattttatacagaatatataaaaaactcctacagtttaataataataagacaaatcaatttctttaaagagtcaaaggatttgaaacaacaaagaaaaagaagatatggccaataaacacaaggtcctcaacaccagtcactgtggaaattcaaatctgaaatcacaatgagctctcacaatggttcccacccgtcaaatggctaaatctaaacagcttgacagtaccacatgttggtattcatgtggtgcagctggaactttcttccattgctcatgagaataaaaattatacaacccacctagaaaatttaagaaaccaatatatttgctgcttaagttaaacatacacttaccatatcaccccagcaattccactcttagattttcacccaaaagatatgacaacatatgcccacacaaatacttatacatgaatgttcacaacagctttatttataataggccaaaacaagaaatagctcatgtgcccattaatgtataacacttactgtgctatataggcatagaaagcaatactactaagcaataagatgaacaaaccactggaaaatgcaaaaacacagataaatctcagaaacaaacttgaatatccatgcaataaaatacttttcaacattaaaaaggaacaaagtattgacacatggtacaacatggatgactctcaaaataattacactgaattaaagaaggcagacattaaaaagtacatactctatatatttatgtaaaaatgtatttatgtaaaattcttttttaaaaatctactttaaagtgagaaagtgatcagtgtttaccttgaaatagagatatgaactgactgggaagaggcatatgaaaacatatagataggggtgataaaaatgttctcaatcttgattgtggaggtggttacatgggtgtatatattcatcaaaatccatttacagcatacaattaaaatggattcattttattgtatataatttgtagctcaacaaatttatttatttatttatttatttgagacagagtctcactctgttgcccaggctggagtgcaatggtgtgatcttggctcactgtaacctccacctcccaggttcaagcaatccttccacctcagactcccaagttgtaggactacaggcatgtgccaccacacctggctaatttttgtattttgagtagagatagggtttcaccatgttggccaggctggtctcaaactcctgacctcaggtgatctgcctatttcagccccccaaaatgctgggataacaggcatgagccaccacgccaggcttaaaagtttttaaatgtacaacatgatgttttgaaatatgtagagcactacatgccagcgcagaatcactttctcttcagtgtctgaaactgagacaaaaagtttactagaagtcttctcttaatgtatatccagtatttttcttagctagggtcaagtgtataatgaatttttaaaaaaatggcaaggccagggttagcccagagactgaaaaacatcccaaatgaaaagacaatgagtttcaaagtatgccacaatgttatcatattggcactggtaagagacagttgtataagataatcttaaaactctaagccacaatattatgtgaatattgatgtaaactttaggttaaacattatgctaaaacctatattttcactatcttatttaaatctatttataaatatttaagggagatacttccattttatagataaagaaactgagatgaagagaggtaaaatacttgctcaaagtcaagtagataaaagtgtcaaactgggattcagcctaggtctactagacgtcagtgctcaggctctttactgttttgccattttacctctgattgtgctatatttactaccttttgcattataaagaggctccagtatgtgaacctgtacagataactcacagagcattgtattggtctccttatagctagctgtgttagtaggccttgggaatggtactgagaaagcagtttaaaccatgtctaaagcattagattttataaaatgtcatttctatataatatagctatcaaatactgagaataattattgggagtgaagagctattggtcccaaagaactttctctatttttagtccctaatcttcctgaaagtcccacaaagttgctataaatcacagcaaaaagaagacaaagggatctcagaaaatctctttttattggtgagaagacagctacagcagtctctctttctgcattctatttttcttttttaatgttgcttacctttgtttgtataattcttttggatttttaagtttcatatatttccttagctttccttccaggagttttgctaatatggatttgctctattcaaaatctcaaaaccatgtgttttgttaattttttgaaaatgcatagtaatgaagtgatcatgaaattttattagattaaaattatctactttaatgactgacaaaaagaaaacattcagaaaagaaaataggtttatcctatttaagaatatataaaatattgatattaaggcaaaaatgaatttgagcaagttaattatatttgtgcaagaaattaatgaaattttcatcctacctgaaatcacatgctgtagtaaattctgctcctccacccaatgcccaaccttgaaccagcgcaacacttattaaaggaagtctgtatattgaagaaaaaactgatgttactatttttaatttcaatattcatttacaaatgttattttttaaaaaatcttaaaatgcagtggaaacaaaattattgcactgtcttcataaaaacaaacacacatcaaaggatagcagaagcttgaacctttacatcatgagaagaaaaacagtgtaatactaaacatacaatagttcacaataaatgccacataagttcattaaaatacctccctgaatcattatatatttttaagctatagccatattgtaacttactcccaaataaatggatgcttttgtctaatttacagctcctggaacttctcagcagctggctcttcagaataattccatgtgatattatctttgtccatttttgttggtatcaggttaaaagttggaaaatcaaggctatttccaaaggttggaaatgtgttacagaagatagggctccaaaactgtgttatgaagtttccttcaaaaatctactcattgttgcctgaaataatccacagactaatcctatataaaggcatgattttgcagtaaaaataaatcttttacctttcctgtttgcaaagacccactttgcaggggtgtgtgaatacaaggtaaatctaaaatgttttccaagatggaatttttgtaggttctgacctacaatgcaaaggtgcaggtctaaagtaattgaaaatttcctaatatacactgctcccatgtagaaaggattatttaaaaaaataataacttcagatttatctatgaaaaagtcaaatgcaataggaaaaggaggtgaatagggtttaaacaatgaagatactattttagaatagtaatgttatgattctattactctctctagactctcagatacaataggtaccaaaaatacagtaatgtccaattaataaccttgcttaaataagaatttccttacttttcataattttaaatttgtctacattcggaatgtgaaagtagaaagctaatcaaccaaaacatgtcagtttgtaacctcaaacataccttgataggccaagaagaatttttcctctttgcttctttacctaggtgcaaagtcaattcatattcctcagaaagctgtaaaaactttccaatccatagttctttttctcatctcctctggatacagaccacttcaccacacattctactaatttggaatattaggtaaactttatgtgtcatgtcttgatcagtgtctttattattctgctctaataccagtatttaactttcccagtatctattcctaaatacagctagttatataagctctttaggggatatgtcttaaatttttcttatctttcatttctcttatttttaaaatacatatgtatatacttcattaacatgtaattaaatgattatcctctacggcacaaaaaaatagtacatcattagaatagatgtaatttgaaaattagctattatttcttaactagtacaaataatggaatagcaaaaagctatttttggtcttttagaaatcatattttaaaaagaaggctgcattacctcataaatcttgttaaggtgttttgcatgaacatgcatacggccattccatcctttaaataaaaataagcagaaacacaaaggtataatgcaaatatattacattaaattttttaaattaaggttttagaaagtaatgaagccaaaaatatgtcttttttaaacaatgacatttccatttaaaactctttgatgttgtctgaaatgcaaataatgctgtatttgactgttgatatcctagggctccttgagctcagctttgcatgaggtattagcaaagatgtagggataagagacagatcacataccctagatcactatggagttctactcagggtaatgacaggggaaaggcataagatatacccatctgttatccttaagatgataaacatataagagaagaagggaaagaagggaaaagttatgttaagctttgatttttaaaaaaatatttctaaggctttatcttggtattgccacaacttataattttcacaaacaaatttcctaagagtagtccaaactcattgccttgtcttttttttagctcacatactttcttcaatccagtgtaatctggccctctgccttatcccaaaatctctcctcaaaagcttttaataatctcctacttgtcaaattaaatgacttttccttattcaccttttctctctccataacacgtagtatctttctttaatcagtttcttcattctcatatttgctctcactttctagcaacatttacacacctggttctcttatttctttgtttgttcttttccagtcttcttccttggctcttcttatccagctaatcccctaaatccatgcagtttcaaaattctaatccatgattttctctgttctttatttataatttcttttttttggaagtctcatctacttccatataaagtgctaaaatctactagacattttcacattctgatagcacctcaaactcagcacggcaaaaccaactgaaagtaaaagaactgactttgaatcctagtgctgccacttaataacaacatgaaattgagcaagtcatgactacgtaattcagtttcctcattcataagaaatgagaaattaaaaaaaattgcactatttgacttaaaggatgtttagaaagatgaaaatatacctagaaactctataaaagattgcataagtgttctgtgttagtggaaaaagttagtgtaagagttctgagctagcggtcaataaggctcagatttttggtactatgtttgactttcccgtttcacaattctcccacactcagttagttaccaagtacttcccctcggatctaccttagaaatatttcaaatatcaatcccttcttttatatttttgctgctgctgcattagttcatacctgtgttactcaagccttgattagtacagtaagatggctttgctttctcccacccaaggactaatcagacccaacactgattaacttctgagatcggcaagattgggtgcattcagggtggtatggctggagacaacagctttgcttcctaactgatttctgtatttaatttctttttcctcttaaatataatcttccatcctgctacctgataaaccttcctgtaggatgatgatgtcttatagaataaaacctaaatttcttggcaaggccacttgatcccaaactatcttatcaactttattgattaccatacccctcctccaagcatcctaatttcaccacacaaactatttgccatccctctaacaccttacacttattgtggctcctgtgtctttgcttttatcattcctactagttgtaataggctgtccttctctctacctatttcaaggaatgcccagatcatataatatttttccatcaagattttctaaatctcacaataacaattttctcttttgtgtttcaacagtatttttatttttatgccttaattatagtacttataaattgtgttgtatgaatatgtgtttagatgcattatcagacacatcatctctacaagatggggactagagaacctaagaagttctcaataattttgccagagatacagaaatacaactatcaaagtacaggtattatacaaagtgcttgaacaaactcagaagagtgtcaaagaagaaattattcatttcaattgggatgggggtagttagacaggctttagagaggagaagggaaggtggcatttgctaggtctagacagtaagtcccttgatggtgacagtatgccttccccctcctcagacgctagtaaaatgttttgcacatagtgtttgttgaacttaaaaaaattagatgaattttagatggagaactatgttgatttataaaacaaatgcagtcaagaaaaagtaaaagccaatgtggaaggaatttcctaatccaaagctgttatcaggaagatcagtgtatctcacgaagtgatgagaaaattaacacaggcacgaggagctaaaaagctttcaaagtaaactggtttattctctgctaaaaacctttccaataaaatctgttctattacctatatcaagtaattttaatatgcatatttgctcttgctacatttagattacataaaattccaatgaagtatctagaattggtagaaataaaggtgaagcaaattattagcctgtgtactattataattttcattcaaaagacaaaaggcacgctaaaaatgtctattagaagcagtatgaagtaaacggttaggagcacagtttctaaagccaatctgcctacatttgaatctgggctctagcactttctaattagtttgactttgcccaagctgcttaacctctctgtcctacagtctcttatctgcaaattgtgctaacagtagtatatattttattaagggagctagtaatgattaagttatggcacaaaataaggttagaacagtgtctgacatacagtaagagaataaaagttatctatcattattattaatattactaacaatactggcaatagataatgagtatgttttggttttaagtgtatcataaaacagaagtttaagcagtaatggccaacatgccctagagatgagaaagatttcattaaatttgtcctccaaagttattaagcccacaatggttaaatgctctgtcctctcactgggttgaagaaagcaaataagccagtaagagatatctgtgatagagtaagctgtgggtgaggaaccagtaaaaagctagacctgctctaatgtataaaagctggaagctgagaagtactaaaacaaggttttcaaagttgctgcagacagtgatattttcatgctatctggatgatacctgagatccaaccctactcctctagctccttctcataaaacaaggataagaagaacaatgctcaaccaaaatgccaaaaggaatgattaacatcatatgtactctaagccatgtttagagtggaaaaatgcccagcctgtagaagtatcttatttagaaacaaaaataagccctttcttaagtgcttgttgtatggatttattaatttcctcaaaatacatggaagagcttagagaaaattaaaatagttttttttttgctagagtattgctctgtctcccaggctgaagtgcagtggcgtgatcttggctcactgcaacctccacctcctgggttcaagtgattctcctgcctcagccttctgagtagctgggattactggcacctgccaccatggccaagtaatttttgtatttttagtagaaacgggtttcaccatgttggccaggttggtctcgaactcctgacctcaggtgatctgcccacctcggcctcccaaagtgctgggattacaggtgtgagctaccgtgcttggccgcttgtctgtaaattaatcagggtatggtacaatagtagtagcaaacacaaggaagtcagacaagaactttgaggtcaccatagaaacataagcaacagagatcgaaggaacaatagattgggagaaaagtaacaaggaaagttaagggacaaaggaggatatagtcttcaaggtagattaagaacagaaaggtttctaaatgccagacttttccttgaggcattatactgatccattgaagactaagcaggtttttatttctccatattctgaagcttataactgcactttgattacttattccctctgaaaagaaacttcttatagcctacaggacatctgtggcatcaaatccaagtcttaatatttaaatatatttttttctattttattcctttgtctttccaatacataacttttcagcagggttaatgtttgtgttatcctagtggatctcctggcctctaccatctgaaccaagaattaactgcctaatagggacagttggagctcttttcctgcacaataaccaaagcataccaagacgcgatcaacttcttatgggatcagttacacttaaaagaaaaaaaaagtggaataatagataagaaatataataaaatattgatagggttgatgctcttatgggtacatgagggtttcactgtattagtctctgcttttacctgtattttgtagtttacattaataaaaagctttttaaaactgaaaaaatacagtagtaaaaacatcaaaataattatatttttatgataaaaaagccacttaatcacttccaagcattttatcactattagaagggaatataatctaattgctaaaattgtcatatatttcagttatctcatcatcctcagaaagcaaattcagcaagtaagtagatgctagtgatgcatctgtaacaacaaagagtaagtatttggataaagaagagcctcactaacagacaaactgtttataacttaaagccatgataagtttcagaatgtttcagccatgaggggtagatgcatttatatgttgcagctgtaactcatatataatacatgtataagcctcaaaagtcctgaggccattttaagtttcagctttacacagatttatagttccttctcaagtatataggaatatagtttataggaaacatggaaatatcgggaactttacataaactatttctagttcttgttaattttaaaatcataatgtgataaacacattccatactttatatgtattgttacaattcttaaaattatccatattcaaagtgcttacttttatgctatatatttcttatactatgacttcagagatttcattaaaggataataaagaattcatctaccctataaaatgctttttcaaatagctggacgtcgggccaggtgcagtggctcacgcctgtaatcctagcactttgggaggctgaggcaggtagatcacctgaggtcaggagttcgagaccagcctggccaaaacagtgaaaccccatctctactaaaaatacaaaaactagccaggtgtggtggcgggtgtctgtaatcccagctacttgggaggctgaggcaggaaaattgcttgaacccaggaggtggaggtcacagtgagccaagatcacaccactgtactccagcctgggcaacagaaccagactccatctcaaaataaacaaacaaaaaagtagctaggcctggtggttcatgcctgtaatcctggcactttgggaagccgaggagggcagatcatttgaggtcaggagtttgagaccagcctgaccaacatggtgaaaccctgtctctactaaaaatacaaaaattagctgggcatggtggcccacgcctgtaatcccagctacttaggaggctgaagcaggagaatcacttgaacccaggaggcggaggttgcagtgagtcgagatcgctgccactgcactccagcctgggtgacagagcaagactctgtctcaataaaataaaacgagatcaatgttttaaataaaataagattctgagttctaggcatactcattgtaaagcagattcaccattccacatttccttgataagactgacagatgtatacagcaacaagtgacgaacacttgcagtaatactactcctcagctgttaaccaagatttacttcaggcactgaaaagagcagattacttggagaatgtaggtactagaaagaatgaactttactaagtgattccttatttgaagctggaataaaaactctctccatgttttcctgcatgacttatgccagaccaatgatgtatatatactatatatatatgtgtgtatatatatatatacaatgatgtatatataaaacaataagcatgtttccacttccatctctaaatatatagaaaaagaatcgtggtcacatgatctaaagagacagaaacaaccttctaactaaaagaaaattagaaagtaaaataaccactcactttttagagatgttttcctaaccagcttatatcaaacccacaacagtctattatatcattctgtctttaacagtgtctttcatgaactaaggtgaacagtgatacaaccatttgagagatgaaaaatacatatatataggttgagctatgaaaatatgaaatctaaacgctccaaaatctaaaactttttgagtgctgacatgatactgtaagtggaaaattccacacctgatctcatgtacacaaactttgttttgcgtacaaaattaatgaaaatactgtataaaattacctccaggctgtgtgtttaaggtgtatatgaaatataagtgaattttttgtttagagttgggttccattcccaggatatctcattatatatatatatgtaaatattccaaaatctgaaaaaatgtaaaatctgaaatacttctagttccaagcattttggataagggatactcaacccgtataatcaaatgacttgcaggtgacatagctaattattagatcttggagggaaaaatccgtcttttcaaatttccagcttagtgctataaccgttcagatacatcacaaatttaagtctagtggggtgctacaaattatgcatcatctcattaatgataatgtttactaatctcaagatctttgaaataaaaataatagctacctttttcagatacggtgctagtaggcactttatatatattatcttgaatcctcacaatagctcagcgaaatatccactatactcctcatttatagactaggaaaataagatttagaaagattaagtgacttgcccaatcacttagccagaaagtattgaaaccagctttcaaatccaagtttatcaaagccagtgttctgattaaccaaaagattcttcctcacatgtgcaaataataatcatatactacatacagtggcatgagacttatggaatatcatgaaaactttacttttttccctttctaatttcatttccttcctttcttttcttttctttgtttttcctagaagatgtggtagagggggaaggagcactgaattcatgaaaacaagttccttggaggattgataaaggaagatgatagtatttctactctgtcagggtaattcaaaagcatatttttaaatttgttactacttcttgaactttactatgtgccagaactaggtgatttatatacatagctcatgtaaaacttatcatgagatgctaaagagcttccacttaaaggaattcaaattcttgctgatttttaatgatgaccacttttgttcattgctaatcttcctgtccttcattttcttcagcccttcccactactgcaccctaatctttaaaaagcaaaacaaataaacaataacaaaagtactgacttcatatgactgctaaaggaaaagtgatgatattgaatttgatctatcatcttaatattactaatttatattacctatttaaaatgttacagtagctccctctagtttacaaagcactttagaatacattagctaactcaatcctcaaaaacgcctgtgagatagattttatatatcccatggagctgaggctaagaggaaattgagcaactttctcatttagttgagtggcaggcctatgtctaaacccaagacttctcactctgcattaagagcttttctttatcctattttagtcacaggtaggctcgactaacccaggaatgtgctatatcaatgtacttgaaaaacagaaacacctaacacctagatcttagtttctatcaccatcctctaccattttccataaccaggactccttgaagaaatcaccgattatataattggagcagggaaaatacaagattaacttggagtatctaataatactagaaagtaagggagtactcaaaaaacaaaaggataggggagtgacaaaagaagacaggactttgggtctttggtctttgggcttccaatggccaaagctggaacaatttgagcaacaaaatgaataatgcatataaaataaatatccatgagtgcatattgatataaataactgaataaataagtatgtgagtaaatggggaagaagacccaaatcccccttacataagaataatggacttatatgtcccccttccaggagatggaatttattttcccttcccccttgagtgtagactaaacttagtaacttgcttccaaggagtggagtacggaaagtaaatttaaaatagagtaaccaggcaaacactatcttcgccaggtgaccaaggttaacatcattagtgataagtcaccttgacagcatattcccttgatgtgatgtgatgaaaatagaagcttacctctggtctttctctcagaatcccataaccccagcctaatatgagaaaaacaccagacaaattccatttgaaggatattctacagaatatctaaccagcactcttcaaaactgccaaggtcatgaaaaacaaggtaagtctgagaaactatcataggtaagaggaatctgaaacaatgacagctaaaggtactgtggtgtcccggatttgatcttgaagcagaaaagggataccagtagaaaaagtactgaaatatgaatgaagtgtggagtttcttttttctttttaacactttgttgaattatgactaacaggtaaaaagctgtacatattcaatgtatacaacttgatgagtttgtagataagtatacacccattaaaccatcaccactctcaaggccctgacatatacactacctcccaaagtttcctcccaccccttttattattattattattaactttgtgtgtatgtgtaacaagaacactcaagaccaatccctgcccatccccaccaccaagcccctgataatcaccattccagtcctggcttctctgagtttcactatttttttgagacagggtctcactctgtcacccaggctggagtgcagtgacaccaacatggctcaatgaagccttaagctcctggactcaagcaaccttcccgcctcagcctcccaagtagctgggactacaggcatgtgccagcacacccggctaatttttttaattttttggtagagacaaggactggctatgttgtccaggctagtgttgaactcctggcctcaagcaatcctcccatctcagcctaccaaagcactcatattataggtgtgagccaccatgctaaaataggtttcactattttagattccatatataaatgaaatcatacagtagagtttcattaatagtaaagtaacaatgtgggttgatatggtttgactctgtgtcccccaaccaaatctcatgtcaaattgtaattcccagtgttgaaggatgaaggaggggcctggtggaaggtgactggatcatcggggtggatttcccccttgctgttcttgtgatagtgaatgagttctcatgagaccttgttgtttgaaagtgtgtggtacttctccccgccctctggctccaccatggtaagatgtgcttgcttcacctttgccttccaccataatcctaagtttcctgaggcctcccagccatgcttcctgtatagcgtgcagaactgtaagtcaatgaaatgtcttttcttcataaactacccagtctcaggtagatctttagagcagtgtgagaacagactatcacatcggttcattagtagcaataaatctatgtaccataggaatataagatgttaataaaaggggaaactggatgcagggtgtacaggaactctgtattccatctgcaactttcctgtaaatttaaaattattctaaaattaaaaatattttttaaaaaagaaatcaatacacttaaaaataaacagacaaagtggggcatttgagggggctggagtaacattaacagcaagagagagagagaatcccaccctccaaaatatctaacacaactgagagtgttctgctaaactagaaataacagtaatttcaaagcttttaacaagagccgttcgcagatatactactagtaaaacctcagaatcatttgcttgttatattgttcctcctataatcctaccaaaaacaaaacaaaccaaaaaatccccataatcctttgaaagttattaaagtcatcataaccattagtaaaatataaatgtatctgccatacatgtctaataaacatgtagaatcaaatgcataattcatataacacttgcctctggagttcctagtgatttcacagcattcagatcagatcctgaagagaaagtattttttgccccacggacaatgaggcctttcccctctgtccaattttccaattcaattactttttccagaagttgtagcatcataacacctgccagagatggaagtgggaaatcacaaatatatgaaggtgactggaaaaacagaaataatttataaatcacaagtgtcaagcatactcttaggtcctatattttataaatatttactgagtgtctatcaaatgcctactgcactggcactatggagtatacagaagaggtacacatggcaggccctgcattgtaaatgtaaatttattatgtgtctatctctccatttatcttaagaaatcacataaatatatgattatgtagaagaataagaatatactatgctgtcctaagaataagaaaacgatatggtaataagaaaaaattatttcttagggtaaagataagacatagacctgacttctcagcaatacatgtctcagtcaataaagctttatgggtataacatgactatgagatcttatgatatattggacatatggtatacagaacaaaacacaattcctatactactgacatcagaattagtataataggatgttaattgaggaaatgagtaataaataccatcttgttccatggttaacaaactgtcctctgaggggcttgaggcatacgatggaagttcttcacaggcctaccaaccattgattctatgatttatagattgttaccttgatattactccaaaattctattggagcttctttataatagacaaatttaacacagaaacagctgggactggcattttaagatctaatcaataacttttagatatgcttatctttggtgatcttctaagttcacaaagttcatggttttcaacatgactagttttaatttcctctgcctaggcaatgctttagaagccaatgtataaagatcataacagcgggttaaaactggcaaaaaatttgtaccacaaggttccaaaagatggccccattaaattatgtacacttctttggaatataaatcccacaatgtcaagaactattattttctttgccattttctgaagtagccaggagtgaggtggctccacagtaaatgttatgttaatgatactaactcacaaatgactaatgcagctatcctttcttatggctaattatgacctacagtcatgcaccaacaatgtatcacatataccatggtggtcccaagattaaaatagagctaaaaaattcctatcacctagtaaccatcatagccattgtaatgtagtacaatgaattattcacatgtttgtattacagttgcctatagtattcaggaagtaacacactgaataggtttgtagcctaggagcagcaagctgtatcatatggtataggtgtgtaataggttatactatctaggtgtaagtacaccctacaatgttcacacaatgacagagtcacctaacatatttcttagaatgcatccccatcacaaagcaacaaatgactgcacttaaaactgtaaccctttccaaggatgtcctagatcctttagaaatatcgttcttttgctttcaagtgatatatagtctagtaagggaaagaagaaacccatatttttagtataagaataaatctgtataggttaatatgggcctttaatcactcataatatttaaggttctaaaaaacaggccgggtgcagtggctcacgcctgtaatcccagcactttgggaggccaaggcgggcagatcacgaggtcaggagatcgagaccatcctggccaacacggtgaaaccccttctctactaaaaatataaaaaaactagccgggcgtggtggcaggcgcctgtagtcccagctagtccggaggctgaggcaggagaatggcgtaaacccgggaggcagagcttgcagtgagctgagatcgcgccactgcactccagcctaggcgacagagtgagactccatctcaaaaaaagtaaaataaataaaataaaaataaataaataaaaaaaacaatgttggcctttgttttaaaacctttcctatggtgctgatttttttttaaacctttcctatgatgctgaaatgctggccatgagaataagaaaaatccataccagtagttactgttaaactaatcttttcaagtttgcaaagtaaacctcaaaagatggaagagaccttaaagagtatctaactgaatgatttttaaacaagggccttgagtgctcattcatcctctcccaatccaactccaccaaataccattacccaaatcaaagcattagttttatatattatgcatcaaaataatatgtttctaattgaataaaaaattatttgtaacttttcagaaataaatcatcactattgatccaatttaaccttctagagaaattttacctttcaatttctatttttcctggactaatattaaattggtttttattccctaaaccaactgaacatatagaactacaaagtctaataaggtagtcactagtcacctgtgtgtactgagcacttgatacgtggctagtccaaattaagatgtgtcataagtataaaataaataccagatttcagagacttagtatgaaaataaaaagaaaaatacctcataattgtttatattagtgacatattgaaaaaaatattttggatatactgagttataagtgaattgttaaacttaattttaccttttttaaatttttttaaactatggttactagaatatttaaaattgcacatgtggctcacctttgtttcttacattatgttttcattggtcagcactggtatagagaaatctctctgaattctggtaagtggagagaaaagtcatcttgggtttaaagactcaccactggtaatttacaaagggtttacagactattgaattatgtctatagtacaactgtatataaagtagatacatgaaaattttgtgagattttctgagcctcaaatttcaaatgctactaaagattataatcatgaagtgcataactgaaaaggagagattactaaaatcaacttgaaaataggagtggtgagtattcaacaaggctactcattagctcctgcataacacagtggtagcgtagttcaaatttgagcttcagcaaaaattacaaagtaccacatgtcctgcatcttcagttctcttaaatataaaattcttatatgctaagagtgttgactagaaaatagaaggcattcaccagtatctaagagttagggaagattccacagctggacaagtgccgtgtttcttctgtaaccatggaattaaaaggttaaaaactaacaatgattttatttcaattcacagaaaaaaattaagctaaataattcttttcattaacaggcttttctctttagtttcaggaactctttgaaacctctttctccttgtttcctagtagcattagctgaaaacaaatgaagttattaaacagttaatgaatttcggtggaaaatataatcaagattaatttagatttcctttttatcaatatctgtattaatgagttttctgaaaacattcaaatatccataatcattaaaagttacttaaagtgtttctagttcatattacagagttgttgtttttgttatttttctcatgttctaccaagagtacaaggactttaaaacattctgtcaccacagcaaggataaaaaaacttgtgataacagtttagatttagtgtcattctttaggaataaaaagatccctaatacctgaaaaggcattcattctacttggattgttcagagtaagaatgccaatgccattgtcttccttctgaaggtcaatggatccaccaggaaactgctgaagtgtttttttcacttcttcctcataaaatccatgggatgtactataaagtgacaatcctgtttgatgtagcaattttgtccttccagacagagaggctgtcttcaaaagacttttcgccatttct

SEQ ID NO: 6787 - DNA, 148 bp, Homo sapiens
  SITE (136): n equals a,t,g, or c
aaaaaaaaaaaaaaaaaaaaaaaaaaaaaaaaaaaaaaaaaaaaaaaaaaaaaaaaaaaaaaaaaaaaaaaaaaaaaaaaaaaaaaaaaaaaaaaaaaaaaaaaaaaaaaaaaaaaaaaaaaaaaaaaaaaaaaanaaaaaaaaaaaa

SEQ ID NO: 6788 - DNA, 130 bp, Homo sapiens; identical to SEQ ID NO: 5837

SEQ ID NO: 6789 - DNA, 143 bp, Homo sapiens; identical to SEQ ID NO: 5839

SEQ ID NO: 6790 - DNA, 116 bp, Homo sapiens; identical to SEQ ID NO: 5840

SEQ ID NO: 6791 - DNA, 151 bp, Homo sapiens; identical to SEQ ID NO: 5841

SEQ ID NO: 6792 - DNA, 202 bp, Homo sapiens
aaaaaaaagaaaaaaaaaaaaaaaaataaaaaaaaaaaaaaaaaaaaaaaaaaaaaaaaaaaaaaaaaaaaaacaaaaaataaaaaaaaaaagaaaaaaaaaaaaataaaaaaaaaaataaaaaaaaacaaaaaaacaaaaaaaaaaaaaaaaaaaaaaaaaaaaaaaaaataaacaaaaaaaaaataaaacaaaaaaaaaa

SEQ ID NO: 6793 - DNA, 1792 bp, Homo sapiens
cccaagaaaacccatctccaaattgtgtatggattcacgtgtcagtcatttatgaccaactgtgtagtgtgccctcatatagtatttgtgagaagaagttttcaatgtaagaggaagggtggagaaggagagagaaatatgtgaggtagtaaggaggacagaaaacagaacagaaaagagtaacagctgaggtcaagataaatgcagaaaatgtttagagagcttggccaactgtaatcttaaccaagaaattgaagggagaggctgtgatttctgtatttgtcgacctacaggtaggctagtattatttttctagttagtagatccctagacatggaatcagggcagccaagcttgagtttttattttttatttatttatttttttgagatagggtctcactttgttacccaggctggagtgcagtggcacaatctcgactcactgcagctatctctcgcctcagcccctcaagtagctgggactacaggtgcatgccaccatgccaggctaatttttggtgttttttgtagagactgggttttgccatgttgaccaagctggtctctaactcctgggcttaagtgatctgcccgccttggcctcccaaagtgctgggattacagatgtgagccaccacacctggccccaagcttgaattttcattctgccattgacttggcatttaccttgggtaagccataagcgaatcttaatttctggctctatcagagttgtttcatgctcaacaatgccattgaagtgcacggtgtgttgccacgatttgaccctcaacttctagcagtatatcagttatgaactgagggtgaaatatatttctgaatagctaaatgaagaaatgggaaaaaatcttcaccacagtcagagcaattttattattttcatcagtatgatcataattatgattatcatcttagtaaaaagcaggaactcctactttttctttatcaattaaatagctcagagagtacatctgccatatctctaatagaatctttttttttttttttttttttgagacagagtttcgctcttgttgcccaggctggagtgcaacggcacgatctcggctcaccgcaccctccgccccctgggttcaagcaattctcctgcctcagcctcccaagtagctgggattacagtcaggcaccaccacacccggctaattttgtatttttttagtagagacagggtttctccatgtcggtcagggtagtcccgaactcctgacctcaagtgatctgcctgcctcggcctcccaagtgctgggattacaggcgtgagccactgcacccagcctagaatcttgtataatatgtaattgtagggaaactgctctcataggaaagttttctgctttttaaatacaaaaatacataaaaatacataaaatctgatgatgaatataaaaaagtaaccaacctcattggaacaagtattaacattttggaatatgttttattagttttgtgatgtactgttttacaatttttaccatttttttcagtaattactgtaaaatggtattattggaatgaaactatatttcctcatgtgctgatttgtcttatttttttcatactttcccactggtgctatttttatttccaatggatatttctgtattactagggaggcatttacagtcctctaatgttgattaatatgtgaaaagaaattgtaccaattttactaaattatgcagtttaaaatggatgattttatgttatgtggatttcatttcaataaaaaaaaactcttatcaaaaaac

SEQ ID NO: 6794 - DNA, 1342 bp, Homo sapiens
ctatctctcgcctcagcccctcaagtagctgggactacaggtgcatgccaccatgccaggctaatttttggtgttttttgtagagactgggttttgccatgttgaccaagctggtctctaactcctgggcttaagtgatctgcccgccttggcctcccaaagtgctgggattacagatgtgagccaccacacctggccccaagcttgaattttcattctgccattgacttggcatttaccttgggtaagccataagcgaatcttaatttctggctctatcagagttgtttcatgctcaacaatgccattgaagtgcacggtgtgttgccacgatttgaccctcaacttctagcagtatatcagttatgaactgagggtgaaatatatttctgaatagctaaatgaagaaatgggaaaaaatcttcaccacagtcagagcaattttattattttcatcagtatgatcataattatgattatcatcttagtaaaaagcaggaactcctactttttctttatcaattaaatagctcagagagtacatctgccatatctctaatagaatctttttttttttttttttttttgagacagagtttcgctcttgttgcccaggctggagtgcaacggcacgatctcggctcaccgcaacctccgccccctgggttcaagcaattctcctgcctcagcctcccaagtagctgggattacagtcaggcaccaccacacccggctaattttgtatttttttagtagagacagggtttctccatgtcggtcagggtagtcccgaactcctgacctcaagtgatctgcctgcctcggcctcccaagtgctgggattacaggcgtgagccactgcacccagcctagaatcttgtataatatgtaattgtagggaaactgctctcataggaaagttttctgctttttaaatacaaaaatacataaaaatacataaaatctgatgatgaatataaaaaagtaaccaacctcattggaacaagtattaacattttggaatatgttttattagttttgtgatgtactgttttacaatttttaccatttttttcagtaattactgtaaaatggtattattggaatgaaactatatttcctcatgtgctgatttgtcttatttttttcatactttcccactggtgctatttttatttccaatggatatttctgtattactagggaggcatttacagtcctctaatgttgattaatatgtgaaaagaaattgtaccaattttactaaattatgcagtttaaaatggatgattttatgttatgtggatttcatttcaataaaaaaaaactcttatcaaaaaac

SEQ ID NO: 6795 - DNA, 125 bp, Homo sapiens; identical to SEQ ID NO: 5842
  SITE (33): n equals a,t,g, or c
  SITE (49): n equals a,t,g, or c
  SITE (61): n equals a,t,g, or c
  SITE (90): n equals a,t,g, or c
  SITE (91): n equals a,t,g, or c
  SITE (116): n equals a,t,g, or c
  SITE (117): n equals a,t,g, or c

SEQ ID NO: 6796 - DNA, 151 bp, Homo sapiens; identical to SEQ ID NO: 5843
  SITE (4): n equals a,t,g, or c
  SITE (45): n equals a,t,g, or c
  SITE (89): n equals a,t,g, or c

SEQ ID NO: 6797 - DNA, 118 bp, Homo sapiens; identical to SEQ ID NO: 5844

SEQ ID NO: 6798 - DNA, 77 bp, Homo sapiens
aaataaaaaaaaaaaaaaaaaaaaaaaaaaaaaaaaaaaaaaaaaaaaaaaaaaaaaaaaataaaaaaaaaaaaaaa

SEQ ID NO: 6799 - DNA, 6782 bp, Homo sapiens
gccaccgcctcccgccacccctgcccgcccgacagcgccgccgcctgccccgccatgggtcgacagaaggagctggtgtcccgctgcggggagatgctccacatccgctaccggctgctccgacaggcgctggccgagtgcctggggaccctcatcctggtggtgagtggagggagccggggaagcccttctctctccagcccttgcactccccaaactctcacttccccgaaggggctgtgttttccaaggtagcctggacccacctccccagctgtgacccccacgcttaaccgcggaggatcaagctgacttccaaagtcctcttccccacggttctaaccccctctctgacagctccgactcttgccagaatgacagctgttactccccagtgatagtgccgatcgtttaccctcccacaagtgactcagccaacaggctgggggcagcggtcacgcttgcagtctgggacagccagccacttcccctgcctcccacacccctccagattcccagaatcccagcccccagatgtaggggagggggcggaggcaaatgagccattattaggttatttgggtcctgggtgtctggcctctaatgaataattaagcctcaaaaagtccaaaggttgaagtgagtgaggacagtttgcacgagtgggggcagagggtgcaggccacatgggctgcgaacagcgaagtgggaagggaggcagattctgacggtagaagggtgggaggaagctaggcccaggcacagaggacgcgtgtctaaagttgctcacctggtgctcagcgactcccaggccctgtctgttatccagacagatgctgtcagcgtctgtgcagaagacgacaagcattctggttactccctggcctcttggttactctgtgggttctctgagtgagcatttccctgcctgagttactcctcagtcctagttactccttggtcacaccagtttcaccctggttttgttctgagtgactctgtttgcacttcttaggtctggcagacccaccagttatgttctatttcctgtcccagttactctgatttttcagccgctcatgtggttacacctgttttcctctgtgttcagttgctacattgcagtgagtgggttactccgttcctgccccagccctgggtagtacagaccagctggcccactgtggactaggaagcctaactaagggcaagtagggatccccaaatggttgaggatcaggatctatgggcagaggagggctgaaacccacttctggcttccaagaataggaagtggggaagccacagggggcattttatccacagcctcccataagattagtcgtcctatcagccagccctagcccctctctcctgtgccaagaaggcaataggaggtggcctttatcactctcctgcctcggagccctcactcctatcggagtcctgagtccagccacctgttttagagcagccaggctaggggaggatgatgtcttctattttcctagaggggcctcctcattccctcccaagtctcagttcactctctcacaaaggagccgttagtcctcccactgagccccaggatcatcaggcttatcccagaccacaaaagaagagtgttaaattttaggggaagggttgcagactcagatggatgtgaggtattggatatcagtgagaagcagaacttcaaggactgcatgaactggaggggcaggcctggggatccctttgtagtgggtgagtgcctgcctgcctacctgcgtgttgggagcctaggcctgcagtggcagaatcagggttggctttggggtgaggaaagcccctttctctgagatacctggtgtgagggcagggggcggtgctggccgagaactcagggcaggggttgggggaggaagaggaagattagccccaaggtggtggaactggctctgacagctcctccctccaaggcgtcctgggatggagccaggtctgagcctttggcaggcaaggagctgctgccagggcctcccaagcagggcagggcgcctcagaccctcacgtgcctgtctcccaccacccctcctcacacatacacctgcaatctctgatctttgctctcacctgcctgcacacctttgccccatgtcattgccgctggcttctccgttatctcttggtctttctgggatgataatcaaaatgcttaactatccagtacaacaggcactgacccgtcagaataaacaaggtctgtagcacaggtcctggaaactgcctgctctgtgggcataaaacctttagttatgggcaggtgggagaggagaccagggcaaggcattggagcagctttgagggacactcagggggctcagggcaacaatgctttacagctgctgcagaagtattttcaggcttgaacaaggggaacagacatagtacgttctttttcttttttaaatagagacaaagtctcactatgttgcccaggctgttctcaaactcctgggttcaagatcctcccatctcagcctccaaagtgctgggattacaggtgtgagccaccacagctggctccagtatgttctatatttgtagaacaccagggctcttagtctcttttagttcccccatttttggcagaaagtttagaaccgatctccccatttctacagccctgggtcccgggctggggatagtgagaggagccacacagatccctgtctgtaggacctccaaatctgagtggggaatctggacccctgagagcagagaggtcatgggtggagagaggagacgctgggacagggacaggtaaaggaaggggaggttgttgagggggacatggtgaaggctggggctctggcatcctggactcaggagaagtggattcaacctcacttctggtctcctccctatttatttatgccgcccattgccaccactaccaccaccacatgagcttttcttttcaactctttttttttttttttttgagatggagtcccgctctgtcgcccaggctgaagtgcagtggcgcaatcttggctcactgcaacatctgcctcccattttcaagtgattctcctgcctcagcctcccgagtagctgggattacaggcacctgccaccacgcctggctaatttttgtacttttagtagagatggggtttcactatgttggccaggctggtctcaaactcctgacctcaggtgatccacccacctcggcctaccaaagtgctgggattacagtgtgagccactgcaccgggcctacatgagcttttctttggggcagctgggggatgagtgagaggcttcccacctttatggtccaggcctgaagggctgtggagaaacttgtgctaaggtgaaagctgttcccctacacctacgcctgctgaaattcaaggaaaatcagtgaagatggttcagtcatcttctaggatcccagtcgcagaccctgcttccagccctttccatagggccctctcatattagagttgggacagtggggtgggaaggcatgtgtcctttttctggaaagtgcaattacagcagaaggggtttgggctgggttccaggaagcgcctctagtcctcccagtggtggcgagtgggcatgttgctggcttcaccccttccttctggagtgagagttgctggtcctcaccctccctgcctgttcttcttcctgacagatgtttggctgtggctccgtggcccaggttgtgctcagccggggcacccacggtggtttcctcaccatcaacctggcctttggctttgctgtcactctgggcatcctcatcgctggccaggtctctggtaaggccttaaccctgcccccagcccttggccctcaatagcattcccactaggtgtcctggcattcctaagggcaggtcacagctgtggcctctgctttggccccttgggaaaggagggtggagaagaaacttgacacttagaactttcgactctcaccttggaatcagagattatcagctgacctgttacatagaccaaccgccatcctgtgcaagaaacccctctctgcaccccttctcaggggaccctagcctgccgactgtggcaggctgcagctaataggtcccttgtcccctctgcccaggggcccacctgaaccctgccgtgacctttgccatgtgcttcctggctcgtgagccctggatcaagctgcccatctacaccctggcacagacgctgggagccttcttgggtgctggaatagtttttgggctgtattatggtaagcattccccaccctgtcctcctccactacccccgtccctctgttcaggacctgctggcaccaggccttttgatgacagacggctaggacctgcccaggccccgggctcatgactcactcattcacgcacagggtcaaggtagggggcacgaagggaaagaaacaagttgggcaataacagagtctcaggccctccaccccaccccacgccaccccctctgcctgctgcaatacagcagtattgctacttacccataactcatgggagggtggggagggcacacctgagagggaagtctgggctcaggcctctcccccgactcactgtgggtctaatctgtcaccagatgcaatctggcactttgccgacaaccagctttttgtttcgggccccaatggcacagccggcatctttgctacctacccctctggacacttggatatgatcaatggcttctttgaccaggtatgggctggggacgtgtgaggggaacgcagggaggggaccgagttgccttggtagctcatgggctggttgggggacaggactcctcgactgtagcagggtttctccaatctgtggggtaacccgcatcagaacatggtggcaagtacttacaaaacatgcggctctccagcgggttcttgtcacgcagacattctagcaccattgctttcaggagaagagcatgggcgggcgctgacaagagtttaagagctagagggaagacgggggatggaaggaggggtcagagaaagggagggagctgcagctcaccctgttctccccactccccagttcataggcacagcctcccttatcgtgtgtgtgctggccattgttgacccctacaacaaccccgtcccccgaggcctggaggccttcaccgtgggcctggtggtcctggtcattggcacctccatgggcttcaactccggctatgccgtcaaccctgcccgggactttggcccccgcctttttacagcccttgcgggctggggctctgcagtcttcacgtgagtacagcccccacccagctcaccccagcctgcctctcctctgccctgccccccatgtccctgactatgagtgtctgtccccccaggaccggccagcattggtggtgggtgcccatcgtgtccccactcctgggctccattgcgggtgtcttcgtgtaccagctgatgatcggctgccacctggagcagcccccaccctccaacgaggaagagaatgtgaagctggcccatgtgaagcacaaggagcagatctgagtgggcaggggccatctccccactccgctgccctggccttgagcatccactgactgtccaagggccactcccaagaagcccccttcacgatccaccctttcaggctaaggagctccctatctaccctcaccccacgagacagccccttcaggatttccactggaccttgcccaaatagcaccttaggccactgcccctaagctggggtggaaccggaatttgggtcaatacatccttttgtctcccaagggaagagaatgggcagcaggtatgtgtgtgtgtgcatgtgtgtgcatgtgtgtgcatgtgtgtgcaggggtgtgtgtgtgtggggggggttcccagatattcagggcaagggaccagtcggaagggattctggctattgggggagcccagagacaggggaaggcagcctgtccatctgtgcataaggagaggaaagttccagggtgtgtatgtttcaggggcttcacatggaggagctgcagatagatatgtgtttctgtgtatgtgtatgtctgcctttttttctaagtgggggcttctacaggcttttgggaagtagggtggatgtgggtagggctgggaggagggggccacagcttaggtttggagctctggatgtacatacataagtaggagcagtgggacgtgtttctgtcataatgcaggcatgaagggtggagtgaagtcaggtcataagtttcatgtttgcttttgttttgttttgtttttaatgtatgtagcagatgttacagtcttagggatccgggatgggagaccccactttagaaagggtcgtcactcctttaatcctctactcaacaatgtactcttttacttttatattaaaaaaaataaaataaatatgtgcctaaaacctccagttgtgcaaatatctttctgcttgctctgctgcttttctggggccagttaaggagcttccgcatgcccacactgacccagggtgcccggctgagtgtctgatctggtcaggttaccctgggggtcatacagagaggttagagagcctcttcaccaaggctctcagtttgaactcagtggtcccaaactttcccccaagtttccgtcctcatgggtacccccagcataatgaatggaatcttcttcccaatccctgtacccacacatcaccccagaaaggcttgagccctatgcagggaagatcttgctgcagagctacccaatggggagaactgctgcccaggaggtggt

SEQ ID NO: 6800 - DNA, 299 bp, Homo sapiens
ggccgggcacggtggctcacacctgtaatcccagcactttgggaggccgaggcgggcggatcacgaggtcaggagatcgagaccatcctggctaacacggtgaaaccctgtctctactaaaaaatacaaaaaactagctgggcgtggcagcgggtgcctgtggttccagctactcgggaggctgaggcaggagaatggcataaacccaggaggcggagcttgcagtgagccgagatcgcaccactgcactctagcctgggcgacagagcaagactccgtctcaaaaaaaaaaaaaaaaa

SEQ ID NO: 6801 - DNA, 664 bp, Homo sapiens
ggacagtgcagctgtgatgaagccacagtcggatggaaaactgacctgagatctaagcgcttctccctgcatgagcctcacactcacttctacaagtgtgttcagagaaaattcaccaaacgccacaagtctgtgaggcatcttcacagaaagccagcttcagggaaacagcagccaggccgcgtaatgaaggccaactgaggcagcccccggggtcagcctagcccagggcttgggccctccatcatggagagtggtcaagtcagtctgtttggtttggttttcagtctgatgccatgttgtcagcacattcagaagggagcagcttgtcctaagacagtgaatctcaggaggccacagctgtcaggacttttgatttcctggcgattcctcaagtgtattctgctggattttaatgggtgggtgtggaaaagtccctaattagatccatttggaaatccctgagtgaaacaaagtctatttttattgcgcacctacgagccagcaggagaaagctgtgtgcttgtctctttgcagcaatgcagctgacctcggaaatgatgtccaagaatgcctgaagctgagatggaaagtggcagcacctactatgtgccaggtgctctggataaagctgcaaaaaaaaaaaaaaaaaaaaaaaaatgga

SEQ ID NO: 6802 - DNA, 24387 bp, Homo sapiens
cgagacgcgctcgggcgtcgctttgctgccgctaggccctgtgctcctccccgcagcggaaggcctacgaatacgcggtgtcttacgtcgcttcctccgttcttcgttgcactggccaacgggacgcttagtctttcggcaacggggtgaaaccttccttgtgcctgaaaaaacggtacttcgcggtgtggcttcggcgcctgcgcaaaaggccgcggggcgcactccagttcccggcaggccccgcgacgcgcgtttgcgtgctgacgcacgcagttagtcgtgctgacgtgcagcgcggcccaggcggggtgcgagtggcgcagtcggagcccgttgcggcccctgaggaagcgaggaggcgtcggcgtcggctgaggcgggcggaccggcgaggcgaggcggcggccccaggcccgagggactcgggagctcgagcagcggcggcggcaagacctctccccctcggaggcggcgggcggaggcggcgggtgagagggtgagggagccagcgagccgggtgggggaggggcggcggccccggcgcgaggccaaagcgcgcggagaactgcccaggccgccgagctcctccgcgcgcacgcgcgctcgacgcccttcgctggcgcggacgccctcgcctcccttcccccttcccgccgttcctgtcgcgcgcgggcttcacccccccccccgcccctcccccatgacaacggcgttcgcagccgcctgtactcgggttcgcgagcgcccttggtgaggggggagggcgcgcgcctcggcttcactcctccccccaacatgtgccgccgaggtggccttcctgcagctgccgttttcggcccttaagtggcggggaaggggcggcggcggggggcttgctcctggacccttgcccccggttccagatctcctttcctcgggcttctcttcggcgttgggctgcccgtgtcgggggcctcccagactgcgggacgccgcgcagccccctcccccattccgcaaggccgaaaataggcccccggcgctgcggggagggccttgaacttcgtgggccggatttaaatggtttaggattcccggctatcagcctttgagttgttagtggcggggagaaaccccaaatcttaaaaactgtgaagaaagtgaacgtgttcagtttacatttgtaaggtagaccgtgcgttccctttttacactttttcaacgtctcccgagaattcgtgttcaaactaaggaggcttttggagaccttcgttgggaagaaaacgccagactcatatataagttttctggttggtttcaggcgttctttggcacacagctcttctgaagcttggtttccactcggcttcagttaggacgaatctggatcagaatttcagagtgttgtgttgtctttcatcctaagtgcgtgggcttagggctcttcaaaagctactattttagctttctgggttctttgtgtccactcagccgctctggagcgccccggtgctgagctggctgtgcttgctgatgtccatttttttcgacaacccttgtctcccctttttctccccttttggtaccgttttcttttttgcatattttactgttgaatttaaatatatctttctacttcattgttagcttaccactcagataatttcccaacagaaaagggtgtttttgtcttcctttgtactttttactttctgcttttaacttgggtaacttttgcatatccactgtctatggcccccactttaagagttttgtaatatcgtttggtttggtgatttgtgtgtggtgttgatcttcctactttctgtgtcttaacacaccccttagatgccgtggggtcgtcgtctttttttgtggggtggactaggtggctcattccctaaaagttctccgaaacattgtgacctaatatcctttgcttagcacctactggtttttcttttttttttttttccgagacggagtctagctctgttggcaggccggagtgcagtggcgcgatctcggctcactgcaaccttccgcctcccgggttcaagcgattctcctgcttcagcctctggagttgctgagattacaggcaatcgccgccgcccagctaatttttgtatttttggtagagatggagtttcaccgtgttggccaggctggtgtcaatctcctgatctggtgatccgcccacctcggcctcccaaagtgcaggtgttacaggcgtgagccaccgtacccggcctggttttcctttcttaaggagtggggggatttttgtgtgaggtggtatggaagtgtgggtgaatggttaagctgaagaattaagtgcaggtcaaaaacatgctgcaggggaagcagaaattaagtggggtaggggagaggcgaagaaggacctagttttaaaccgtgaggaggattggtactagaagatgaaaatgaggattggggtgtagagaaattgattttttgagccatacagtttttcattttttcctggatttctgcttgccttatccaggtttagcctcttctgtcaccttctgctttcaatattgggtctgctactgggcttgggtagggacccatccttaggcgcatgcgctagtatatttttccaaacatttgtatgatgcttcttcattctggaattttctaaatgcatccttcccttctatccagttcttttacatctttgattactctctccgctttacgtattccttagggttttttcttagtagtattttctcatatatgcatgttctaggaaactatcttggagaggatgagggtgagaaagagagtatatgtaataggagaaaggaatagagtatgtgtagccaaggaatctaaccaggaaagctgggacttgagaatttttcagaatcacgttagggttgggacaagttgaaaggctagaacctgggaggaggcatggggttaacacaggagagaaggaagaggcagggctgagagagaaaaactaggaagtgctatccaggggattggtggggaaagccaacggttggacattaatgaaagtggggtgtagagagggtttctacatagatttagggcaaggtatatggagaaggtatgggaacggttggaacagaggaggctggtttgatgtgtttaaatagagcagagttgaaaacaggtaatatttgacagctggcaagacagggaggaactgcaaattgttgtaaatcctattgagaggaaggaaattgaaggaataaaatatcaggatagttgataggatctttaaatatttggaatcaaggaaatggcccttacctgggaggtgaagtatatgacgattatccaaggttcatgtgtgtttctgatgtgcatgctggcctttagttggggtgtgaggctgcacattctgaaccaactagtctgctgttcagatacctaggggctgtgtagtttatttcatattcgtatagggtggtctgaaatccttaggtaagtttttgggagagtctttggacatggactagaggccgttgggtgccacagatctgtgtctggtgtttgttgtgaccaggaggctttggttggttaccagaggttaggaattagagtagttggtaaacacaccacttgtgcattttggggccaaaggagaacaaaaagggacagtgtggagagattttagaggaacaagatccttgtttgcctagggtggaaaaagaagaaaatttaggtgtagggagggattatttagaattctgtgcaagggcattgagagaaaggctgtaagaactgggctgtgatttggtagaaaggaaatttggaagggcaaagaagtggttttcttgggagaccaggaggatggtggagcattatacagcgaagacttagtgtgaagatcaatgttgaattagggatgaaggagagcagggacttgggtgtggggcggtaagtggttagtttggggccaggggcctgacccgtgtctccccgctccccctcaggagcggtggtgccccccccgggcacggggccatgtacaacgggatcgggctgccgacgccccggggcagcggcaccaacggctacgtccagcgcaacctgtccctggtgcggggccgccggggtgagcggcctgactacaagggagaggaggaactgcggcgcctggaggctgccctggtgaagcggcctaatcctgacatcctggaccacgagcgcaagcggcgcgtcgagctgcgatgcctcgagctggaggagatgatggaagagcaggggtgagggagagctgggggagagtcaagcactgaatgagtgcagagctgggggtgttaggtgggatgtatagggagcttagggtggttgaaagaggcctggcaaagagttgtggtaggggaggaggcagatgagctctagagaagtgaaaacagttaagggacagtgcagagtgggaaatgagaaggctgtgtgtctggggcatagatgggagcctgaggtactaaatggaggcacgtgggagaagggaggggccattgaggaacaaaaatgtgttttaaggaagagatgggaaagcagagaccaggtagaggagctaggtaagctgataggtgttgtcattggtagaaaagaagaagataaatggatgtaaggattgaggccttggaaagtagcataggcaggaaaagaggaattagaagaatacgtgaagaagtgggaatcatgggctgggaagggaaattttggaaaaggagcacattaaggcagaaaactcttttagagcagtggttttaaacttcagcaatggtgatccttttatacagtatcccttactttggaatcccaggaagtaaaaggcacattcttgttgaagttggggaggagcacttggaaccctgcttgcttaacttttttcttttggtccctgaggtgtagtatatttaaaatccactgttctagagggagtagtaagtagagggaagaaagatgatgggaaaagatcagacagaagggacttttgggtgagcgaaaagttctgtgtgcgcatggagagggaggggccccttttgggaatgagggaaatggaaacctgggactggggaaagtgtcctgtcgagcttaaccctgaagggatttgttcttcaggtacgaggaacagcaaattcaggaaaaagtggcgacctttcgactcatgttgctggagaaggatgtgaaccctgggggcaaggaggagaccccagggcagaggccagcgtgagtgttgcgctctccctcgatgactctggactctactctggctgctggctgctgctgctgtccttttccttacgtgggacttcctccctgctttcgtctgcctttcccatgccttatttggctcctgcttatacttgtgttctgaatatggctctgtcctttatatttccttcagacttttgcccttcttttctctagggtcacggagactcaccagttggcagaattaaatgagaagaagaatgaaagactccgtgctgcctttggcatcagtgattcttacgtagatggcagctcttttgatcctcagcgtcgtgcccgagaagctaaacaaccagctcctgagcctcccaaaccttacaggtatacaaggccaagaaaccactgtcagcttcttttcttgattgtaagctccatgctctatttttgtctttttgcgggctggtttcttcccaaactcttcagattttgttcttctgaagttgaggtgtccaaaaaaatttgtccaagggttagtcacagtgggtcacgcgcgtaatcccagcattttgggaagctcaggcaggagatcacttgaggccaggagtttgagaccagcctgggcgatgtagtgagaccccatctctacaaaaagaaaaaaagctggttggtggcacatgcctgtagtccaggctgcttggagaggtggaggcaggagggtcttttgagcccacaagttggaggttacggtgtgagctgtgttgctgccactgcaccccacctgaggcaacagagcgagattcttatttttttatttttattactatttttttagactctgtcttttaaagaaaagaaaggaatgtttgttctaccacccatctctgctgcttttcatttttccctagccttgttcgggagtctagcagttctcgctcaccaaccccaaagcagaagaagaagaaaaagaagaaagatagaggacggtaagttagttggaaagtgactctgatagccagaggaccaatcctgtggtgtacctttctctctggaagtggacagttctggcttccacaaagcaggagatagttgtcagggaggagggagttaccattgaggcctcaactagaagaaatacctgagtttctcagtggggaagtgttgagtttgcagttctgctaattaagattggccagcagcattttggattctggaattttctttttcattttgaggtttgttgacttaaggagttacttgtgcttgttggagaaagaagaaataagtcctgggcttaggtctggggcattagtgctattaggacattcaagtgttttagaaacctttttaggagagagattgtaagtgggagggccaggaaagaagccaagcaggatgagcttgcttttgaatccatctttagcaggtcagagagcagctctcctcgacgggagagaaagaaaagctcaaagaagaagaagcacaggtatgaggtgggaatacttgaatgactggagaaggtttgctgaattcaggcagaggtgtttcttatgttttttcttctcttttttccaacaggtcagaatctgagtccaagaaacgtaagcataggtaagagctctttaactcatagggggcgcagtggcatgtggagtggtgatttttttttcttggagtgaagctcaattccttgatcttccttgtgtcaacactccctctttccatttcacttttggttttatttccttttttaaagaagttacttttaacaacctttccttatttcccaggtctcccactccaaagagcaaacgtaaatctaaggacaaaaagcgaaagcggtgagtgaatttgtggggaatttgcttaggaagtaagtgaacgccaccttagtgggagggagttgaatgagttatgtccctgactggtaaagggttgagggatacgtgaggagaatccagggcaggtacagcagtaccctgagctgtggtggtggtcttccttcaggtctcgaagtacaacaccagcccccaagagccgccgggcccaccgttcaacttctgctgactctgcttcctcctccgatacttcccgcagtcggtaaggggtagtccaggaggaagggagggagagggaatgatgggttaattaatttaatatttattgagcgcccacggtgtgctaggcgctgcacagaccattcggaagacacggtccctgccctctaggagctgacaggctaaagcaacaggatggacagacatatacatttccccttctctttttttttttgtttttgtttatttgttatttttgtttcgttctgatgtatatggactgccagaatagggggggtggtggtttgttcgtggtgtctgggggaggaaggaatccttaccctggcttccttaatcggggaaggcttcctgaaggaggtgggctcagaggtgagttgtgaatgaagcgggtagggagtgggctgggtggatggtttggggatgtttgggggaggtgagtaaaggggtagagggagaacgctctttgggattgtgttgggaaaagaagaaccaaagtggactgtacttgcatttcagtgaatgatttgagttgtgcgactaaaggctttttggaagagggttgtccagttaggaaaggtggatgggagttggggagggggttttctgttctccctttgagctgatttccttcctctcccacgtcctcaattaactcctgcaggtctcgaagtgctgcagctaaaactcatacaactgccttggctgggcgaagtccttcccctgcttcagggcgacgcggggagggagatgcgcctttcagtgaaccaggtactaccagcacacaacggcctagtagcccggagactgctacgaaacagcctagcagcccttatgaagacaaagataaagacaagaaggaggtatgttcctgagttggtgatgttcattggattgcaaatgtatagatttaggatagacatgtgatgtgaaagggagaggtaataacttattaaaataaataaattcagttttttttcctgcagttctctcctagttctcttactgcatctgcagaacttttagtgttgttactagactgaattgtgaaccctttagaatcaaatctcactggatgttaggttttatattgtgtcttgtttatacatagatagaactggaacaaacgttgtatcttatctgtgtactccgtatgatgcctctagtttcttctcttttttcattaaatgctggtcatgtctcaccaaaactttttaatccattgggttgccaccaatagtttgaatgaaacactgaaatagtcttcagtagtcttctgttccaattttaagcattaatcatttcctcttgctttagtgattacagtctgaattcttggcctctatcatcaattttccatgtcatccagggttacctttccaaattacaagttggttgacctcagaaacttaactacttccttattgcttttgaattatatttaaggcttttaatagtctggtctttttctcatttcctgtactctacccatcctgggctgcttttttactcttcacacaaatcatgttctcacatctttcttcatgctgtttcttttcgtttaatagagttattcttcaaaggtgaagttgccattcgctttaggaaactgcttatttttccatttaaagatagtttttttccattcttataacattttgtagtggtatttgttaaatgtagtagtgcattagttatttgcattttgtgtttcttttagttttaagattctggctatccatatattcatatgttttcaccactgtgctttatatgattccttgttattgaatgaaagtgatcgcttgtggtcagagggtgtgtaaaagaaaagttatcattggaaagggtgttgggatcttaggggtgatgtgaagttttggcgtttatgaatccctatccctgctctctcttccactcttagaaatctgcaactcgacctagcccctctccggaaaggagcagcacaggcccagaaccacctgctcccactccgctccttgctgagcgacatggcggctccccacaaccccttgcaaccacccccttaagccaggagccagtgaaccccccatctgaggcctctccaactcgggaccgttcaccacctaagtctcccgagaaacttccccagtcttcttcctcagagagcagcccaccatcccctcaacctaccaaagtttctcggcatgccagctcttccccagaaagtcctaaacctgctccagctccagggtcccaccgagagatttcttcttctcccacatctaagaatcgctcacatggccgagcaaaacgggataaatcacattctcataccccctcccgtaggatggggaggtcccgtagccctgccaccgctaagagagggcgatctcggtctcgaacccctaccaagagaggtcattctcgatcccgatctccccagtggcgtaggtccaggtctgcacagaggtggggaagatctagaagcccccagcgacgtggccgctctaggtctcctcagcgaccaggctggtctaggagcagaaatacccagagaagaggcaggtctaggtcagcaaggcgagggaggtcccactctagatccccagccactaggggtagatctcgttctagaacaccagcccgccggggcaggtcccgctctagaacacctgccaggcggagatcacgatccagaactcccaccaggcgtaggtctcggtctagaacaccagcccggaggggcaggtctcggtctagaacacctgctaggcgcagatctaggacccgatcaccagtacgacgcaggtctcgtagtagatcaccagccaggagaagtggcaggtcacgctctagaaccccagctagacgtggccgctcacgctccagaaccccagccagacgtggccgctcacgctctagaaccccagctagacgcagtggtcgctcacgctccagaacaccagccaggagagggaggtctcggtctaggacaccaagacgaggaagatcccgcagtagaagcttagttagacgtggaagatctcactctagaacacctcaaagaagaggcagatctggctcatcttcagagcggaaaaacaaatccagaacatctcaaagaagaagcaggtccaattcaagcccagaaatgaagaaatctcgcatttcttcaaggcggagcaggtctctctcttcaccacggtccaaagcaaaatctcgcttgtctttgaggcgcagcctttcagggtcttccccatgccctaagcaaaagtcacagacaccacccaggcgcagtcgctctggatcctcccaaactaaagctaaatctagaacgccacccagacgcagtcgctccagttcttctccgccacctaaacagaaatctaagacaccatcaagacaaagtcattccagttcatctcctcatcctaaagtgaaatctggaacaccaccgaggcaagggtccataacaagtccccaggccaatgagcaatctgtaacgccacagagacggagctgttttgaatcatcacctgaccctgagttgaaatctaggaccccttctagacatagctgctcagggtcctctcctcctagagtgaaatctagcacacctcccagacagagcccatctaggtcatcatctccacaacccaaagtgaaggcaataatatcaccaagacaaagaagccattctggctcctcttctccaagtcctagtagggtgacgtcgagaacaactccacggcgaagcagatcagtatctccctgctccaatgtggaatccagattgttgccaagatacagtcattctgggtcctcctcaccagataccaaagtgaaacctgaaacaccgccaagacaaagtcactcagggtctatttcaccataccccaaagtaaaggcccaaactccaccggggccaagtctttctggatcaaagtcaccatgtccccaagagaagtctaaagactcactagttcaaagttgccctggatccctctctctctgtgcaggagtaaaatctagcacaccaccaggcgagagctattttggtgtctcatctctgcaactgaaaggacaatctcaaacttcaccagaccacagatctgatacttcaagtccagaagtgagacagagtcattcagaatcaccatctctgcagagcaaatctcaaacatcacctaagggaggtcggtccaggtcttcatctccagtcactgagctggcatccagatctccaataagacaagatagaggtgagttctcagcgagtcctatgttgaaatctggaatgtctcctgagcagagcaggttccagtctgactcttcttcatatcctacagtggactcgaattctctcttggggcagagtagattggagactgctgaatcaaaagagaaaatggccttaccccctcaggaggatgctactgcatcacctcctagacagaaagacaaatttagtccctttccagtacaggataggcctgagtcttcactggtattcaaagacacacttagaaccccgccaagagaaagaagtggtgctgggtcatctccagaaacaaaagagcaaaatagtgcattgcctacgtcaagccaagatgaagagttaatggaggtggtagagaagtctgaagaacccgcaggccaaatcctgtctcatttgtcttcagaacttaaagaaatgtccacaagtaactttgaatcatctcctgaagtagaagaaaggcctgctgtgtctttgactcttgatcagagccagtcacaggcttctttggaagcagtagaagtcccttcaatggcctcatcttggggtgggccacatttttctccagaacataaagaactgtctaactccccactcagggagaacagctttggatcacctttagaatttagaaactcaggcccacttggtacagaaatgaatactggattttcttctgaggttaaagaagatttgaatggaccgtttcttaatcagctggaaacagatccatctctagacatgaaagaacaatcgacaagatcctctggacacagcagttctgagttatccccagatgcagtggaaaaggcagggatgtcttcaaatcagagcatctcttcacctgtgcttgatgctgtacccagaacaccctcgagagaaagaagtagttctgcatcttctcctgaaatgaaagatggtttacccagaactccatcaaggagaagcaggtctgggtcttctccaggacttagagatgggtctgggactccctcgaggcacagcctgtctgggtcctctcctggaatgaaagatatacctagaacgccatctagagggagaagcgaatgtgattcttccccagaaccgaaagctttgcctcagactcctaggccgaggagtcgttctccatcatccccagagctcaacaacaagtgtcttaccccccagagagaaagaagcgggtcagaatcatcagttgatcagaaaactgtggctcggactcccctggggcagagaagtcgttcgggatcctctcaagaacttgatgtgaaacccagtgcatcccctcaggaaagaagtgagtcagactcttctccagattctaaagccaagacacgaaccccacttcggcagaggagtcggtctggatcatctccagaggttgacagcaaatctcgactatcccctcggcgcagtaggtctggttcctcccctgaagtgaaagataagccaagagcagcacccagggcacagagtggttctgattcctctcctgaacctaaagctccagcccctcgggcccttcccagacgaagcagatcaggttcatcaagcaaaggcagaggcccttctcctgaaggaagcagcagtaccgagtcctctcctgaacatccgcccaaatccagaactgctcgcagaggttccaggtcatcaccagagcccaagaccaagtctcgtacaccacctcgacgtcgcagctctcgatcatctccggagctaacaaggaaggccagactgtcccgtagaagccgctctgcctcatcctcaccagaaactcgctctagaactcccccaaggcaccggagaagtccctcagtgtcttccccggagccagccgaaaaatcgaggtcttcacgccgacggcgctcagcttcatctccacgcactaagacaacctcaaggagaggccgctctccttcgccaaagcctcgtggactccagaggtcccgttcccgctcaaggagagagaaaacaagaacaacccgacgtcgagataggtctggatcttctcagtcaacctctcggcgaagacagcggagccggtcaaggtcgcgggttactcggcggcggaggggaggctctggttatcactcaaggtcacctgcccggcaggaaagttcccggacctcctctcgacgccgaagaggccgctctcggacacccccaaccagtcggaagcgttctcgctcacgcacatcaccagccccgtggaaacgctctagatctcgagcctctccagccactcaccggcgatccaggtccagaacccccctgataagccgacgtaggtccagatctcgaacttcaccagtcagccggagacggtcaaggtccaggacttcagtgactcgacgaagatcccggtcaagagcatccccagtgagcagaaggcgatccagatccagaacgccaccagtaacccgccgtcgttcaaggtctagaacgccaacaacacgccgccgctcccgttctagaactccaccagtgactcgcagaaggtccagatccaggactccaccagtaaccaggaggcgatctcgaagcagaacttcgcctatcactcgcagaagatcaagatccagaacatctccggtcacccgaaggagatctcgatctcgcacatctccagtaactcgaagaaggtcccgctctcgaacctcaccagtgacacgccgccgctctaggtcccggacacctccagctattcggcgccgctctagatctcgaacgccactgttaccacgcaaacgttctcgaagtcgctcaccacttgctatccgccgccgctccagatcccgtactccacgaacagctcggggtaaacggtccttaacaagatctcctccagccatccgcaggcgttctgcatctggaagtagttctgatcgttcacgatctgctactcctccagcaacaagaaatcattctggttcacggacacctccagtagcactcaacagttccagaatgagctgcttcagtcgtcctagcatgtccccaacacctcttgatcgctgcagatcacctggaatgcttgaaccccttggcagctctagaacacccatgtctgtcctgcagcaagccggcggctccatgatggatggtccaggtccccgaatacctgaccaccagagaacatctgtgccagaaaatcatgctcagtccaggattgcacttgccctgacagctatcagtcttggcaccgctcggcctcctccgtccatgtctgctgctggccttgctgcaagaatgtcccaggttccagccccggtgcctctcatgagtctcagaaccgcaccagcagccaaccttgccagcaggattcctgcagcctctgcggcagccatgaacctagccagcgccaggacacctgccattccaacagcagtgaacctggctgactctcgaacgccagctgcagcagcggccatgaacttggccagccccagaacagcggtggcaccttcggctgtgaacctggctgaccctcgcactcccacagccccagctgtgaacctagcaggggccagaaccccagctgccttggcagctctgagtctcacaggctctggcacaccaccaactgctgcaaactatccctccagctccagaacaccacaggctccagcctctgcaaacctggtgggtcctcggtctgcacatgccacagctcctgtgaatattgccggctccagaaccgccgcagccttggcccccgcgagcctcaccagtgctaggatggctccagcattgtctggtgcaaacctcaccagccccagggtgcccctttctgcctacgagcgtgtcagtggcagaacctcaccaccgctccttgaccgagctaggtccagaacaccaccgtctgccccaagccaatctaggatgacctctgaacgggctccctccccttcctctagaatgggccaggctccttcacagtctcttctccctccagcacaggatcagccgaggtctcctgtgccttctgctttttcagaccaatcccgttgtttgattgcccagaccacccctgtagcagggtctcagtccctttcctctggggcagtggcaacgaccacgtcctctgctggtgatcacaatggcatgctctctgtccctgcccctggggtgccccactctgatgtgggggagccacctgcctctactggggcccagcagccttctgcattagccgccctgcagccagcaaaggagcggcggagttcctcctcgtcgtcgtcgtcctctagctcctcctcctcttcatcatcgtcgtcgtcgtcctcctcctcctctggctccagttctagtgactcagagggctctagccttcctgtgcaacctgaggtggcactgaagaggtgagggagcttgacttttagaaatcttcagtgggggaggtattggggatgggttggggagtggggagggagaaaccatgtcacaggtgcttggctcttggaggaggtatggggaccttgaccctcaagctgggggtagaagagaatgctggggcagggggcggagggaggaggaatgggacagataaaagtctccgaaggttcattctctagaggataatgataagttttccgtctctacagaggacagaactagaggaaatggacttaattttacagcaggagggatggcagttagacctcaagaggaactccctgggctggaaggatcttcagaggtcatcccatccctctccctgcctccaggcaggacggccccttccccagccaacctgcactcacaggggcctccccaagctgcggctctccgaggaaggagacgacccagcttcagcttccacacctgagcccagaggccttattcctccatcagggacattcttgaggtttaaccttgatcccttatgctgcgggccccagcctgttgcttctgttagcagaggttgggtcagctcgcaccactgctctccagagaattgctggctcacgtggctcggagagctcccagcgcctttctcaggcacccctccccccactgccgttcctccaggccaaggaaggtagggttggggctggggcagcttgtctccttgtgacactcctctcctcccacagggtccccagccccaccccagccccaaaggaggctgttcgagagggacgtcctccggagccaaccccagccaaacggaagaggcgctctagcagttccagttccagctcctcctcttcatcttcctcctcctcctcctcctcctcttcttcctcctcctcttcctcttcttcttcttcctcctcatcttcctcctcctcgtcgtcttcctccccttcccctgctaagcctggccctcaggccttgcccaaacctgcaagccccaagaagccaccccctggcgagcggaggtgagtgctgtcttgcctgagttgaaaggtgggtgggggagtgacttgtccagagaaggggccctggggtgtgagctccccgctgggtgtctcacgtggccttgggcatctggttgtgggggaggaggcacttgctctcctctccccatgctcgttgcaccctgttctggcgaagggctgcgccatccacagcggcgctcaggccaggaccagggggtccttggtttcttcctctccctccctcaacacatagcctgttcccagggttctagctttgtctccctgttgctactgccagggctctggtctggccaccatcatcttctcccgactctgtccacagcctcctccctgtctccccgtctccacgccattctcttccacatgtagccagagggacctttctaaaacgcacatctggctacttccctccactccacaaatccttcgggacgccctgtggcctgcaggacaaagccccacctctgcgggagtggcgtgtgaggctcttcaccaacgggccttgcccgccctgtgttctcctcctgcccgcccccacacatgccctgtgctccagccacacccagcgccttgcagtctaaggagagcccatgcctttggacatgctgttccttctgcctggaatttccttgtccgcctggtgaactcctcgttctgcaagactccgctcaaaacagcaccttcgagaagactgccctgccccttccctgccttgccccatgtccccctcccttgggtccccagagccacgcacatccagccctgcttcccacacacggggccgtgcgtgcctttcttcaccactgagctccttcaagggcagggactgtctttatctttgcatcccccgctgcaccctgtgcctgcccactgggcactcggtggatggtgtgcgggcggatgggtgagtgagcggacaaaggtgggtctgaggctggccctgtgtggtgtgaggtttggtggtcaggacctgggcgggtggtcctgagtgctggcccgtgtgcttgaaagggtgtggtgctattgggtcctactgtgttccccaggtcccgcagcccccggaagccaatagactccctcagggactctcggtccctcagctactcgcctgtggagcgtcgccgtccctcgccccagccctcaccacgggaccagcagaggtaaggccaactgcaggtgtcagcacccagcctgtctggccgccactgctttctacaaagaagaaagctttgcggttgtggctatgtggtgcctgaggtggtgccaccctgtggcctgatgtctgtcctgtgttgcagcagcagcagtgagcggggttcccggagaggccagcgtggggacagccgctcccccagccacaagcgcaggagggagacacctagccctcggcccatgagacaccgctcctccaggtgcgtgtcctggaaggctgatgcccccttccgggagccagttgtggtggtgggtggcggccccattttgggagtggcccagaaactggccttgagggctggggtgggaactccctgttgacccatatcttctcttgcaggtctccataaattgtctttgggggattccaccacacccaatgctctggagccacaaggagtgtcccttcttccccagcagagccgtgggagggtccttgtctgctctcctttgaaccttggcagcccttggatggagggctccctttccctccccttttttttttctttgttcctgtgaaatgttaatctccgtgagttcttcctggttcatgtgttctggggggtttggggtgggagggaatgcagatgggagttgggggaggggaggatacagttcaggataccccagcctggagtcagggccagggaggcatggccccacttgtatccagaagttcccaggggtgattgtgatggtggttgggactggaggttgtataaggtgttcttggaaggaaggggcaggagttggaattagttggtccctactgtcccccatgaggttgtgaacccctccccccaacttttcatgtttcttaaaggcattttggttttttaaaatctgtacagcaagagcaactttttctgtcaaataaaaatgagaaatgcaggaactgggtctgtagactgtttattaaaggtgtgttaagggggcagccacttccctccgtgattacagcccccagcgtgggtggacctgtgtgggtccgtcttggggttccctcgttgaacatgctgtcaaaccaggacactggctccagcttgtgtttctgctcttggccatcgtctgggagtggacatgcaggctatgggggtggggggcacttagaaggagaaaggcctaaaactggaatctcttgtccctgaggctggctctggtctttgtgtctctcccagtccttccctttcctccccctggcgtggttggtgtggctggctagctgctaacaatggcttgggtctgagggcaacccaggtccccatggtgcctttaagcagcaggctgggccaagttctcagccagggtctcaggatctgggagacaggacagcacaggaactgccaagcacaagccccaaaaggagcccacagggagtgggacccatcccagggaggggcgggaaaaagaggcagcaaccaggcagactcccaaatctcttttattgggggaaatgggcctcttgggggtctcactgcacggcttgttcattggcactgcttcccgagtcctggggcttcatcacatcgggcagctctggcgggctggaaaacggctcgatgcacagggcctcaaaggtgtcatctgtggaggaagcagcagagctgcaggggggtattccagctcttgccccagctggggccttggtgttcacgtgtgatcatctgcagctttggggatctccatgcgaacgcccctccacacggctgtagtctccacagcgctgacctccctgttccagctacccccgtggccccacggtaatgtctcctacccctgtgggcccaacctgaaggtccccagcccttcccactgaccatgctggggcccctttcctcatcttccatgtccactagtgagtctgagggctcaccatctgcagccagcatcacccttcacccagaatatatctccttgttcccttcacacactttgggaggccgagacgggcagatcatgaggtcaggaggtcaagaccatcctggctagcacggtgaaaccccatctctactaaaaatacaaaaaaaaaaaaaaaaaaaaaaattagccgggcatggtggcgggcacctacagtcccagcttctcgggaggctgaggcaggagaatgacgtgaacccgggaggcggagcttgcagtagctgagatcgcgccactgcactccaacctgggcgacacagactccatctcaaaaaaaaaaaatcaaactagactatctagactattcctcccctgctgaaaaccatccagtggcttcccatcatgacctgaataccaccaagtccttgccgtctgtctctccctctgcttcccacgctctcaggctctggctctctatgttctgtaagttctttcctaactcagaccttcgcacttgctggtcccagcactcggaatggctggctgcttctggactttcagggtccaactcaggtcacctcctcagatgaacctccagtccacgcacccccaaaagtcaagacatcctgacactctgggcgtaggggcacttaccactggacaaactgcccttttgactggctccaggaaggcaaaggccttccctgtcttgtccctactgtcaccccaacacacagcaaacaaacccacagcttttctcttgtgctttcttccagctaggagacccatctctgcttggctcagggttctcaactgatcaggcatcccagggaaagctggaatgcctgatcacagttgtggcggtcacaaatggggaggtggggtgctccagcgctatctagtgggtagaggcctgggatacggctccacgtgctatggtgcacaaggcaacccacacagcaatccagcccaatgtgcccactgtgccgaggttcagaaactaatccatcttccaagccacaaacctgtgacaattcgtgccttcactacctccctcattcttttgtgatgagccgggacaatgccctttaacatttgatttgaaatactcatctccttgagtggtaagcttgggggaggggagaggcggagggtggggcacccattcaaggcctgggaacaacatgatgacgggttgagctgcacccagaagtgtgtttctgcaagcattccatggggaagcaaagagctgacagcccatgctgtgccccctatcaagacagccatcacctgcaagagggatgatgtgacctgggctccggagtcaccaccacattccatgccatattaggggttgtgggagaaaaacaagtcaccttccttagccttcattttctcatctgcaaaatgggtctatcagtatcttccaagtcacagcaaacctctaggggtaccactgttgaaattagagaaagggacacttctgggggaacacagcccagcttcggttcacgaagcagaccagatatgctcttggcactcccctgctctcttcagacaggcacccctgggccaggcaccgaggctcaggcctgtaatcccagcactttgggaggctgggatgtatggatcgcctgaggtcaggagtttgagaccagcctgactaacatggtgaaaccccatctctactaaaaacacaaagattagctgggcgtggtggcacatgcctgtaatcccagctcctcaggccactgaggcaagagaatcgcttgaacccgggaggcagcggctgcagtgggctgagatggcaccactgcactccagcctagacaacggagtgcgactctgtctcagaaacaacaacaacaaaaatgcacccatgtacaaggcacgacctgtgtctatgccagccctgcacctgactcttaacatcaccatctgggcagaaagagcccacagaaaggctctgaagcttcccatctgttgggcactggcagcaggccagacctggggtgcatgaggactcaacaccaccttgctgtgaagccagtctcatcacacccctttaaggagaagggaacactggggccaggaggggcaggagggcaaggtagctggccagaggatatagctgctgagactgaggcctagcctgaacttacggaacggaaaggtggagctaggactctactcttcctcttcagcctttgctatgttcccttacaggcagaaaaataagaattccttacaactttatccaagttttctcagccatccacacagctgctgggtccacagctgtgaaaacacagctctataacctctcttcaagttcctagagacaaaatattttaaatctcccctccctttctcttgggtggaagaagatatcttggcgagtagtaaaccactccctaatccccaggtttctaaagcttgggcagggtggggtatggctgatggaagcccaggctctggatctgaatcctagatgtggcagtcccagcagatgacctaacctccccaggctcactttactgaacctgaaaagtggcaaaatccaaatctcagccacacagagatgcagagggtttcggtgatacacagcatagagcctggtatgatgtctgactccagcaagggcccggcagtcagcatcctaaccgtggctccctacgtgactgctggtaagcctgtgtcctcatctgcagaacacggatgatggtatgtggacttcccagggctactgagaggatgagacagggcagtggaagccacacacagagtaacatgcagagcacggagccaggcactcactcagcctcctgtaaatgtgagctggcttcacaaaataagctttggtttctgtaagcatctcatttggttgcttctttttaaaaaaaaaaaaaatgaggaaacaaacacattgtgaaaggatattgccagccctttaggcacgaggaagacactgccctgaaggcttcaactccaggctccctgatgaccttctttggaacagtgttcccaacctgcttggctaccacccagcccagtgggtggtgggcctctcacctgcccggaaggccagccccactgtggctggggcctgtggccgtgctgtttgactggtgaagccacactcgcccagtgtcttgccatcatccaagagttggtcatcctgaggagagaagcaggatcttgggagaggccctacgtggggcaagtcccaaagacttctgaccagcaactacacgggaagtcagaggagggaagagagagttccctcagtgtggcccaggaccaccacgctgcttgacaaatacacagattccagggttatatccaagaacttctaaatcaaaacctcccagggtgggactttagaatccggttttatccaaattctccaggcaaatctaatttgaggagccactgaactatctggagataggcagacctggctttcaatcccagctctgtcaccctggactaggcatttgaacatttttttattttagagacagggtctcgctatgttgcccaggcatgcagtggcacagacccaacataagcgctatcatagccccctccagcttggaactcctgggctcaagcaattctcctgcctcagccttcagagtagctgggactacaggaccatgccaccacggctggctggtagttgagccttttgatgcaaagtttcctcatctgtaaactaggaattaccagaattctcaattcgtagggccaccagagggtttcaatgagctaggaagaaacataaagcactaagtagacatgtggcacacgggacatgcacaggcacggtcatttaatatttgctaagtcccagtagttatgagtgaggaaaggcctttagagaccatgggagctgaggctctgagcctggagctaaaagtcagtttcccagtttccagctctagaatctgaacaatgcacttgggcgacaacctcacaatgttgggagacgtaaatcagaggctgatgcatctgactccccaatgcagaccccaaaccccaagccattctgactgaataatctcagttcgtttgcaaggggaaaggggggcttctaggacatcagcaggaggtcgggaggtaataacaaacggttgcttggtgaagaacgagtgggacctgactttctttgcattcactgagttccccaccctccacccgaaggagtgtccggggggacagcgtgattccgatgggcctgcgaagaagggtggggattaaggggtcgtggttcgaaccctggcgctgccaatgacctttggctggttaagcgaccaagccgaacctcaatttcgtcaactgcacggcgcgggcgataccgttg

SEQ ID NO: 6803 - DNA, 942 bp, Homo sapiens
atcccagctacttgggaggctgaggtacaagaattgtagtgcgtggagatcgtgccactgcactccagcccggggttaggagtgagactctgtcccaaaaaaataaaatagacaaaagacacgaagagaaatttctccaaagatgtacaaacggccaacaagcacatcaaaagattctcagcatcatcagtcattagggtactgcaaacgatgttttgtcactattcacgggcattaaatgtgctgactcacgcacaaaacattccataaagaatatcagtgggggtacaggaaagggtctcactggaggtgctggggtctttaaccagaaaggcaaagcctttgccactttactatgccactccagagttgcggccggcttacagaagcaccgtccatagatgcagagttcagacactccaatctgcgatcagagctcctgcaggagatgggggtggtgggggggagggtctcccggctctagcatctgagataagtacatcctcccacgggcaagtgaaaaacaaatcttaaagccggatgcgggccgggcgtggtggctcacgcctgtaatatcagcactttgggaggctgaggtgggcagatcacctgaggtcaggaaatcgagaccagcctgaccaatatagtgaagccccgtctttactaaaaatacaaaaattagccaggcgtggtggcacacgcctgtaatcccagctactcggaagactgagacacgagaatcacttcaacctgagagacaggttgcagtgagccgacaacacaccattgcactccagcctgggtgacaagtgcgaaaccacgtgaaaaaagaaagaacaacaacaacaacaaaaaacaagggccagatagggtgtcatgcacgggtagtcccagctacttgggaggctgaggtcggaggatcgcttgagccccaaattcgag

SEQ ID NO: 6804 - DNA, 7176 bp, Homo sapiens
agttttacaaaacgcgatttgtaatataaactagttagataactcagagggttttattggccatatttttgtttatgctttgtcacaggctttagtcattgcttccatgtgttttcatccttcaggatatcttcaagaagcctacttatggaccaaacaagttctgaccatcatggagaaatctctggtcttgctcagggaggtgacggatggctccctctatgaaggagttgcgtatggcagctacaccactagatcactcttccaatacatgtttctcgtccagaggcacttcaacatcaaccactttggccatccgtggcttaaacaacactttgcatttatgtatagaaccatcctgccaggtatagtgaggagtcagaagtgtgaaaacattaaactattgtaattttttctgattatgaaaatgagctagactaggcagagaaattaggtccttagagtttgtcatattgaaattaaatagatttttttaatcaaagaaaaattgaattcaagagttgcatatagccagaacattttggaggctaatgtgagtatttatgatttaggtattataaagtttggagggttatggattaaatacaatttctaggcccctcaatactttttttttatatatccaaacttgagtaatatacgaactcatcttcatcattgcaagcaaaatataaacatttgtgattacctgtcagttttcctttatatgtgatccctgatcaatcctattttaatttttggttttcagttttttctttcaaactatacagacatgattcaaaatgaaagattacacctacacatttaagttggagctttagtattttaatattttattgaagtaaatagtatagaaaagtaaacaaaaaaagtgctgtaaaacttgtaatttctttattgctgtgtcatttagccttctaagagaactagctctaaaaaaaatatatacatgatttaataatgtattcatttccagagaactttgtaacctttttttatttctaaaacaggactaagatgttagaacaagttataaaggaaaattttatcaggatagattcccccccttccccaaggaaatgcaatttttagatggtgattctagacctacaacaaataatatagtatttaaatcttttggctctggtagtatacatacagattaatagaatctccattattggactaattcaaaaatattgcagagcataagaaccattttaagatttagtttagacttacattcaaaaaaatactgctttgttgctttttcttagacatgcaggagaggcctgttttgcaattcatcctagtaaacaaaggctacctgaagcaagggacctttaagaggtttcagtgctttgtaatttaagctgagatctaaaggctaactacatcaggaattgtgtttgctgtgagctgtgtctgtggctacttcctaaagtggaaaagacagtatgaacatgtctaagagcagcatttatatgtttgtgttaattaaacaaacttttattgaacatctgtgtgccaggcactgtagtaggcagaggattcaaagaggaataaaacacatctcctgctttcaaggaattcacagactagtagaagattcagaaaatatcattttaaaataaggtatacttacaagatcatttactaaattattaggaacaaaaacattagctgtaaattacataaatataattgtggtaacattttagaagaggttctatgttaaagcaatctgttttcaacttcatttctctctttttttttttttctacagttgatactctagtagcaatttttttgtctggctgagttttctatcttgctgcttcttttttcatgaacacgtggagcatatccagtcttacctgcttttatttttcttccctattccaaaaatgatatatggctttatgatccttgcattttctgtcgtttaacttccagcagtacatactggcaggagctactccaggaattaaattttcttcctgtagaaactcagtctctcccctgaacttcgtatatagtataacttacactttattgaagccaaactgaagcatgttattttattatcttggcctagaatgcatgttgagttgtgggagagctagtgttcattccatgttcagaaacccaaactgcacaagaggatgtcccatgtatatatgcaaatataatcacgtatagcatgaacattggaaaatgaggaaggcagggaataggtgtagcactaatgttaccaaggacaggttaccacataataaatacaagcttgcacacaacatatgtggaagaccttttgagggattctgactaactggtctggaataaaatgtgaggattgtgatttttcttttattttatcccttccattacacaattctaatttgcaactagatttgaaaagtcattgtttagacctatatagtagtgtgaagttttcaaagtatcttaattctttccaacttatttccctagggtttcaaaggactgtggctattgcggactcaaattacaactggttttatggtccagaaagccaattagtgttccttgataaatttgtcatgcgtaatggcagtggtaactggctagctgaccaaatcagaaggaaccgtgtggtggaaggtccaggaacaccatccaaagggcagcgctggtgcactctgcacacagaatttctctggtatgacacattgggctagctttaaagagaaatggtacccaagggtactattcatgctatgcacttgtttttttgcatttaaaaagaaaaactaaaacactttttaaatcttttctccatgccacctgagtatatgaagtttcaattcaactcatatcactgtttttgaaactcttagaaacttttcttttttaaaaaaaaatttcaacttttagatacaggggtacatgtgcagtatacccaggtagtgagcatagtacctaataggtagtgttagaaacatttctttatgtttaacatctaattactgttttcagtttttggttctcatattagagctgtcctacacttgcactatttcataaataagcatgttttgattttacatcattttttgaaagcatataaaacaaaacacaaaatttagactaggttattctgataatcacaccaaaaaaaaggtagtaaaatattttgttttggtaaatggagcattataatcttctaatagcaaagctgttactaaattttcaaaagtgtttaaaagtgtttgacagtatttgacagcttcactttgataataaaaggaccgtataaatttttttgccttaatcttttaagcccagaaagagaagcttgggtctcctttttaaagtattgccaaatatattgttggcatccaataagttaaaatcaaaattacagggaactgattaatcattaatccctgatgtcttttcaagctgttgaaatttgcattcaactccaaaacaagctttcttgtggtttgcttctctttatccttttttttcaaaatacaaaaaaattaaggaggaaaaaatattagtaaaatggtgtctatagtttaaccaacaatttaagattattttcatagataaactaaacatattaagatgcaaccatccttgagttctctcaggagtatgacataattacttaatagtgtaacccataaataagttactcataaatattcaatgaagagagttctataaagctaactacaggattaataggtcagattaatgctaagtctaacttaaaaatctgcctttatagcaatatgcaaactgaccaaaaactgagagtaagatggccaattcagcttacatctacactttttaaatcacattaattaagccaacattatactagacctaagtagagatataatttctgatgtcttgaaactgagactctagaacaacagatgaaacagtcaatatcaaacaccaataagattaactctaggtgattgatttactttagggaaaagtacatagtgctaataataaacatttatcataaatgaaaataagaagtcatttattgtccaagaagcatggcatcatctgcagattaaaacaaaaccaaacctttggacctggctggtcagtagtaggcacaattataaatccctcaatataagacagtttgctgaaacttcatccatttatattctgagatgtggtgttggtgatacattttatctaatatgtgaagttctcctctatttcagtttattttttcaaggaaaaaaatcttgagggagaactcttttcaataccaaacattcaataatatcagttactgcagaactatactttattacaactcaaggcttgttagagtccagattctaacatggcatttctagaagaggagcccctcaaccagaaatttggatgaagtgcttaaatccatgaggcccagtagtttgaatggtcactctgacatcatcaagtgaagatagtccatgtagagattagagcagaaatcatttcgggcccaaacccaaggatcacaaatgataaagaaatattcctcttccagtcaccaagggtttccctttgtgcatactggttgtccttggatatttttagaattgtccctaatatactctgcactgccagtgctctgggtagcatttgtatgccgcatcttccacattaccatgttatgtgttattttcactgccatcagaaaaccatttaatttttcaaaattaatttcaggtatgatggcagcttgaaatcggttcctcctccagactttggcacccctacactgcattattttgaagactggggtgtcgtgacttatggaagtgcactacctgcagaaatcaatagatctttcctttccttcaagtctggaaaactggggggacgtgcaatatatgacattgtccacagaaacaaatacaaagattggatcaaaggatggagaaattttaatgcagggcatgaacatcctgatcaaaactcatttacttttgctcccaatggtgtgcctttcattactgaggctctgtacgggccaaagtacaccttcttcaacaatgttttgatgttttccccagctgtgtcaaagagctgcttttctccctgggtgggtcaggtcacagaagactgctcatcaaaatggtctaaatacaagcatgacctggcagctagttgtcaggggagggtggttgcagcagaggagaaaaatggggtggttttcatccgaggagaaggtgtgggagcttataacccccagctcaacctgaagaatgttcagaggaatctcatcctcctacatccacagctgcttctccttgtagaccaaatacacctgggagaggagagtcccttggagacagcagcgagcttcttccataatgtggatgttccttttgaggagactgtggtagatggtgtccatggggctttcatcaggcagagagatggtctctataaaatgtactggatggacgatactggctacagcgagaaagcaacctttgcctcagtgacatatcctcggggctatccctacaacgggacaaactatgtgaatgtcaccatgcacctccgaagtcccatcaccagggcagcttacctcttcatagggccatctatagatgttcagagcttcactgtccacggagactctcagcaactggatgtgttcatagccaccagcaaacatgcctacgccacatacctgtggacaggtgaggccacaggacagtctgcctttgcacaggtcattgctgatcgtcacaaaattctgtttgaccggaattcagccatcaagagcagcattgtccctgaggtgaaggactatgctgctattgtggaacagaacttgcagcattttaaaccagtgtttcagctgctggagaagcagatactgtcccgagtccggaacacagctagctttaggaagactgctgaacgcctgctgagattttcagataagagacacactgaggaggccattgacaggatttttgccatatcacagcaacagcagcagcaaagcaagtcaaagaaaaaccgaagggcaggcaaacgctataaatttgtggatgctgtccctgatatttttgcacagattgaagtcaatgagaaaaagattagacagaaagctcagattttggcacagaaagaactacccatagatgaagatgaagaaatgaaagaccttttagattttgcagatgtaacatacgagaaacataaaaatgggggcttgattaaaggccggtttggacaggcacggatggtgacaactacacacagcagggccccatcactgtctgcttcctataccaggttgttcctgattctgaacattgctattttctttgtcatgttggcaatgcaactgacttatttccagagggcccagagcctacatggccaaagatgtctttatgcagttcttctcatagatagctgtattttattatggttgtactcttcttgttcccaatcacagtgttagcactgaagctataaattacctggtcattttgtgatcacaagagtctatgcaaaaaaaaaaatttctttaccccagattatcagatttttttccctcagattcattttaacaaattaagggaagatattttgacacaagaaagcaggaatgtggagaaattggagcaggaaaagaaattatcaaagcaatagaaatagcttggtggtcctatggtgtttttggaagtatttggcattgctaattgagcagtccatatagtactacttttagaagaaacaaaaagtctgttttttaaagtaatgttttttcttatgagaaaaaggtttagatagaattgggttttattaatattaatttaatgctattagcaatttccatatactatattgtggaaaagactgaagaatacaattctgagaaatataaaaaaattttaatggtatactcatgttgaaagataaatgttgctaagtcctggtatgatggtgtgagcttccttggggaagtacttcttgagttatgtaactaacaggatgttttactacagatctggatggctattcagataacatggcaaaaaatgatagcagaagatcattaaaaacttaaaatatattttattagaaaacatttatctatgaatgaatatttccttgatg

SEQ ID NO: 6805 - DNA, 140 bp, Homo sapiens
tttttttttttttgagacggagtctcgctttgtcgccctggctggagtgcagtggcgcgatctccgctcactgcaagctccacctcccgggttcacaccattctccttcctcagccccccaagtagctgggactacaggc

SEQ ID NO: 6806 - DNA, 14162 bp, Homo sapiens
cagctcaaatcccagccttctatatggacacaagtcatttattcaatacccaacatgcacgattggctccgccatccttggctcaacaacagggtttccaaccaggtctctctcaggtaatatcaaagacttcttccatcctgtatttgttccttcgcatttctgtggttataatagttatcttggaacataaataatagactctgaaattacaagctacccacgattagcttgatattctataagcaaaatttaaaatttttcccaaatttaccaaagcttgatagtaataatgtagaataagtagtgggttgaaagggaaatttagatgtttacattcagttttgttttaaaatggagctgatatatagtattaatcttactcttttcatgtctcaaatttttatattccagtgttaatgatttatctgtatgatgttgatatatatgtttacatactttctcaatgcattgcagccaacttcagttcagcagattccaatccctatttatgcaccactgcaagggcagcatcaagcccaactgagtttgggggctggccctgctgtttcccaggctcaggaattgttcagctcctcacttcaaccatataggtaaatgctttaaaagttatgtttgtaatgatgttgaaaacattgtaactgctgatcctccttgccgtaatccatactgttccttcccaaaaaaacctaggatgactctgctataaactacattggctaattgagcatgttgattatatgtcatgaacctcagcctctggtaatttcaaccatatcttattaaagaatgtcaggtttcaaaccctcttgaagtagtgaacaacagcaaccccaaaactgttagaaattatagaaagtagctgctaaagaacctaaaagtatgtgtgccatctggctaccaaaaactataaatctgaatctcctctatgtacgagctgaggcatggcagttaactacatcatgttagggggtgcagggcagggtggaatataacagaacagagaggggtaaatatcaaagcatggaagtaatgatgataaatatgctgtgtagtgaagaaagcattttttccaaaaattcactcagatgcactgtaagttacctttgcaactagggaaataatgaaaactgatttttattgaactttccttatatatgatagatattcagcctttcacatacattaactaaatttagtcttcacacaaccacctaagataagtcaccctcatttaacatgtggatgttaggacttgaagaggttgaggctttttttgttttgttttgttttaacctgaggttatacataaagtggcagaccctcagtgtctctggtttccagtttaatgagggaagaagagtgagtaagagtcagatagtaggagcagtgcatcatggcatagctgtcatccatactcatgatggtggccttaaatcatcataaagaaaaataagttacattcaggacacttagtttaggaaggctgtgcatttgtttttaggaatttgttttcagaagtgggttcagatagaatttctatactttatagattaaacctgtcatcagttaatacagtatgttttatattaccataatgatactcctagagaagccaggttcagctaatgaaactttcttaacagagagcctagtcattagtaaacctcataaatgtggcttttatttttaccttttgattaaagatgctttagtaaaatttaagacacctgtatcattacttatatagctgttgtaggtcttccctcctcattttactctcatttaatttcgttattttctcccgttagaagccccaactagaagctaaaggaagtcttgtattgaatttgggattatcttggaatttatattaaaaataaaacttgaaaatttctgacacaggaatagcagctagatttaatctcacaagccagtctccttgtaaattgtattggctgcttgaaacactgttgaaaagtttgcaaccgcttttcagtactgtgaaaaagagtacagtgattaattagtaatgttttccacaggccgtgggaggtggagtagcaatgtactatatttgtaatccccatttcactaattgtcttggaagatatactttttaagaccagacgtggtcaatagaaataaaatgtaagacacatatataattgtggcacttggctaccacattggaaagtacaggtttagattttgaaagcagttattttatccctaaacattccttgcttgttccttaacctaatcagcatagtgtttattagggaatctctgaattggtttctgcaaagacaggatagtttatagcagtatattcatgttttcttacctcgtgtttgaaacataaattataagtaggtattgtaaagactgctatgatcctagactagcattcttccttagtggcttttgttcctgccacataggtcagttttaacaaagcaacaaagcataatgttctttaacccactacttttgatttaggtgcttattctttatctctgcatcttaaaagtgtagactggaggcatccatctcagagatgatagggaagtctggggttagattctggcatattgtggttttgttttgagggggtgtgttttggcttggtttggttttggtttatgttcttgtttgtttgcttgcttaatcttcatgggtaactctgacatgagctactactgtgctttattccatggagatcttgaggctaggccatttatattaaaaatatatgtggggaagtaatgaaatacaaataagaaaagttggggctattggggctatgaattagaatgttgccaaagagaaaaagagattttgttctgaactttgtagtgaacacaaaaagagaattattctcactgttcaaaaggaaagagcaatccacttcttagggagaacaggccttttcacagaacttttacatgtgaagcttccttgtatacagggctttaaatcttgaaacaagttgctttagacacagtctgtattctctgcctcttttcttgatttctgagctaattagagtgcatccaagtatcagtgatggggagacattctgaagtatgcatcctttttcaaacatcatagagtgtacctacaggaacctaggtggcatagcctgcagctatacacctaggctgtagagtacagcctattgtgtctaattaggctataaacccgtgcagcattttactgtacttaatactgtaggcagttgtaacacagtggtaaatatttgtgtctaaacatagaaatctaaacaatctaaacagaaaaggtacaataaaaatatagcatacaagattaaaaatggtacgtaccatgtatagagcacttaccatgaatggagcttgcaggactggcagttgctgtaggtgagtcagtgagtgagtggcgagtgatattactgtacactactgtggactctatactacactgtgggtacactaaatttgttaaaaaaaaaaaaaaacaaatttttcttcaataataaattaacctcaacttactataattttttgactcttataataacatttagcttacaacacaaacacattgtacatctgcacagaagtatttctttttttgtttgtttttttgagacaaggtctgtgtcacccaggctggagtgcagtggcacatacagctcactacctcgaactcctgagctcaagccattgtccagcctcagcttcccaagtagctaggactacaggcacttgctaccatgcccacctaattttttatttttttgtagagatgatgtcttgttctcttgcccaggctggtctcaaattcctggcctcaagcagccctttcacctcagcctctcaaagtgctgggattatgagcatgaacaccatgtctggccttttcttttgtaacgtttttctgttttttaattttttaatttttttttaactttttaaacttttttgttaaaaactaagatgcaaacacacacattaggctaggcctacgcagggctaggatcatcaatatactttcatctacctccacatcctgtcccactgggaggtcttcaggggcagtaacacatacagagctgtcatgtcctatgataacaatgccttcttctggaatacccgctaaaggatctacctgaagctgttttataagttttaagtaaaaagagtacactctaaaataaccagaaaatgtatagtaaatacataaactagtaacataattctttttatcagtatcagatattatgtactgtatgtaactgtatgtactgaactgttaggactgtaggtgtagtaggtttgtttatatttaatactagcaccagcaaaaacacttgagtcatatgttctatgatattagaacagctatgatgtcactaggtgataggaatttttcagcttccttatgatcttatgggaccatcaatatatatgtggtctgttgttgactaaaatgtcatgcagcacatgactgtattgggtcatttgggatttgcattcttaagattttcagattccagatgaaattaacttctaacaatattttctctttaatccttatgtagatctcagccagcttttatgcaaagcagtttatcccagccatctgtggtcctttctggtactgctattcacaactttccaactgtccaacaccaagaacttgccaaggcacaatccggtcttgcctttcagcaaacatcaaatactcagcccattcctatattgtatgaacatcaactggggcaggcatcaggactaggaggttcccagctgattgacacacatcttctccaggtaagtcaggggactagagcaatgcaccctcattgtattcctatgccacagatcattttaaggaaacatttttaaaagaaaacatgttagaagatgcaatgaaaaaaacaaagtcctttcatttatctaatactaaaaattgctagacattgctttgaagtcataatctccacctctgaatttgaaatttttttcagtcttactcatgttttcttaaaaaattttttctaggccagagcaaatcttacccaggcctcaaatctttattctggacaagtacaacagcctggtcagacaaatttttataacactgcccagtcaccaagtgctctccagcaggtaaactatggcatggtaaatttcctcaattttctttattattatttttattgcttttgttattgtttgggaatttaaattgaaccaagatgcaagatggaggatggtttttgaactgttcactgagatgtcctgaagaattccactgggtccacgtagaaggggtttcaggctcatgacacccctcttctcaccaccatcaccccctacttcagtcattcctgtttttttatatcttccaggttttttgttggtttagggggttttgttttgtttttttctgtcacctaggccagagtgcagtggtgtgatcatggctcattgcagcccaacctcccaggctcaagtgatccttgcaccgcagcctcctgtgtagctgggactacaggctcacgccattatgcctggctaatttttcttcgtagtttttgtagagacagggttttgccatgttgccccaggctgatcttgaactactggtttcaagcgatctgcctgcctcggccttccaaagtgttgggattacaggcttgagccaccacacctggctgctttttgttttttgtttttttttaattaagggggaaaaaacaacttaggtttccgtgtaattatttattctattttaacaaaggattcaatgaatataaaaccttgaaaaccattgtccagaatatagttacattaagtgtgatacaggtggtttacccattagtgctagggagaagcctcccaaagaccatctggcaggttagctatacatacaacagtgtggcagactgtgatcgagcataaatgacaaacactttcttaagtgtatgaatgcaataataattttcagtgaaaagtatatggtacgtttaaaactatctctaataatttcattagcttattctttaaaagtggtggagggctggtgggggaacaagtcattagtcattttcttataactgttgttgtttgctattttagggagtgataattcatgaatatcttattgacattcagattaaatatagtgtttatgtgaaaactgagagattcttgttcttctcatagctcattttgaccagccttgaaagtattatgtaaaatgtctgtttggaaacttgtgaatactgcttatattgtgtcctcatttactttgtgattatttgacatgtcctgtggataaattcaaagatagtcctaattctttcagtttctattctcttcactacaagtagcattaactaaactatgttgtacctttaatagaagaatggagatacggttgagggttgagtgtctcttaccgaaatgcttgggaccagaaatgtctcggatttcagattggtttttttttgtgtgtttgcgtatacataatgaggtgtcttggggcgtggggcctgtctaaacatgaaattcctttgtttcatacatactttatacatataacctgaaggtaattttaagcaacattttaaataactttgtgcatgaaacagaagttctgacctcacttcgactgatccgtcgcaggaggtcaggtgttgatttttttttttttttttttttttttttttgagacggagtctccctcatccaggctggagtgcagtggcatgatcttggctcactgcaacctccacctcccaggttcaagtgattctcgtgcctcagcctcccaagtagctgagattacaggcacccaccaccatgcctggctaatttttgtattttattttatttatttatttatttatttttttagtagagacggagtttccccatgttggccaggctggtctcaaacccctgacctcaagtgatctgcctaccttggcctcccaaagtgctgggattataggcgtgagccaccgtgcctggacttggtgtcaaattctctacttgtggtgtcatatcagcctctcagaaagttttggagcattttggattttgattttcagattagagatactcaacttgtcatcactaagcaaaagaaatatgtgaaatatattagtagatggatgtgttctatgtattttattttattttattttattttattttattttattttgagacagagtctcgctctgtcgccaggctggagtgcagtggcaggatctcggctcactgcaacctccccctcctgggtccaagtgattctcatgcctcagcctcccaagtagctgagactacaggcacatgccaccacatacagctaattttcgtattttttttttttagtagagacagggtttcaccatgttggccaggatggtctcgatctcttgacctcgtgatctgcccgccttggccttccaaagtgctgggattacaggcatgagccactgcacctggccgatgtgttctgtttgaaatcttactcaaaagtatttgaagagttgtgtatagttgtatggatatgtctgtagtaaacagaaacaaattgcttcagtttctctttacttattttctaggttacagtacctttaccagcatcccagctttccttgcctaattttggatctacagggcaacctctaattgctttgcctcagactcttcagcccccattacagcataccactccccaagcacaggctcagagtctgagtcgtcctgcacaagtaagccagcctttcagaggattaattcctgctggaacacagcatagcatgattgcaaccacaggaaaagtaagtaaagagacatttgcacaggttatttgagaatttaaggtagtgtgttcagatatatgcatctgtgttatctaaaaaactaaaatgcgtcagtttttaccaccctgcaaaaatctcaaaccccagtatatttacattttatctatttacttttaatgtgtttggccccatctagtttttacctaataacaaagaattcacaaatttattggaagaattggatttatagtgtctcttgggcttatttaattataagtctgtttggtcaggtaattccataatacttgaagcctaactataggagttttgtactaaggttctttgccctttcctagattacgtcttcacgtataggacatgtaaacacagcacttagcttgtggaattaaagaaatgttaagtttattttatgcttctcctcagatgtctgaaatggaactaaaagcctttggaagtggcattgatataaaaccaggcacacctccaatcgctggtagaagcaccacaccaacatctagtcccttccggtaaaatgggcatttaaatttgcttatgaaattccaatttggtcactatttgttaaatacttatcagtcctgtgtgacataatcccttttccaagcagaaaaggaattattaagacattctttttgatagttttgtctaaaatgttaagctcttaaattatttaaaatgtgtgtattgtactatattttaagtaaattcttttgttacagagcaaacctttttttcttttattttttttgagacagagtctcacactgttacccagactagagtgcagtgccatgattatagctcactgcaacctcaaacacctgggctcaagcaagcctcctgcctcagcctcctgagtagctgggactacatacacgtgccaccacacctggctaatttttaaaaaaatattgtccaagctggtctcgaaccagccaatctaactggtaactggtatcctttcttacctctgctcctccaatgtctctcttctaccagaatgttttggtaatcatcatagtaaatttttaccaactaccaagtatgatgaaaataccaagaacggtgtttgcaaaaatctaacagcattatttacttggtattactatactgactagtaatggcttctttccaagggctacttctacaagtccgaacagccagtccagcaaaatgaacagcattgtctaccagaagcagttccagtcagcccctgccactgtgagaatgacacaaccatttcctacacagtttgcaccccaggtgggcagacataattaagaaatgagtattatttacttaaaaatagttgctaatctgataaattattatcttgccttatgttaaccagttaagaagtacagtttttaataaaaaattgtttctgaatttaacaataaatttattttataaagatagtctgcgatttatagccagacatggtaattgtttagttctaaagcagacaagagaaatagttaaaagattccccacacagctctgataatgagtccttttccttttaactttttttaaggagttgacttttcagcgaagggtcccagtgcttgaagttttctaggtttaaagttgttttttgttgttgttaagatatttatgtgcaattgagataaaatttccaaaaagatgttttaatatatgtaaaaaatgttggcttctcttccccttgctgatcgtataaaaggactaagaactctcacaaactagaactggttcctgagaaattcacatttgttgaattagtattggttttatttatcttcagattacatttgttacaggtgtgtgccttttctgcaactaccttttgaaaagatagcctaattaaaagtctttctatccccccttcagaatttacaactgagatgctaggaccaactgaagtgccatagcatgctttgcctagtttttctgttaaactctccaagcatggcctgtttattccttgtccttgttaatggaatggcacaatctgtacacttcctttcactggtaggatgggcacagatttactctgggatgagccaacctggtctagttggcagttttttttttttttttttttttaacagttcaatgttgtatgttttgtttttttcactcagattctctctcagcctaacctggtccctccattggtaagagccccacatactaacaccttcccagcgcctgttcagaggccaccaatggcactggccagtcagatgcctcctccgctgaccacaggcctcatgagccatgctcgtttgccacatgtagccaggggtccttgtggatcactatctggagtcagaggtaatcaggcccaggctgcgttgaaggctgaacaagacatgaaggttagtacagtgttaacagccaacagatcaagaatctgtctctgaaccatgtcttaaaatgcctctggacccataactgtatatccaggcattcattgtcttagcagacttaaccaagctaactacttttattcattcccccttttttttcttttttttcccccattcccattcctttcatcttttttttctttttgtttctttttctttttctttttttttgcaactgtagtcaggaaatgaattaatgtcttaaactgtggccaaatgaattgttatcaaataaatatttgagggagatctgagtttagatgcacacttttttttgaaatagcaaagaagtaatatcaattattatagacttccccattttctttctttttttttttttttttaatatatattttcttcccccctttcccctgactctcctcctcccagcagcttaaaatgtaaatcatggttatatgaaaactctggaatgggtaagatgtgttactatcttagtacttttttccattatgagtcatcaaagtacagttttcttctcaaactgttttcatacccttattggcctaccacatgaggtggttgtattccacagtggattgtgcagttatagatgaagaactcagaaaagcactttgggatccttcatgatgaaaggcactgataaacatgaggtttgctaatgcagaaagagtgcctttaggagtctgtgtggggacagttttgtagcataaaccttacatgtctgccagtacagccagttgaatccgtttatttctatatttactttaggcttgactttcagggatcttagtaatttttgcctgttttgtcactacatatgtcatcagatcagactagaacaaagaaaagcttactgttttcaaacagggaaatgtgcatagtaatgctttactctgaattagaaacatgtttatgataatcctattagaaaatttgattgattgattaaagtgtctttttgggtcgacatccctagtgtttctgatcctgagtaatcaaatttaaagactacccagcagcaaaacttttattaaataattatctacttttattaaggctgtatgcctaggatttccatctgtttgttataattagaaataccagtgtgagtaaaaatcttaggaagttatttggccttggattccagttctactcctggctccttggctcttgattttcgcatattcccatgttggaaataacattagagcttaatagtagtaatggggtgggagagggtacaaacttcttgaaaattgcttcagatctttggatagtacaggttacctatagaacataaagcatttttttaatatgcaagaaggatggaaacttaagttttaattgtgaatgttacagtggtaaaatttacagatttgacgtaagtatatttttgggggcacatagtcaaaactaagaaattatttaccagctcagaatgtggtaggagctatcagaacttagtgatcaagtgaagtcgtagttactaatttctgatgctcttcccctgcagaagagagctgtgggaagaggactcagccacaagacatttggtcctaggtgttggtaatgccacaatataagtgcttccttttcattttattgtagaccacatattgataactagaagttttaagtgttacatgtatgtttttagatttgcaagcaggttccctaaataaaatttaatatgagagggcagaccttgaaaaggtggtgggaggtggtcctgtggtttttttttttttttttaaatcacatgaaatatttcaaaaataggaagaaatctattcattaaaagctcaaagatcaatgaggtacttttggctttggccaaaccagtgtggggaaaactgatttgtgattggtaaaagaatttgaaccaagattgatttgacaggctttggtaatgctgcagtattttcagttgttctttctcattttttaaggcaaagcagagagcagaggttcttcagtccacgcaacggttcttctctgaacagcaacagagcaaacagataggaggaggcaaagcccagaaagtggacagtgattcaagtaaacctcctgaaacactgaccgaccctcctggggtctgtcaggaaaaagtagaagaaaagccaccccctgcaccctccatagccaccaaacctgttagaactggaccaatcaaacctcaggcgatcaaaaccgaagaaacaaaatcttaaaggctatggtttattgcaggggattgggaggggggcgggaaaacatggagaattaagtcagataatgctggcagccaaaggggcaaaatggcctgtgacattatcctgttcagagcttggagatgtacaagggacataggagcaatttacactgacacacagctgctgtaccagtgaaaacgaggctttgcaagcttgtacctactatataacatgtgcttggttgatggccatgcattttcagtcagaatttatatataaatatatgcacccatttttttgagtgcatataatttagacctaaaaatccttatgattaggtgaaacaccaaaaatataaggaaaataacacagcagaggaatagctcagcctgaacagtgtgatggtcccagctactacatcagatgcggtttttttgctcccttatgttcttcggatatggttatggcatttgtaggcttggaggtaaagaactgaagataactggtgctggatagaggagccttattttttattatggcagcttgctatttttataacatggtgattgagttgaacacaatcaaagtacagtagtaactgatgtccccttcttcctggatgaatgagcagataaatattgatgtcagcatccttgaaccatatcaaagtgagcagtgtttggctactgcttctatttgaaatggtgctgtgttttggttgtggtctgaagctttgaagcgctacttagcatctcctttcttccatggagctctcacgattcaaacatgacagatttggtaaaatgctggttaggttgagtcttccttgcccccactcagtcatctttgtatgaatcccatgatttgggggtttttttctttttttttttataccagtttttagctggtgtttatgaagaacagtgagtacctagaactgtgccactaattaaaggaaatcctaagaaggtgcatttctttacagagctgtgtcatgccatcctttgggccctctgctggaaaagtagaatcaagtctcaaataatgcctttttaattgtatcctctagtattatagatataggacagtactgtatcatacctctgtgaatgtaaaatatcttgtacctgctttatgatacgtagtagtgaccgtgctttatcagagctgtttttaatgatgttattatagaatgttttctttccagatgatgattcagaagctaattttaaaaaacggtgccaggtaccacaacagtaacagaactttgcaattttctggggttttgttttttacctttttccccccttttttttaaatggagtgtgctggatgtctctataattttattcagatgactgcagaacctggaaaagctgttgctgctattgatgcataacatactgctattggtctttttatataaatatatatatatatatacatatatatatataatttgaatttttggaaactttagctgtgctgtcaactttggaaaaagtatcccggtttactgtgttgagttggcattgtacagaaattaacagccatattggtctagaaacgttaaacttaatttttttccatttgtacaggggtaacgcactgtattaaatatgtaaggtcttatctacatgggtttgattacagaaactaataaagtattctctaaataatgattcttgg

SEQ ID NO: 6807 - DNA, 664 bp, Homo sapiens
  SITE (335): n equals a,t,g, or c
gtctcgtcgtaataatatgtggagttctgcagaacatactactatataaaaacagcgagtcagctaggcaccgtggctcacgcctgtaatcccagcactttgggaggctgaggcgggcacatcagttgaggccagcagttcaagacccacctggccaacatggtgaaaccacgtctctactaaaaatacaaaaattggttgggcgtggtggcgcacactcagctgctcatgtagctgaggcacaagaatcgcttgaacccgggaggtggaggttgcagtgagctgggatcaatcgtgccactgcactttagcctgtgtgacacagcgagactgtngtctaacacaaaacacaaacaaacaaaaacagcaagtcaccaaatattatgtatcatacatagaagtgtgtttaaaaaaaataccacccttttaaaattaaatgtcaatcctctaaatattttgctagattctagtaggtaggtttaaaattggagtagaattgctggttcaatgggtagattcattttcaattttagtagattatgtgaaattttaccactgacaaaatctgcgtatctataccccattggcggtatataaatttttttttcatgccttcacaagtactagttatgtttgtgtgtacctgtctactagaagttttcca

SEQ ID NO: 6808 - DNA, 986 bp, Homo sapiens
gaaacccacagaaaatactgggctttatggagcaatccatttgaagagattgctgaattctgaactactgagaaagcacagagaattacaagcatcaacattattttaaagtagaaaagccaatgtaggaaatataaaagctatgttaccgtgctccttaaaatcaggacaaagttagttccaaacatcatcctgtgtgttattcaaaaaatctgatgctctctgcagatctatgaaggagcaactggctcaatttctcaaggtcacttctagcttccggctcctgcttcttctaacttggatgggtttggggattgcccccctgaccctgtgctatactgcaataacctaaacaaggactcagcagtttcccttagttttcactgcagaccacttatcaaaggcatgtgtgtgcaggacaggcttcaccgaaggtttgaggagccagaggggtttacattgcaccttgagctggaaaagtaaaatattggcagtctccgtccttcaaaaacagcaggtattttgtaactcaggctcctgccttctccctgtagctcacccttttttcttttcctcatttctttgacccatccttcccaaaggcaaaaaaataaaagccagaaccactctttccattttattactcagaatagttcagctatctccaagctgaacccttcaacacagctgtggtcttcctctgaatattagcagaagtttcttattcaaaggcctcctcccagaagaagtcagtgggaagagatggccaggggaggaagtgggtttattttctgttgctattgatagtcattgtattactagaaatgaactgttgatgaatagaatatattcaggacaatttggtcaattccaatgcaagtacggaaactgagttgtcccaaattgatgtgacagtcaggctgtttcatcttttttgtttattttcaatgcctaataaacagagatcctaaaaaaaaaaaaaaaaa

SEQ ID NO: 6809 - DNA, 989 bp, Homo sapiens
gaaacccacagaaaatactgggctttatggagcaatccatttgaagagattgctgaattctgaactactgagaaagcacagagaattacaagcatcaacattattttaaagtagaaaagccaatgtaggaaatataaaagctatgttaccgtgctccttaaaatcaggacaaagttagttccaaacatcatcctgtgtgttattcaaaaaatctgatgctctctgcagatctatgaaggagcaactggctcaatttctcaaggtcacttctagcttccggctcctgcttcttctaacttggatgggtttggggattgcccccctgaccctgtgctatactgcaataacctaaacaaagactccgcagtttcccttagttttcactgcagaccacttatcaaaggcatgtgtgtgcaggacaggcttcaccgaaggtttgaggagccagaggggtttacattgcaccttgagctggaaaagtaaaatattggcagtctccgtccttcaaaaacagcaggtattttgtaactcaggctcctgccttctccctgtagctcacccttttttcttttcctcatttctttgacccatccttcccaaaggcaaaaaaataaaagccagaaccactctttccattttattactcagaatagttcagctatctccaagctgaacccttcaacacagctgtggtcttcctctgaatattagcagaagtttcttattcaaaggcctcctcccagaagaagtcagtgggaagagatggccaggggaggaagtgggtttattttctgttgctattgatagtcattgtattactagaaatgaactgttgatgaatagaatatattcaggacaatttggtcaattccaatgcaagtacggaaactgagttgtcccaaattgatgtgacagtcaggctgtttcatcttttttgtttattttcaatgcctaataaacagagatcctaaaaaaaaaaaaaaaaaagg

SEQ ID NO: 6810 - DNA, 418 bp, Homo sapiens
attagttacaaccaggcaattaaaaatctgtccccaaaaaatggcaaagcagataaatctctcagacagacatccataccatgtttgagtatttgtttttcttattctggaatagaaggtaatcgacaattattgggaggagaaagaaacctgtatttgtggaaaaagaatctcccttagtgtttgttttacaatcctgcagtacttcctatttctcttcgaaattgtcacctttaaaaagttgaggttgcctcatgtgctctcagtcattgaggatctagattgcagcttctccaggacttctgtttctcccacctctccagcctctcacttctggttcatctagaaaccagatgtgagatgtatgtgtgtaacaaagccaacatctctctctcacacacacacacacacacacaca

SEQ ID NO: 6811 - DNA, 209 bp, Homo sapiens
agaagaagcaaaagaaaaaacaccaaaattgtgccttcatctttcaaaggttcttaaacttctagttgcataagaatgtccccaaagtttttagttcaagaggtctgggatggaactcaggaattggaatagctatcaagtttcaccagatgattctaatgcaaggtgttcctggatcacattaaaaagtactgtagtcagacgggcgc

SEQ ID NO: 6812 - DNA, 420 bp, Homo sapiens
attagttacaaccaggcaattaaaaatctgtccccaaaaaatggcaaagcagataaatctctcagacagacatccataccatgtttgagtatttgtttttcttattctggaatagaaggtaatcgacaattattgggaggagaaagaaacctgtatttgtggaaaaagaatctcccttagtgtttgttttacaatcctgcagtacttcctatttctcttcgaaattgtcacctttaaaaagttgaggttgcctcatgtgctctcagtcattgaggatctagattgcagcttctccaggacttctgtttctcccacctctccagcctctcacttctggttcatctagaaaccagatgtgagatgtatgtgtgtaacaaagccaacatctctcacacacacacacacacacacacacacaca

SEQ ID NO: 6813 - DNA, 209 bp, Homo sapiens
agaagaagcaaaagaaaaaacaccaaaattgtgccttcatctttcaaaggttcttaaacttctagttgcataagaatgtccccaaagtttttagttcaagaggtctgggatggtactcaggaattggaatagctatcaagtttcaccagatgattctaatgcaaggtgttcctggatcacattaaaaagtactgtagtcagacgggcgc

SEQ ID NO: 6814 - DNA, 13001 bp, Homo sapiens
ggccgggcggtcgcagggactccggggcgaccgccgcgagtccgcagtagttcgggccatggaggcggagccgccgctctacccgatggcgggggctgcggggccgcagggcgacgaggacctgctcggggtcccggacgggcccgaggccccggtgagcggggacccggagtgcgaggcgcgggcgtcccctgtgggccagggtccccccggcgggggcggggcgggccggggggcggcgggcaccgggggacacgggttcggggcgcgatcgcgggtgcgagcggcgtgcgtggctcgcagctggacgagctggtgggcgcgtaccccaactacaacgaggaggaggaggagcgccgctactaccgccgcaagcgcctgggcgtgctcaagaacgtgctggctgccagcgccgggggcatgctcacctacggcgtctacctgggtaggtgccgctcggggacccggggccgccccgcccgctcccagcccggcccgggaaacagaaaccgcgggccgccgcctcccgcccgctctcacttcccctccgctgccctcgcagctgcagccacggccccccgcggcgggggtggggttggggggtcaagtagcgcagcgtccccgggtcccagccagagcctcggtgtgggtgggggacgggggtccgggctcccggacagacctgccaccgtcagaattggaggccggcggagcaaggcgggtgggggtctgggcttagctggccaagtggccgcgggctggcagaaggcgtggcgcagcccgggaaccccgctgtcctgaggggcgctgtcagcgggaatgccttcggtgattggagctccctgcgaggcctgcatgccgtcttctgctcggtggcgcccaaagctaggctgctccctgcacgccgctctctgtcctgtccccaggcctcctgcagatgcagctgatcctgcactacgacgagacctaccgcgaggtgaagtatggcaacatggggctgcccgacatcgacagcaaaatgctgatgggcatcaacgtgactcccatcgccgccctgctctacacacctgtgctcatcaggtgggcgcggctgctcctgtgggatgctgcggtactcccatttcggaggggtacagaggccggcgggccaggaggtgtccatctgccggggtgtttgtggggcgagggaacaagggagaggtttttttctacccggaagcctgagagtgaagggggtgaaactcggatttggggaaggaaacaggaactttgcctcagggcacatttggtttccagcaacagattcacacgggctgagctccctcccagcttgcctgggcctcacgtggcaccctcctcgtggcctccttggaggcctcccagagccactgtggccttcagggttggggctgtagagttaggggtttctgatcggtcagcaaagtccaggcacccatgcctggcccagtcgctgtgactggtgctgagggggtgtttctcacagacaggcatggctgggcaggtgccccagagctctcccccagatctgagccctggaggtatgtggttcagcctccccatcaccggtccacagtgccctccctgatgggacctggagaccagtggacaaattaggtgaatttgagctccctcatctttaaaacaaacaaacaaacaaaacaacaagagaaaactccatttaaacaaaaatttgaaaatttaaaacatctcccgttgcacaggcaggattagaataactgaaatcataaaaaagaaaccccatctaagccctccaggaaatcggctacccatgctgtcccaccagcatgcatggattacattcacatccttgtccccagagcacgtgtgtggacgtgcccgtgtgtgtgtgtgtgtgtgtgtgtgtgtgtgtgtgtatgcaagcgggctatgtttgcttttgcttgcttacttttttttttttgagacagatacttgctctgtcacctagactgcagtgcagtggtgtgatctcggctcactgcaacctctgcctcccaggctcaagcgattctcctacttcagcaccctgagtagctgggattacaggcgcctgccacccggttaatttttgtacttttagtagagatggggtttcactatgttgaccaggctggtcttaaactcctgacctcaagtgattctcctgccttggcctcccaaagtgctgggattacaggcatgagccacagtgcccagagcttgcttccttcttttcactgagcatatcttagcctactctacagccttcacagttacgactttgcaatggtagcatcttctgcagatacggtggcactgaacagtggcttggaattggacactgcagttccttctgtgcttacatctgtttccttgttttttttttttaaattatgtgtttatttattttattattattattatttgagacagagtctcactctgtcacccaggttagagtgcagtggcacgaacacagctcactgcctcctcaacccccacacactgggctcaagcaatcctcccacctcagcctcccgagtagctgggcctacaggcgcacgccatcacatctggctgatttttaaagtatttgtagcgatggggagttgctatgttgctcaggccagtctcaaattcacccgccccagccccacaaagtgttgggattacaggtgtgagccaccacatccagcactcccccaattttttaaacaattatttttcctaggatacattttcaacaatgtctttactaggtccaagccatacaaaaggctttatggcttttgaaacctatcacttctactaatagcagtgaactcttgtctcctgtctgcccgacactctattttatttatttatttttatttttactttttttttgaaatggagtctcactctatcaccaggctggagtgcaatggcacaatctcggctcactccaacctctgcctcccaggttcaagcgattttcctgcctcagcctcctgagtagctgggattacaggcgcccgccaccacgctcagctaattttttgtatttttagtaaagacggggtttcaccatgttggccaggctggtctcaaacttctgacctcaggtgatctgcccacctccacctcctaaagtgctgggattacaggcacgagccaccacgcccggccgtgctgggcactttataagcgcaatttcattcccaataatttgaggaagctgctccagtcttagacatgaagaaaccatggtgttaaacaacttgcccaggtcccacaggcagtaactggcagactgaaggcttgaaccccagtagagggactcaaatccacatgttcaccccctgccaaaactaccaggctgctttcccaaagggttatgccagtgtgtgtgaccactggctatatgtgccactttttttttgagcaatcttgctgttgcccaggctggagtgcggtgacgcgatctcagctcacggcaacctccacctcctgggttcaagcgattctcctgcctcagcctcccaagtagatgggattacaggtgtgcaccaccacacccggctaatttttgtatttttagtagaggtggggtttcaccatgttggccaggctggtctcaaacttctgacctcaggtgatctgcccacctccacctcctaaagtgctggaattacagatgtgagccactgtgcctggcctatatgtgccactttcaaaccacatcctcaccagcagtgaatgcacatttttactggcatttttacttaaggagcataaatacagaaaacttgaagataccagtagtggtttttggcctgatcagcctccatgggtggttgagccctcatcctgtcactcaccaagccccttctattgtcactgtgtgaccttttcccagacccagagaggtggaaacttcctgactgaccaccatggttcataaaagcaatggactggaggcaggggtgccgggactctggctctgctgctcccagcagtggggcctcttcctttctcttctcccagcctgagtcaagcccctgggccctacagacacagtgcatgagcttgggaggagaagggggaatgggagaatcagagagcccagaacacgcatgagggctggttacacccatgggtcactctccatcctcacagtggtgatgagaggcctgtggtttgggctccgtgcccatattacagctgggaaaactgaggcacagtagcttgcctgaggccactcagcaagtctgtgtatctgatattccatctcagtgccctcgactctctctacctcacaaagccctgtgagctgggacctgcggttgtggccccgtttggcttcaggccacagtggtccagcaggcctgtggtgccagcatctctcccactgtccgcaggttttttggaacgaagtggatgatgttcctcgctgtgggcatctacgccctctttgtctccaccaactactgggagcgctactacacgcttgtgccctcggctgtggccctgggcatggccatcgtgcctctttgggcttccatgggcaactacatcaccaggtgagcctggtgggcagcagggcaggaggctggagacctggccaagcctccactttattgccaactttggctgggggaccacaggaagccccttccgccctctgggcctcagtttccccacaccggggctggtctgctcctagctctgggtgcaggacacacaggagtggcacaggtcgggctggggagagccttctctcctttgtggtccaggatggcgcagaagtaccatgagtactcccactacaaggagcaggatgggcaggggatgaagcagcggcctccgcggggctcccacgcgccctatctcctggtcttccaagccatcttctacagcttcttccatgtgagtgccacgtgggccattgttgggtggcaggggcagacccacgcattggagcccatccacagtctcaaccctctagtcccactttctttcttttattattgttatttttaagaggcctggtctcactatgttgcccagatggctttgaactcctgggctccagtgatcctcccaccttggcctcccaagtagctgggactacatgcgcacaccactgtatctgccccaccttcatttctttttctttctttcttttttttttggtgggggttgggggcagggtcttgcactgttgcccaggctggagtgcagtagtgcagtcacagctcactgcaaccttgaactgctgggctcaagtgatcctcctacctcagccttctgagtagctggcatcatatgcgtgtgctaccacacccagctaattttttattttttgtagagataggatcttactatgttgcccaggctgcccatcttcctttcttgagcccaccccagcttgctcatccatagagatagagatctcatctgcccttttccacaatgctggccaggaggaggtcttcctcattgggcggccctgtaaccacactactcccagaactgggaaggcccctgttcccccaaggctgtgcctggacccctccccagaccatgcctgtgtcccttgcctggctctgtgcctgagtctggtcccaactgcccttgtttctgcagctgagcttcgcctgcgcccagctgcccatgatttatttcctgaaccactacctgtatgacctgaaccacacgctgtacaatgtgcagagctgcggttagtccttgttgggggttggggaggagtccacaaagcctgcttacttccccagcagacactgggccctcactcacaggattcagggctggcagcccagtgccccacggctctggtgggcaagacacagggccctgtaggagtaagtagttaggacatctgacccagccaggagagtgggtgggcggggaagactgcctggagaaggcaccatctgggctgaggctgccagtgggatctttcttggggccaggcaaacagtcagagctcaatcagtgcagggggtgtgcatggaaatgtgaggtccactgagccttggggaaatagggtgggaagcaggggaaagatgcccctttcccggggaacacccagccccagtggtccaaacccagccccagtggtccaaacctccaaactgctctctgaaggaactctgcccttgctctcactctcccgccctccaccgctcctccgcggcctgcgtggctccaccctggtggctggattgactgtgtgccctactctctgctcacggtgccctcacccccacccttcccaggcaccaacagccacgggatcctcagcggcttcaacaagacggttctgcggacgctcccgcggagcggaaacctcattgtggtggagagcgtgctcatggcagtggcttcctggccatgctgctggtgcggcccgggatgggggcaggacagtcagtgaagcagagtgtggttctggggaccgagtctgcgagaaagggtctggatcggatggcatggcctgggtcgggttgtggcctcggggcaggccgtaggcctgggagcgcgatctgagttggggagctagggccgagtgctgcagagcgggcatgaggctcggaggcggggctgaggcctgtggtccgaggcaggcgtgggcatccagaggccaggggaaggagggaacaggcttggtccacagtttcgagctggagacaagatcttagaagactgactgagacctgtgagggggttggggacaggaccaagggtgagggctggaaggtgtggctcaaactggaagtgatactggacggcagaactaaggcgttggcatgctgcagcctggcgatggagctgggaggcaaggcccagtccgtggctgtgtcaggcggggcctagtgctgggacgcggggccgaagtctgtgggtgtgtccgaggggcggggactagcctggaaggcggggctgaggtctggcgcggggctgagaaggaaggttgaagtctatggatttgtctgaatgtgagttgtgaagtgtgtgtatgtgagagagaggggatggggccttgggctgggaggcaagaccaccgtctttcggagtgtggtggcgtggctttgtgctgagaggcggggccttgagctgggataaggcaagacctgggtctgtgggagtgtctcaggggcggggccctggtttgggaggcggggccgagctggggcaaggcccaggcacgtggtgcatctgaagggcggggctgaagcctggaggccaggcctgggcctggctggccgccccttcaagtaatgggttcgcaggtgctgggtttgtgcggagccgcttaccggcccacggaggagatcgatctgcgcagcgtgggctggggcaacatcttccagctgcccttcaagcacgtgcgtgactaccgcctgcgccacctcgtgcctttctttatctacagcggcttcgaggtgctctttgcctgcactggtatcgccttggtaagtacagcctgcaaaggattgcccgacaaaagacaagatagccaggtaaatttgaattcaagtaaacaaagaataatttttaattacatatgtaagtgtgtacatgtatatcccaaatatccccctcctgctttctcttccctctcttacccccgtcccccctttaccttgggcaagttattttaacttctctgaatcgaaatgggatagcacccacagagtgtttagttccttgtggggtacagcccacggtgtctagggacattccaagcattttcacacctgccctcagaaccttcccctgagccttggagcgaggtcaggcagtccagggagggcagggtgtggcctaaggaacacctcttgtggggagtaagagccagcccttctccccacctggctcttactccccgtatcgcggggggcccctctccccaccctggctcttaggacccccatcgcaggggggtaaggcacccccccgcgatgcggggagtaagagccaacccctcttttccccccgactcttaggacccccatcgcaggggggtgaggcaccccccacgatgcggggagtaagagccagaccctcttcccccctggctcttaggacccccatcgcaggggggtgaggcacccccgcgatgcggggagggctgagactgtggtctgggctgttccagacttcaacactcaccccttgtccccccgcagggctatggcgtgtgctcggtggggctggagcggctggcttacctcctcgtggcttacagcctgggcgcctcagccgcctcactcctgggcctgctgggcctgtggctgccacgcccggtgcccctggtggccggagcaggggtgcacctgctgctcaccttcatcctctttttctgggcccctgtgcctcgggtcctgcaacacagctggatcctctatgtggcagctgccctttggggtgtgggcagtgccctgaacaagactggactcagcagtgagtatagctgtgggcactgggggggggggggcggggcagggggctttatggctatctgtgggtggttggcgagacatagacatcccagggacagatatggggtcccatggtcacatagggtcctgtggacatggcagaggcaggtggggcttcctgtggacactccgggggtggaagggaagtcttatggacacactggggacagatgggtagggtgtggacaccctggagacaggtatgggggttccatgccatggacattctgttaataccccagagcgggcacagggccccatcaacactggagggtcagtgtgaagtctcgtggctacatggggcaggtgtggggctctgtggacaccccttagggacagtgtgaaaaacacatcagggattctcccttttcataccaggggacagggcttaccctggcatagttttcatgacacttggagcagatgttttggtctctgcttcacggagcatgtggtaggagcaagtggcctgttgtacacccatggcatagatacagacatgggcctttgtatagagaggagcaggcctgcagccccaacccagtctgctcagtaccagagtccaggccccaggtctgggctgctggggaacagggccctgtttgcagaaggcagcgggtgggcccatgttcagctccaggatgctccctgaccacagatgggcacacgcagtgaaacacagctagcacacatgggcagtcctgccgggcatccatgtcagtgtctgttctgatgggccgaagctgtgaacagttttgaacgtcatccttgggggtgtggagtagccgaggtcatgcctgctgctggcagggcggaggctggctctgtgtctctgtctgtagcaggggctggagcctcatactgcaccacagtctcttggccgttttgcccaaggatagccaattctgggcagagtccagcctgggtatcttgaacccatgttgtgccctgtctggtcctggcatcccctctgcccagctccatatcccatctcctccggtgaaccccggggggtccttgtctcttcatagcagcactgtgggggtaaagtcaccctgcagggccccaaaacaggagtgttcatatcctgagtgcctggtgaaggtgttaatagtggcccctatgatttggcaggtgccatgcccactttctcactttagaacttcagaacacagcacacaataggcataagctcatctcaccattgggaaaagcagctctggggagttaagtacccaaatcacccacagagccaacattacagccctgagaacgagcgtgcatcttctgactcccaatccattactcttgttgcccaccctgggaggactcactggaaaggaatcccccctctccatgcttagcttcaggtttgatttgcagagttggcagctgcaaacagttcgatctctctagtcctggctgaggaggagaaacagcgcctgcaagcttggcactgcacacctgggttggggacaggacatgactaagcacagagctttcttcttttgaggccacgcatgtggtgcggagcgggaacacctgcatccacacagcccgaggcacctgctcctacttctgcttagcgtgtgagcagtgtggtgaccagggtctccaccagggggcaggccaggaccgcctcacagcactttctaggcgctctctggtccggggctgggacccatacagggcttagtaaagttcgtagatggtagctcggtagccccaggccccaggtgacacctctcccctgcctgccctgtactgcctgcctgcagcactcctgggaatcttgtacgaagacaaggagagacaggacttcatcttcaccatctaccactggtggcaggctgtggccatcttcaccgtgtacctgggctcgagcctgcacatgaaggtgagactgggcagggttgggggccccatgcccaatgacaggtacttccttagcccctgccctggcttcacagcttcctaaatgccaccccttcccaagccagtctctgggccaaggccccattcctgcagcccactgggtggcccccaactcagcaccccacttactggcccacctccagccagtctcagtttgcccatctctgaggggatttgtgggtgcatcacagccatcctgtgggctgtttggtaccttgttctccagatgttgggtctgtctctcttcatggcctgaaggggagcaggctcctcatgctctgctcacaaaaaatggtggctcggtctagcaagtcccagttgctaaacattttttaaaaatagaactaaaggccgggcgcggtggctcacgcctgtaatcccagcactttgggaggccgaggcgagtggattgcctgaggtagggagtttgagaccagcctgaccgacatggtgaaacctcgtctctactaaaaatacaaaaattagccgggcgtggtggcaggtgcctgtaatcacagctactcaggaggctgaggcaggagaatcacttgaactgggaggcggaggttgcagttagccgagacggggcgttggcactccatccagcctaagcaacaagagcgaaactccgtctcaaaataaaaataaaaatagaactaaaaatagcagggagtgggctggcagtagtggctcacgcctgtaatcccagcattttgagacgctgaggtgggggttctgagatctggagttcgagaccagcctgggtaacaggctgtgaaactctgtctctactaaaaacacaaaaattagctgggcatggtggcacgtccctgtgatcccagctactctggaggctgaggcacaagaatggcttgaacctgggagatggaggttgcagtgagccaagatcgcgccaccgcacttcagcctggaggacagagcgagactctgtcttccaaaaaaaaaaaaaaggaaaaaaaaaaaagaaaagcagtgagtgggctgggcatggtggctcacgcctgtaatcccaacactttgggaggctgaggcaggaggattgcttgaggccaggagttcaagaccagcctgggcaacataggagaccctgtctctacaaaaaatttaaaaaatagctgggcgtagtggcgtgtgcctgtagttccagctacttgggagactgaagtgggaggatggcttgagcctggaagattgaggctgaagtgagcgtgccactgcgctccagcagtgggtgggggaagggagggagggggcgcggtggggaaacggagcgaccgtgtctggaaaaaagaaaagagcaggaagtatgcatacagatatgtgtgtatgtactgggctatggtgtgaaatcattcctgactgcgggttatagtcaaaaccccatgaaaagcatcactacagcccacgggtgtgtcagggacacagtgttgtgagccctgggaaggcagggcctgtggccagcactttatcaacactggcgcatgcaccctatgaggcaaagggatttgcattgtccccttacagtgtgggacactgaggtcgccaggggcgtggcgactgtaagggacagtgctggatgtgagcctcgcctgcaggaggcggtccaggaagcatgggtggaggggctggagaagttgagggccgcgtggcccgggaggctcccggaggagggaagggcctatctcagcgaggggcataggcggggaaggtgcggggcgaggcggccgcgggtccctggcatccctctccttacgcccaggctaagctggcggtgctgctggtgacgctggtggcggccgcggtctcctacctgcggatggagcagaagctgcgccggggcgtggccccgcgccagccccgcatcccgcggccccagcacaaggtgcgcggttaccgctacttggaggaggacaactcggacgagagcgacgcggagggcgagcatggggacggcgcggaggaggaggcgccgcccgcagggcccaggcctggccccgagcccgctggactcggccgccggccctgcccgtacgaacaggcgcaggggggagacgggccggaggagcagtgaggggccgcctggtccccggactcagcctccctcctcgccggcctcagtttaccacgtctgaggtcggggggaccccctccgagtcccgcgctgtcttcaaaggcccctgtctcccctcccccacgttggggacgcccctcccagagcccaggtcacctccgggcttccgcagccccctccaaggcggagtggagccttgggaacccctcggccaagcacaggggttcgaaaatacagctgaaaccccgcgggcccttagcacgcgccccagcgccggagcacggtcagggtcttcttgcgacccggcccgctccagatccccacagctctcggccgcggacccgggccgcgtgtgagcgcactttgcacctcctatccccagggtccgccgagagccacgattttttacagaaaatgagcaataaagagattttgtactgtcctga

SEQ ID NO: 6815 - DNA, 728 bp, Homo sapiens
catccatgccagggaagtggtgtgaagggaatcacgtgggctgcccagcacgctcctgtgtcagtgcaatgcggggcaacaatattccaagaggttgtttcagggagttccagttgagagcaatatttattctcttctgcttgcttttctgcaaggaacatcgattattttcataatgagaactgaaagtaaaggcttattatagagaaaagcattggcaaacagtgagcacggggggatctggccaccccttcctggggatgtgactgtgcactgttgcaacctggatgggttggtggaggtgctggccctgctcagatctctgtcccgcaggtcaccctggtgtgtttatctgggccaccctatcagcctcttagatagtctccaggctccccaagagcagctccataaaccacctaaaaaaaaaaatcctttctggagagaggaggtgtatcagtcagggtttagtgcctccagggctgttttttgttttttttgttttttgtttgtttgtttgtttgagaggtctcactctgtcacccacgctggaatgcagtggcacaatctcagctcactgcagcctcatcctcctgggctcaagcaattctcccacctcagcctcctgagtagctggggctacaggtgtccaccatcacaccaggctagtttttgtattttttgtagagatgggttgggggggggggtttgtctcactttgttgaggctgg

SEQ ID NO: 6816 - DNA, 13001 bp, Homo sapiens; identical to SEQ ID NO: 6814

SEQ ID NO: 6817 - DNA, 728 bp, Homo sapiens; identical to SEQ ID NO: 6815

SEQ ID NO: 6818 - DNA, 13001 bp, Homo sapiens; identical to SEQ ID NO: 6814

SEQ ID NO: 6819 - DNA, 728 bp, Homo sapiens; identical to SEQ ID NO: 6815

SEQ ID NO: 6820 - DNA, 2235 bp, Homo sapiens
ggccaggcatggtggctcatgcctgtaatcccagcactttcagaggctgaagcgggtggatcacctgaggtcaggagttcaagaccagtcaggccaacatggtgaaaccccttttctactaaaaatacaaaaaattagctgggcatggtgatgggcacctgtaatcccagctgtttgggaggctgaggcaggagaatcgcttaatcccgggagctggaggttgcagtgagctgagatcatgccattgcactccagcctgggcaacaagagcgaaactctgtctaaaaaaaaaaaaaaaaaaactttttggggagatatgctttcatttctcttgggtaaatacctatcagtgaacttgctgggtggtatgtatggtaagtgtatgtttttattttataagagactatttttggtggcttttaacatatactttttttgctttaatgctacagttcctagtaatgttgactaagtgtggattttcttttttaaaatcctgtttgggatttattgtatttggattctgtgagttgttttctcataagatttggaaaaactctgcgttctcttcttcagttactgcgttttgtttttgccctccctcttttgcaattctaattgaacgtagacctttttactccctttcatgtcttttaacctcttttttctgttttccttttctttgcctctctgtgctgccttcagattatttcattagaactatctgtcagtttcctaattctctttttggctttgtctcatctgtcattagaaatatctactaggggccaggtgcggtggctcaagcctgtaatcccagcactttgggaggccaagaggggggatcacaaagtcaggagatcgagaccatggccaatatgatgaaaccccgtctctactaaaaatacaaaaagtagctgggtgtggtggtgcgtgcctgtaatcctagctactcgggaagctaaggcagagagaattgcttgaaccagggagttggagcttgcagtgagctgagattgcgccactgcactccagcctggagacagagcgagactccctctcaaaaaaaaaaaaaaaaaaaaagaaaccttacaaaatgcatttaatcagtctttcttgttttctatattttatttctttgaacatattaaatatggtcatttcttagtctgagattctggtaggtctttttcaatatctaatgtttcttttggttctttttccttctaccttgttgaattgtatgtttaggtttcttttcttctttataagtttgtatgtggaaattatgtggaaactccaggagctgttgcttttgagagtcaccattatagattgaatcctcaagggcttttggaccaccaaaatgacatgaattcaggctgcgaatccatgtgatttgatggccggtttttaataccagtttgtgagtggtgctacttttcaccatcttagagctaaggtttaaaatttaagacagttggcttttctttttacgtgttttttttttttcttttgtggtgggagtgtttctaggacctatatactgaagatgtagtactggagtttcatctttttgagagggaaatcaccttaatgccagttcaaggtttttctcctgtccttcatcgcctttgagatgggaaaatctgtacccaaggtcacctggtttagcaaatgttttcaaagtgaaaggtagcttcagtctttagcttatcacatagggatcccttcttcatttgatactttgcctttatccttgctttcttatccacttaatgacaaacttaaaatattttaatatatgtaacaattgtaaatatttaatatatgtaaaagttgtaaatagttctgtggggtggatacttagcctaccatgtttcctacaaaatgtgttttttaatgcaaacttactacccctttaacccttttaaggtagatctacctatttcctccttattgcttccactgtcttcttggcttagctgtagtacaggggatcctgtgaatcatctttgaatccttgctttgtatacagtggacattcaaggaataaatcacaatggaagattcttaatttggactccataatgtatataaggaaattaacccagattaaaagatcaattgcaaatccagaaaaatattttcaaaaaatgggttaactggtggattcatgtatgtatgtgtatacaaattttttaacatgaaaatttataccgtaaaaaaagaaaa

SEQ ID NO: 6821 - DNA, 307 bp, Homo sapiens
cttacccacatttttaccactttaaaatttttcattaccttttgtgtctcagaccttctgttgggatcacgtcgtttagtggcgtgtacttgcatgtgcacttgtgcacatgctgtcttgctctccctccccgaaagtgtctttattttgtaaacattcttaaaattagtctctttctctggttacttttaaaaaatcaactttattgagttaaaatttgcatacagtaagtttcacttaagttcagtgagttttgacacatttatacacctatgtgactaccacccattgagacagaaatatttct

SEQ ID NO: 6822 - DNA, 6958 bp, Homo sapiens
agatgctagcttggccaagtctgttatgttcacctgaaaaagtcttagcagagaattttgcattcccacccaaaagccctctcagccactcaaatgcctatcttctccagtctacaagttacatgttcccacccagcattacagttcttgaacatgttatttctccacttactggtttaagttggttttagtcactggataagtattataatagagctacttagctgtggttttaatacccttctgttaacaatttgcaggcaaattaatggccttttctaacatagttcaacccaccaaagacctcgacaccatcgttaccttgaaaccgattatggatcatgcccacaaggatccaagctactggctgcatcgaggtgaggggtgaagggtctgtgctagatcaaaaggcacggggtggcgatgtggcagagaagttgcttgtggggagaccttgcttttaacaggcttctggaaaagctagggaaaagtggttgcccgctttccccctttccctccccttcaagcaccgcttgagatttgggctttattattaagagctgctataaaaacagcttgcttaaatgttaagagaagcccaggggtacttcaaaagcattccttcggatgcttcactccagaaagagggagttgaggcaagtcctcattactaataaaaatcaggtgaggctgacacttctcttgaccttaggataatagcgctttgttgtctctcctgccacaggaaggctccatggttgtcctactttaagccttcggtgcctttagtgaggggtacctgaaaaatcttaaaaaaaggcttagcgcccacctcacccctccacccccacgccaacacagtttgctcacatgccagttactccagcataaagctgaaatctattcaatactattgtcccataactgatctgactttgtatgtaaatacagaaaaagcttgttcacctgttttcctcattttgtccactggtgaattcaactggaagctccttctatagtctgaagaataccatctgaaagaactagtggttcccaatccccacatttaaaatggaatgtttggtttatttaaagtaaataggctattttttcttactgggtctggcttctctggcccttcgcatacgtgtgtctgctgagtgttcctgcatgtaagaattaagaccaagggaggggagagagaaacccacacataaacaatgcactaaagatcactgaactgtttaaacatttccacttgccagtttaatttcttgaagactgttgcttgtttggaatgtttcttgtcactgattttaaggttgcatctggaaaagactaaaggcttcagtcccctcccaccaccagaaatgaacaaaaagcattttacctaaaaatacaccagcaaaatgtactcagcttcaatcacaaatacgactgcttaaaactgcagaaatttcctcaacactcagcctttatcactcagctggattttttccttcaacaatcactactccaagcattggggaacacaacttttaatcatactccagtcgtttcacaatgcattctaatagcagcgggatcagaacagtactgcatttacttgccaacagaacagacagacctgaagtcaagacaactgcattctctgtgaagtctgtaaaaaaaaaaaagctacaacaagtaagccccaccccctcctcccatccctccaaattccaggaaaaaaattttgagtatgctgataaactcactgcaaggtctcatacactcactagaacagaaggaagagccaagcactcatatgcaattcaaaatcctgaatggcttcatgaaggatgaaatgcctctgcaaaggaaaattctttaaaaccccacaggcaccccctcccttccctatataaggtcaatagtgtaaaacattgcctaccactctaagattgtaagcatttaaagttaacatgcaaactttggaaatgtgaaaaagtattactctaatcactgtcaatttatagacccctgactttctggaaataaaatgtgtaattaccttttactctgatcataatctcccacctgtctaagaggttatttattccttatttagagggcctctattgccatgtgcctggaattattatatgctcatcactttatgaagaataaaattgtctttcctgccttaaagttacattcgttcttccgctcaaatcctgatctggtccattaaagagtgttcgcagacaaagtttctgaaagattagagaagaatcccccccaagatagccccaacactgaactacagacaaacactattttatttaaataaggagacagctttctaaaagtatacattctctaataaaaatagtttattattttgaatgatttaatggttttctacacaatttacatcacaacatgtaaattttagcagtaacatctgattctaacagcacatcatgctattcctttcatagagccttcagagattcaatgctaaacaaatttccttagttggcatcaaggcactgatcactttagaggcttttaagaaattatttaaagatgcaaatgcctctgagtgaagtgtactatcccatcactgaagcccacaggaacaagtcctacaattttaaaaaggctcgatggaaaaatttctcaatcctgaaatcccctagggaaggggtcaggagaaagtgccatggttgatatttaagaactccacagctcttaaaaataagcacttatccctaacatgcaatactgcagatgcaagttaaacttatctgttaacagctgcctgctgttttctgctcccagatgaaatgaagcaactcttctgataacgaagagatacctgtctgaggcaaacgaaacattggcacacagcacagcctcctcaatccacttgatcccaactcatctctcatttatttcggcttcttttattccaggattaatgtagtgtaacattttcatttcttttcgcttttattctgcttttgtaaaagcagtattttgagatggacattgcctcttcattgtatttctcatcaattcattatttttgtggttatagcttgacaagcaattaactttaaaatggtagattccgtaactttaaattggtagctttcatttgcttaaaattttttggcatatgcagataatgttctcatcagtagtaagaatctcagggttatgcttattccccaatggaggtatgacatataatcttttctgcctttacttatcaattcaccaaggagctgttttctctgcatctaggccatcatactgccaggctggttatgactcagaagatgttatctgaaaaaagtctatagaaaaaaaaaagtttcccctccctcatcaacaaaagcccaccctctaagagacattcaagctgaactatcacaattcttaatcagttacaatttacaaacagataagtttaaaataaacaatttacaaaatttttgaagcataccttaacatcttgtttggcagttaaacaatggaaaagtatttctcctacactaaaaaaaaaacttgcttacacacaactgaaaatagaatcttacttgataatacaaaagctaccatcagaagaaatcccttcaggatcattaagccacttcctttgctctgcagtttctatagtagttttaaattattattaaatcacctgaaaaaaattccaaaagagaaccacacactaccatatccaaacaacttttgcatttcccataattgtagttaatgtcagcccagtaggccagaccaacccccagttcaatactttccttccccaaaagctctatactttgaaggaaaacagatacagtatcaaattatgacactttccttgcccaaattaatgcactggtacacccagtggctcatatttaacttcccccagcttcccaattcaaactggggggaaaaaaactaaatcattgggagttacttgccaacttggaagttgatatttctttactttttccattctaagactttaagttctctggcatgagtttatctgcaatcataaactaaacaattacctaaacccaccccaccaatcccaaccgtaacaggccactgccaactaattgccaatatttgcccctcccctttaataaaacttttaagaagtcacattattggaaaacttaacttcaacatttggcctactcaagctcttctgaagttctcctgagatgactgaatatgaaccaaagctgcactgtgctgtacttttcagcttcaactgggaatactcttccaaggataaaagcagctccagtccctgaaggtgttcgtgccaacagcacagcggtacactccttctctaacccagtttgtcaatagtactatagcatctgtggaaaatcttagaaaaaaacattttctcccccaccctctctcttccctgttaagaccatcccaaaatgcttcaagtaaaaaataacaagtttaaggggttaagcacttttaaagtctgattaagggggtggggggaaaaaagagtaactaccagccatttctccaatggacatctcttccacagacctcaacgtgagaactgctctagtttctataaactgtaaacctgtggtggtctgattatcctgatattggattttcttgttttctgttacaccttgagtcatttgcctttaggattctagacagacctaagggaaaaagaactgaaaacatattttgcccccacccccacaaaaaaaaatactgaaaactcccccccgcctcagttacacatccaaactctacatttacaaaacgaattcagggtgaggaagtaaaaacaggtcatctattcacaaaactgaaatacttcattaccccaactaaacatacaaactgcttacagatttgctgaaattgtctcaatttggctatcaaattcatttggttttcctcaaattcgtgtaaaaaaaaaaaacccacaaacttgccatctactatttctccaggacttggcagtctgccctcaaaagcttcagacaagattcatgagtataagcctgaaaagagaacctacacacccggaaatcggcctacgtccccatataaatccctttacacctcagtacgaaactcccccattatattagaaaataaataaaaggttaccataagtaagttccagaaaaacaacatattgccgacctcacggatttttaccaaccactcgctttccctgtggccttggcacactggcatgctggtctaggatcctctacgcacaacgcctgctcgcctcctccgtgtggttgccaagccaagccgcctgctaccttcatcaccaaattgcactcgctccttcctggaatcctttttcctagcttcaccaccaaatcgttagcgctccttccttcttcctagcttccttcaccaaatcgcactggctcctggactcttttcctatcttcaccacgaactgctgcttgctcgcttgctcctcagtcctagcttcatcaaacactggttcctggaatcctgtctgctgctgtcttcctagattcactgaatccacttctgtgtagcacctgggtcagctgtcaattaatgctagtcctcaggatttaaaaaataatcttaactcaaagtccaatgcaaaaacattaagttggtaattactcttgatcttgaattacttccgttacgaaagtccttcacatttttcaaactaagctactatatttaaggccttccaaattcttctaactcttccaaaagccttctgccttagttttttttaaattacaccagtccttttagtagctttttgatgtgatttttaaccaacttccccttctagcttcaagtattcttctaaattggttctggtctacgtaaacaccctcatcttctcaagctttaccttctaacttctgcaccaccagaaattaaattgatgggcttttaaaataaattggttaccaataatttcctcattttttcagtgctattttatccaatttttggctttatatttttctatcttctatacttctccaatacttgtcttagcttgtttttcattttctatctgaaactcttgacaatattttcattttctatcttgtttctatcttccaattttcttctaagtttgtacattttgcccttagctttttgtttcctagcttgtcttttttcttctgcttcctacttttcaggtttaaatttatcttttttcttctaaaagtatgtttttatcttctaatttccctatcttctctattcttttcttcgccttcccgtacttctgtcttccagttttccacttcaaacttctatcttctccaaattgtttcatcctaccactcccaattaatctttccattttcgtctgcgtttagtaaatgcgttaactaggctttaaatgacgcaattctccctgcgtcatggatttcaaggtcttttaatcaccttcggtttaatctctttttaaaagatcgccttcaaattattttaatcacctacaacttttaaactaaactttaagctgtttaagtcaccttcattttaatctaaaagcattgcccttctattggtattaattcggggctctgtagtcctttctctcaattttcttttaaatacattttttactccatgaagaagcttcatctcaacctccgtcatgttttagaaaccttttatcttttccttcctcatgctactcttctaagtcttcatattttctcttaaaatcttaagctattaaaattacgttaaaaacttaacgctaagcaatatcttagtaacctattgactatattttttaagtagttgtattaatctctatctttcaaagagaaaaaaacttatctgcggtttcctcaagctccgcctgccccctcagcagaagcccctgcgctggctgcctcaatgcctaccgcacagctcgggcgaggcg

SEQ ID NO: 6823 - DNA, 7514 bp, Homo sapiens
caagcccacagaacacccatcttttttccccaatcaagatttttttattcacaaaagaaccacaacaatttagagcttctccatttttattacacaaaattgttaagttttcagcagtagggcttctcaaaacaccagctgcaggctattacctgaaaaagacaaggcagttatattaggttctcgtgtaatatgaatatacaatcaagtcaagctcctgacaaattatacatcaaggatgtatatagttcaaagatattgtgctgttacctcccacctccccaaaactccaagaactagcacctgcagagaaaaggagaaatacagaaagagtcctgaagacagattagtagtcaaagcaaagacgccgcagggatttgaaccccgtcctgggaaccaggagtgccaaccaccagcatcttttgctttttttttttttaagctagaaaaaggccaaaaagcaaaacctgagaaaacaatacgtgttgttttctcaggaaaagaaaaaccttcatgaccctactgaagagcattggagatcagcttccgctaagatgctagcttggccaagtctgttatgttcacctgaaaaagtcttagcagagaatttttgcattcccacccaaaagccctctcagccactcaaatgcctatcttctccagtctacaagttacatgttcccacccagcattacagttcttgaacatgttatttctccacttactggtttaagttggttttagtcactggataagtattataatagagctacttagctgtggttttaatacccttctgttaacaatttgcaggcaaattaatggccttttctaacatagttcaacccaccaaagacctcgacaccatcgttaccttgaaaccgattatggatcatgcccacaaggatccaagctactggctgcatcgaggtgaggggtgaagggtctgtgctagatcaaaaggcacggggtggcgatgtggcagagaagttgcttgtggggagaccttgcttttaacaggcttctggaaaagctagggaaaagtggttgcccgctttccccctttccctccccttcaagcaccgcttgagatttgggctttattattaagagctgctataaaaacagcttgcttaaatgttaagagaagcccaggggtacttcaagcattccttcggatgcttcactccagaaagagggagttgaggcaagtcctcattactaataaaaatcaggtgaggctgacacttctcttgaccttaggataatagcgctttgttgtctctcctgccacaggaaggctccatggttgtcctactttaagccttcggtgcctttagtgaggggtacctgaaaaatcttaaaaaaaggcttagcgcccacctcacccctccacccccacgccaacacagtttgctcacatgccagttactccagcataaagctgaaatctattcaatactattgtcccataactgatctgactttgtatgtaaatacagaaaaagcttgttcacctgttttcctcattttgtccactggtgaattcaactggaagctccttctatagtctgaagaataccatctgaaagaactagtggttcccaatccccacatttaaaatggaatgtttggtttatttaaagtaaataggctattttttcttactgggtctggcttctctggcccttcgcatacgtgtgtctgctgagtgttcctgcatgtaagaattaagaccaagggaggggagagagaaacccacacataaacaatgcactaaagatcactgaactgtttaaacatttccacttgccagtttaatttcttgaagactgttgcttgtttggaatgtttcttgtcactgattttaaggttgcatctggaaaagactaaaggcttcagtcccctcccaccaccagaaatgaacaaaaagcattttacctaaaaatacaccagcaaaatgtactcagcttcaatcacaaatacgactgcttaaaactgcagaaatttcctcaacactcagcctttatcactcagctggattttttccttcaacaatcactactccaagcattggggaacacaacttttaatcatactccagtcgtttcacaatgcattctaatagcagcgggatcagaacagtactgcatttacttgccaacagaacagacagacctgaagtcaagacaactgcattctctgtgaagtctgtaaaaaaaaaaaaaagctacaacaagtaagccccaccccctcctcccatccctccaaattccaggaaaaaaattttgagtatgctgataaactcactgcaaggtctcatacactcactagaacagaaggaagagccaagcactcatatgcaattcaaaatcctgaatggcttcatgaaggatgaaatgcctctgcaaaggaaaattctttaaaaccccacaggcaccccctcccttccctatataaggtcaatagtgtaaaacattgcctaccactctaagattgtaagcatttaaagttaacatgcaaactttggaaatgtgaaaaagtattactctaatcactgtcaatttatagacccctgactttctggaaataaaatgtgtaattaccttttactctgatcataatctcccacctgtctaagaggttatttattccttatttagagggcctctattgccatgtgcctggaattattatatgctcatcactttatgaagaataaaatttgtctttcctgccttaaagttacattcgttcttccgctcaaatcctgatctggtccattaaagagtgttcgcagacaaagtttctgaaagattagagaagaatcccccccaagattgccccaacactgaactacagacaaacactattttatttaaataaggagacagctttctaaaagtatacattctctaataaaaatagtttattattttgaatgatttaatggttttctacacaatttacatcacaacatgtaaattttagcagtaacatctgattctaacagcacatcatgctattcctttcatagagccttcagagattcaatgctaaacaaatttccttagttggcatcaaggcactgatcactttagaggcttttaagaaattatttaaagatgcaaatgcctctgagtgaagtgtactatcccatcactgaagcccacaggaacaagtcctacaattttaaaaaggctcgatggaaaaatttctcaatcctgaaatcccctagggaaggggtcaggagaaagtgccatggttgatatttaagaactccacagctcttaaaaataagcacttatccctaacatgcaatactgcagatgcaagttaaacttatctgttaacagctgcctgctgttttctgctcccagatgaaatgaagcaactcttctgataacgaagagatacctgtctgaggcaaacgaaacattggcacacagcacagcctcctcaatccacttgatcccaactcatctctcatttatttcggcttcttttattccaggattaatgtagtgtaacattttcatttcttttcgcttttattctgcttttgtaaaagcagtattttgagatggacattgcctcttcattgtatttctcatcaattcattatttttgtggttatagcttgacaagcaattaactttaaaatggtagattccgtaactttaaattggtagctttcatttgcttaaaattttttggcatatgcagataatgttctcatcagtagtaagaatctcagggttatgcttattccccaatggaggtatgacatataatcttttctgcctttacttatcaattcaccaaggagctgttttctctgcatctaggccatcatactgccaggctggttatgactcagaagatgttatctgaaaaaagtctatagaaaaaaaaaaagtttcccctccctcatcaacaaaagcccaccctctaagagacattcaagctgaactatcacaattcttaatcagttacaatttacaaacagataagtttaaaataaacaatttacaaaatttttgaagcataccttaacatcttgttttgcagttaaacaatggaaaagtatttctcctacactaaaaaaaaacttgcttacacacaactgaaaatagaatcttacttgataatacaaaagctaccatcagaagaaatcccttcaggatcattaagccacttcctttgctctgcagtttctatagtagttttaaattattattaaatcacctgaaaaaaattccaaaagagaaccacacactaccatatccaaacaacttttgcatttcccataattgtagttaatgtcagcccagtaggccagaccaacccccagttcaatactttccttccccaaaagctctatactttgaaggaaaacagatacagtatcaaattatgacactttccttgcccaaattaatgcactggtacacccagtggctcatatttaacttcccccagcttcccaattcaaactggggggaaaaaaactaaatcattgggagttacttgccaacttggaagttgatatttctttactttttccattctaagactttaagttctctggcatgagtttatctgcaatcataaactaaacaattacctaaacccaccccaccaatcccaaccgtaacacgccactgccaactaattgccaatatttgcccctcccctttaataaaacttttaagaagtcacattattggaaaacttaacttcaacatttggcctactcaagctcttctgaagttctcctgagatgactgaatatgaaccaaagctgcactgtgctgtacttttcagcttcaactgggaatactcttccaaggataaaagcagctccagtccctgaaggtgttcgtgccaacagcacagcggtacactccttctctaacccagtttgtcaatagtactatagcatctgtggaaaatcttagaaaaaaacattttctcccccaccctctctcttccctgttaagaccatcccaaaatgcttcaagtaaaaaataacaagtttaaggggttaagcacttttaaagtctgattaagggggtggggggaaaaaagagtaactaccagccatttctccaatggacatctcttccacagacctcaacgtgagaactgctctagtttctataaactgtaaacctgtggtggtctgattatcctgatattggattttcttgttttctgttacaccttgagtcatttgcctttaggattctagacagacctaagggaaaaagaactgaaaacatattttgcccccacccccacaaaaaaaaatactgaaaactcccccccgcctcagttacacatccaaactctacatttacaaaacgaattcagggtgaggaagtaaaaacaggtcatctattcacaaaactgaaatacttcattaccccaactaaacatacaaactgcttacagatttgctgaaattgtctcaatttggctatcaaattcatttggttttcctcaaattcgtgtaaaaaaaaaaaacccacaaacttgccatctactatttctccaggacttggcagtctgccctcaaaagcttcagacaagattcatgagtataagcctgaaaaagagaaacctacaacacccggaaatcggcctacgtccccatataaatccctttacacctcagtacgaaactcccccattatattagaaaataaataaaaggttaccataagtaagttccagaaaaacaacatatgccgacctcacggatttttaccaaccactcgctttccctgtggccttggcacactggcatgctggtctaggatcctctacgcacaacgcctgctcgcctcctccgtgtggttgccaagccaagccgcctgctaccttcatcaccaaattgcactcgctccttcctggaatcctttttcctagcttcaccaccaaatcgttagcgctccttccttcttcctagcttccttcaccaaatcgcactggctcctggactcttttcctatcttcaccacgaactgctgcttgctcgcttgctcctcagtcctagcttcatcaaacactggttcctggaatcctgtctgctgctgtcttcctagattcactgaatccacttctgtgtagcacctgggtcagctgtcaattaatgctagtcctcaggatttaaaaaataatcttaactcaaagtccaatgcaaaaacattaagttggtaattactcttgatcttgaattacttccgttacgaaagtccttcacatttttcaaactaagctactatatttaaggccttccaaattcttctaactcttccaaaagccttctgccttagttttttttaaattacaccagtccttttagtagctttttgatgtgatttttaaccaacttccccttctagcttcaagtattcttctaaattggttctggtctacgtaaacaccctcatcttctcaagctttaccttctaacttctgcaccaccagaaattaaattgatgggcttttaaaataaattggttaccaataatttcctcattttttcagtgctattttatccaatttttggctttatatttttctatcttctatacttctccaatacttgtcttagcttgtttttcattttctatctgaaactcttgacaatattttcattttctatcttgtttctatcttccaattttcttctaagtttgtacattttgcccttagctttttgtttcctagcttgtcttttttcttctgcttcctacttttcaggtttaaatttatcttttttcttctaaaagtatgtttttatcttctaatttccctatcttctctattcttttcttcgccttcccgtacttctgtcttccagttttccacttcaaacttctatcttctccaaattgtttcatcctaccactcccaattaatctttccattttcgtctgcgtttagtaaatgcgttaactaggctttaaatgacgcaattctccctgcgtcatggatttcaaggtcttttaatcaccttcggtttaatctctttttaaaagatcgccttcaaattattttaatcacctacaacttttaaactaaactttaagctgtttaagtcaccttcattttaatctaaaagcattgcccttctattggtattaattcggggctctgtagtcctttctctcaattttcttttaaatacattttttactccatgaagaagcttcatctcaacctccgtcatgttttagaaaccttttatcttttccttcctcatgctactcttctaagtcttcatattttctcttaaaatcttaagctattaaaattacgttaaaaacttaacgctaagcaatatcttagtaacctattgactatattttttaagtagttgtattaatctctatctttcaaagagaaaaaaacttatctgcggtttcctcaagctccgcctgccccctcagcagaagcccctgcgctggctgcctcaatgcctaccgcacagctcgggcgaggcg

SEQ ID NO: 6824 - DNA, 1728 bp, Homo sapiens
tccctgtggccttggcacactggcatgctggtctaggatcctctacgcacaacgcctgctcgcctcctccgtgtggttgccaagccaagccgcctgctaccttcatcaccaaattgcactcgctccttcctggaatcctttttcctagcttcaccaccaaatcgttagcgctccttccttcttcctagcttccttcaccaaatcgcactggctcctggactcttttcctatcttcaccacgaactgctgcttgctcgcttgctcctcagtcctagcttcatcaaacactggttcctggaatcctgtctgctgctgtcttcctagattcactgaatccacttctgtgtagcacctgggtcagctgtcaattaatgctagtcctcaggatttaaaaaataatcttaactcaaagtccaatgcaaaaacattaagttggtaattactcttgatcttgaattacttccgttacgaaagtccttcacatttttcaaactaagctactatatttaaggccttccaaattcttctaactcttccaaaagccttctgccttagttttttttaaattacaccagtccttttagtagctttttgatgtgatttttaaccaacttccccttctagcttcaagtattcttctaaattggttctggtctacgtaaacaccctcatcttctcaagctttaccttctaacttctgcaccaccagaaattaaattgatgggcttttaaaataaattggttaccaataatttcctcattttttcagtgctattttatccaatttttggctttatatttttctatcttctatacttctccaatacttgtcttagcttgtttttcattttctatctgaaactcttgacaatattttcattttctatcttgtttctatcttccaattttcttctaagtttgtacattttgcccttagctttttgtttcctagcttgtcttttttcttctgcttcctacttttcaggtttaaatttatcttttttcttctaaaagtatgtttttatcttctaatttccctatcttctctattcttttcttcgccttcccgtacttctgtcttccagttttccacttcaaacttctatcttctccaaattgtttcatcctaccactcccaattaatctttccattttcgtctgcgtttagtaaatgcgttaactaggctttaaatgacgcaattctccctgcgtcatggatttcaaggtcttttaatcaccttcggtttaatctctttttaaaagatcgccttcaaattattttaatcacctacaacttttaaactaaactttaagctgtttaagtcaccttcattttaatctaaaagcattgcccttctattggtattaattcggggctctgtagtcctttctctcaattttcttttaaatacattttttactccatgaagaagcttcatctcaacctccgtcatgttttagaaaccttttatcttttccttcctcatgctactcttctaagtcttcatattttctcttaaaatcttaagctattaaaattacgttaaaaacttaacgctaagcaatatcttagtaacctattgactatattttttaagtagttgtattaatctctatctttcaaagagaaaaaaacttatctgcggtttcctcaagctccgcctgccccctcagcagaagcccctgcgctggctgcctcaatgcctaccgcacagctcgggcgaggcg

SEQ ID NO: 6825 - DNA, 396 bp, Homo sapiens
ctgagccccgggggccgttggctgccagtggcccactctgatctgcggccccccagttgccgccagccccccacggcccgcacggaaatttttctaccgtttttcagcttccaggctctcctgaaagtgctcacaaggcaaatcgccatggaaagcgagttcaagtggccttttaaagtagaccaactaagcgaatggctttgtctccgaagacacagagaccttgggcagccagtcagggacacacccagaagtgtttacactgctctgggtctgcttttttaggggtttttgttttgcagattctgtgttatgcctggttaggtatgagcttcagaccttctgaaccggagcaggaagaaaaataaaagctttcctccaaaccccaagaccaaa

SEQ ID NO: 6826 - DNA, 396 bp, Homo sapiens; identical to SEQ ID NO: 6825

SEQ ID NO: 6827 - DNA, 7010 bp, Homo sapiens
  SITE (5395): n equals a,t,g, or c
gataacctgggactgaccgttccctggggatccgacgggccccagaggacccacgcctgagccccgtgcgactcgtggcctttgggctagaagccatggacgccttcacccgcttcaccaaccagacccagggccgggaccgactcttcaggtgagtcaggtgccagcggcctccgcccctttctcgccctaactcggctcccgtgcctattcccctgcacccgggaaaaaggaggtgatagcctagtagatggaagcaggaaggacgttgccagctcctacggagggagtttagtatccgagcccctccttaccctaaattcaacgtgagtgggcccaacgcacccgcgtcccgtcctagccccgtgcacgaaagccccagtgcctggcaccctagccgcctcgagaccgccgacgacgggacaccggctgacagatcctcctcccctcctaactttgctctccgggcacagaaagattggttctctccactcaacattcttccgagggatctcctttaaagagaaactttggattagtatttgtggctagggaagcaaaccacttggtgtgacttcaaatatctctcttttttttttcttttgagacggagtctcgctctgtcgcccaggcagtggcgcggtctcggcccactgcaacctctgcctcccgggttcaagcgattctcctgcctcagcctcctgagtagctgggattacaggcgtgcactaccacgcccggctactttttgtatttttagtagagacgggggtttcgccatgttggccaggctggtctcgaactcctgacctcaggtgatctgtccacctcggcttcccaaagtgctgggattacaggtgcgagccaccgcgcccggtctcaaatacctcttgaaatgtttgaggagagacagaagttctcttccattattacccaggctgtatcattgagatactgcatgtggaatagttttgtaaattgtaaaacaaaatatagcggggatgagaccacaccaactggattggggggaaatacagtggggagaagctcagaaagaactaactgcacctctaaggttcatgctgtgctactgaaaatattaaacagagattgtgtctctttttcttttggttccataagaaacgaaaagaactgagagattgtatctttaatacgaatacagtactagttcatgatgttttagagatttggttgattcttgcttaatgaaaaaatatttacagttgcagttttatttaacagctctgcattctcttctgggtgtgcaagtgctgatacaaacagatcaattagaatggccccaataatgaggcttttggaagccatctttatgacagctattgttcccagtgttttgcaactatgaacttatataaccctcatcacaaccctatgaggtagatactctaaatattttacccacttcagatggagaaactgaagcagaaagaggttaataggtactacaatggcagaactgagggattcacatccacgcaaatgactccagtgcccacttaactaccaagctatactggctttctcattagtttgataggttttttaaatggttactttatatacaagcttcattaaatagaaatttcattaaatagaaacctgtaattccagtgtacctagaatgtaccctgcagggtttatcaaggaagttggttaaaaaaataatcatttaggccgggtgcagtggcttacacctgtaatcccagcactttgggaggctgaggtgggcggatcacaaagtcaggagatcgagaccatcctggctaacatggtgaaaccctgtctctactaaaaatacaaaaattagctgggcgttgtggtgggcgcctgcagtcccagctactcaggaggctgaggcaggagaatggcatgagcccaggaggcaaagcttgcagtgagccaagatcacgccactgcactccagcctgggcaacagagcgagactccttctaaaaaaaaaataaaaacattaaaaataataatcatcatcatttaggccgggttcagtgactcacacctgtagtcccagcactttgggaggctgaggtgggcagatcatgaggtcaggagttcgggaccagcctggccaacatggtgaaaccccatctctactaaatatgcaaaaattagctgggcgtgatggcacatgcctgtaatcccagctactcaggaggctgaggcaggagaatcgcttgaatccgggaggcggagtttgcagagagccaagaacgcaccactaccctccagcctgggcaacagagcgagactctgtctcgaaaaataataataataataatttaagatatgtttattccaaaagatctgagatctctagcattcatttcccaacctccttgatgatctgtataacctttatgaccacactggcattcataaaataataccttgctttctgtgccaataatgctcatgcaaacacggtgaacattcctaaaacctgtcagactgtaagaagtgtggcaagcaccaaccccacaaagtgacatagtacaagaagagcaaggattctctgtatgcccagggaaagcagcattatgacaggaagcagagtggctgtggtgggcagactaagccgattttccagaaaaagtctaaaactaccaagaagtttgtgctaaagcttgagtgtgttgagcccagtgaagatctaagagaatcctggctattaaaagatgccagcattttgaactgggaggagataagaagagaaagggccaagtgatccagttctaagtatcatcttttgttttattatgaagacaataaaatcgagtttatgttcacttcaaaaataaataaataaaagtaatgtcttactgttggcctgatccttattattagaccaaagctcagaaaggcagaatcattgacatgaccagtcctgtaaccaggaaggacacttaaaaaagagaaagcgattgtttatgattccagtcttctctttttatttcattcctagtaacaagttcactattttagaaaatgaaaatgtaccgcatttttattgagaataatatttatagcataaagggattcaaatgcacttacaagacagtaggaaccaggcacctactttattagtagattgccaaatggatttggatgtgtgactatgtgatgtaaaatttctcctacatttatattagtaagtcattgttatttgtaagcatgacaataatcactttattaaatatatagtattattaagcaggattctgcctgtattttatgtaaaatacgaataagttttgaaagacaactatgaaaacatatttatactaatttatgtactgatgtgtatttggtcctttcgtttataaaaaattaaacaatctttaaactgtggacttttcatttggttctggtttgagtttgtgtcctgtcacatagatggtaggttaagtacatggtagaaaagttcattttagaaatctgaaaatcaggccaggcacagtagcttatgcctgcaatcccagcactttgggaggttgagtagggcagatcacgaggtcaggagatcgagaccagccatgaccaaaatggcacaaccccgtgtctattaaaaatacaaaaattagctgggcgtggtggcacacacctgtaatcccagctactcgggaggctgagacaggagaatcgcttgaaccagggaggcagaggttgcagtggagccaagatcacaccacagcactccagcctggcgaaagagcgagactcgatcaaaaacaaacaaaaaaaaaacaaagaaagaaatctacactggggaagagaaggaatatggatctttgtagacttaacatgagggagattttgtacagtttctcactttgactatatccatttctctgtgccagcaaaaggccttttggaggcacattggctgcattattgcagaatttgttttcattacctttgtgttaaatttccatgacatgttctaccctttggctctcctgtagaatgactgttgcagaattttgcttttgtaagagttgctacatgagaaatggtcttggaaatgttgtctggaggcatgtgtttctctttcccttacttcctgaattaagttttatttggtttgtaaatcattcttctcaatttttttttttccatttcagagccactcagtacacatgcatgttgcttagatatttgttagagcccaaagctggcaaagagaaggtggtaatgaagctcaagaaactggagtccagtgtgagcactggtcgtaaatgtaagtaccctgtttcttgagggacagtgactcctggtttagaatcctcagcctcagaccctgtaattcacggagtaatttctaggtcattaatttctagtcaatcaagtttattggtgaaattgaccagtaaggctgtcctcatggcacaacaggtttgaatgtgttgctgcagaccattcataaacaccctcttatgttcacatctggtgctacaccttatctttctgctgaatcataaccagtgagacagacaacgtgttagttcacctttagttcttagaatcatagtatgttttagcagtctctgacatgagcttctgctcctgtgagcccctttattctaaacaagagtggaatagttatatcctagaccacctgcctttttcctttattgaggagtgctagaggatatataggtggatacatttttgtagaccatgtttgaggtaggtttcatgccaaaggtaaaaagtgaaatcaatattttgtgtttattaaatttactttaataatatgtcatactgggaaatccagtacttttcatagcaattgcctttctgagtctttgttgtttgatgaaaaccagatgttgctatagtaggttagcagaggcattagaatggaatgtagagcatcacatattgatcagttggttttgagcacctatgttatataggtacattcctgagccttatgggagaagtaaggtgctttaaataatgatatataagatttagtgccaaacttgttggctgaggtagaggaaaagaaaggtgttttagaggaggtggaacttgaggtgaggctagagagaaggaagaagagagtttcgaagggcagttttctctaataaaggctcagaactgagtaaaccattgtatgggaggatcattgtcaaactacaaaactagtttgacagatttaaattgtcaagcagagggatgggaagggtagggcgagcttttctggatggcactgaaggccaagattagaaattctatttagattatttagaatgttggagctgaaaggtcctttagaggtcactagtctgtaagtccagaaggggcttatccagggtcattcagccagttnagtgcaagggccagaactggaacccagaatctatatactaaaatagtcattacatatactattttactattttatgttatttttgataacataatacaaaacattcttttttttttttttttttttttttgagatggagtctcactctgttgcccaggctggagtgcagtggcatgatcttggctcactgcaacctccgcttcccaggttcaagcaattctcccacttcagtctccctagtagctgggactacaggcatgcgccaatatgcctggctaatgtttgtttttattttttattttttttagtagagacggggtttcaccacgttggccaggctggtctcaaactcctaacctcaggtgatccgtgcaccttggcctcccaaagtgctgggattacaggcgtaagccaccgcgcccagccccttctgagattataagttttctgagagtagctacttctgagcacctcctgagtctaaggtatgatccttcaaggaaaagtacttcttttgtatcctccgtgacatttagtactataactctttctcagaaggtgttcagtaagtacctattgattgatgcatccctgattaattgaattacgtgctcacataaggacgtgccattgcaatggttgatttaattcaactaggagctctgtgacaatattattaattgttctatccattaaattctaccatttctactttatcttcttgacaataggtagccaaaaggggtttggaccagagaaatggcaaaatgataatagtgttttttaaaaagacagtcttttgtctggaaaataaataaaatgcaaggcatcagactctccaagagagtattgcatctggagttcatgttatcatagtaccttccttctaaagaagtgtagctggtaaataatcaaatgtaacagtccacactcatgattgaccttgcctggagtatgccgtcagtcaacattaaggtgttcattacaatggaggaggtaaatttaaagagtcactgtattttttgccttccaagatcactttaggtgtccttaatgtactgtaaaatctttctctttttctgaacaaaggctgagcctttaatgaccatcagttgttaaaaagaccagtgctaagctgggcacactggctcgtgcctataatcccagctactcgggaggctgaggtgggaggattgcttgagcccaggagactgaggctgctgtgagctgtgatggtgccgctgcactccagccggtgtgacagagcaagaccctgtctcaacaaaaaacaacaaaaagctggctcctcaccctgatacagggattctatcttcctgttgtgtactaatgaaataactgttcactattgtgggttctacttgcagggttcagactaggcaatgtggtacatgctatacaggcaactgagcagagcattcatgccactgacctggtacctcgcttatgcttaacattagccaacctgaaccgtgtgatttatttcatctgtgacaccatcctctgggtgaggagcgtaggtctcacctctggcatcaacaaagagaaatggcgaacgagggctgctcaccactactactattctcttctgctgagc

SEQ ID NO: 6828 - DNA, 195 bp, Homo sapiens; identical to SEQ ID NO: 5540

SEQ ID NO: 6829 - DNA, 142 bp, Homo sapiens; identical to SEQ ID NO: 5249

SEQ ID NO: 6830 - DNA, 387 bp, Homo sapiens
ctcttttaggatttcctcaggtaacaatcttctttcaatgttcaataatccaagcagaacattttctcacttcatccgcctcccatgctaggttcacactgtgaaattggcttatctctgacctaaccacttccttcaccagacatagagctggtgtagctcaagggaaagaggcacggcgctgggaaatgattaggccccaccgtcccaagcaagagctcaggggagttctgaggctggagagaccattcgggatatcaccccgggttcctgagaacctgagatctgcggggaggcgtcaggcatccggaaacgcccgagtctggggagacggaccccctcagactttcctctaggagactctacaggtaaaggggagtcctggga

SEQ ID NO: 6831 - DNA, 370 bp, Homo sapiens
cttatctgctatctctgccacaaaccctttcctagccacacactatggagctgggcagagcgtcaagttgtgggatttcatctagaccaacctcagcactatggacatctgggaccagataattcttggttgtgggggcctgtcctgtgtgttataggatgtttagtaacatccctggcctccacccccaccactgtgacaaccaaaagtatctccagccatggccaaatgtcacaaaagggcaaaaacttcccctactgagagctactattgtggccatggaccaccctgaggttagccaatcagagcagaagtggggggcgggtaggaaactgggtcttagtttcacaagtaaaataggctttaaggt

SEQ ID NO: 6832 - DNA, 4704 bp, Homo sapiens; identical to SEQ ID NO: 5253

SEQ ID NO: 6833 - DNA, 1677 bp, Homo sapiens
cctctccaacacttcccttttgtcttcttgataatagtcattctaacgggtatgattacagtagctttgtagtgggttttctgtgctgtgctttttaatttcatgtatgtaaaaaacattgggtattttgaatgtttttcttttctcaccttatcctagaacttgaggctgggcgcggtggctcatccctgtaatctcagcactttgggaggccaaattgggcagatcacttgaggtcaggagttcgagaccagcctggccaacatggtgaaaccccatttctactaaaaatacaaaaattagccaggcgtggtggtgcacgcctgtagtcccagccaatcagtaggctgaggcacgagaatcgcttgaacccaggaggccaaggctgcagtgagccacgattgcaccactgcactctaacctgagcaacacagactccatctcaaaaaaaaaaaaaaaaaagaacttggaaatgcccccatatatactagttgtgatgaagcattatttttagttaagtcatataagaatgactgtgtatgaccaaaggcaaatatatgtggaagaaactcaccaggaattcttttgtgggtttttattcaatacatgtcagtaggggagttataccccctttttaataagtttgtgttaacctacagtctaaccaaggcatcttatcccagtgaatgccaccaccattcaccctggttcccaaactggtaacatagaaataatcttgacatatcttcctatcactttgtcatcaagtcctgtcatttttaccttgtaaacatctcttaaatgtgtctacttctcaccacaccctaatctaagctaccatcagcaccttttgcctgcatgactgcagttgtctcctaactgttcttcctgcagcgactctggccctccctgtattcactcgactgcaagcagaattctcctttttgttcgaagttcaattttaatcaagacaacccacctacctgcacttgcacccctagcttaaaatgctcgaatggctttttattgtccttaatgatgaaaaggaaatattttatgtgaccaaatatatttgacctatgaggtcagatatattagggccactatctaaagcatagttccaagcattaaaatagttactgtctcagattaaaacagtggctggcacatcacctcaatagaggttacctattcttgttgccacttagcctcatatgtaccatgttttacttaataccttcattgtcctttaagtattcggaatgagaattacagtgcttcattcagcataagacttttgttcatgctgtttctttggcctgaaatatctatcccttcccaattgcctaattaattcctatttgtctttcagatcttagctagttcatcacttcctcagggaaacattccctaatttctgtcacagagtaagacccgttgttatacgtctcacctgaccatgtacctctacttagcatttaacacgtgtaattttgtatgtattggtttgattaatgtcagaaccactagattgtaaactccatgaggaccggaattttgtttctgtcattgtcattgttcaactttgtattttttatgcctcatacagtgcctggcacatagtaggtgctcaattaactttattgaaagaataaaatgaatggatgaggtatcaag

SEQ ID NO: 6834 - DNA, 703 bp, Homo sapiens
gtgatcttagctcaccgcaacctccgcctcgtgggttcaaatgattctcctgtctcagcctcctgagtaactggggttacaagcgcccaccactacgcccagctaatttttggtatttttagtagacacagggtttcaccatgttggccaggctggtcttcaactcctaaccccaggtgatccgcccacctcggcctcccaaagtgctgggattacaggcgtgagccaccgtacccggcctctatcgtatattataattgcttattgttatagaagctgaatgttttacttactacttttaaatttatttggtcttcccaaggaaatcatacaaacggtagagattatgataatctgagcattctgtgtgcttagtttgatttttttatttataagcagtactatttttatagatgtttaaaattcataaaacactgtattctgagaggtaggtattattcaaatgttagaaattttttttaaaaaaatgccctgaggcttagaaaggacaaatgactgaaatcacaattagtaatctggtctttagacttaaagcctagttatatgcttttattatagcttagtcattaattcacacattttcccttatcttttttatcttttaaaggtgaccataaaactttaaattgtgtgtgtacgtctatgtatgaggtatatgttaccctgtttgtgttattcaaac

SEQ ID NO: 6835 - DNA, 224 bp, Homo sapiens
aaatactgaaatttagcatatatgttgtcaacagtattgttacaatcttagcaggtttgagaatttgaaaccttttagggaagcatattaaaaaatacaaactcaatgtttttcctgctatatatatagtattataaattatgcacaataaatttttggtcccagaaaaaacacatcacttaataaaaatagtaatctgggtttttttttaattctgaaatcat

SEQ ID NO: 6836 - DNA, 4133 bp, Homo sapiens
ttcttctgcacagtcagtatcctcgggagttcgtgcaccatctcctgccccatcatcagtaccgttagggtcagaaaagcccagcaatgtgtctcaggacaggaaagttccagtccctattgggactgaacgttctgcacgtatcaggcaaactggaacgtcagctccatctgttattgggagcaatttgtctacatcagtaggacatagtggcatctggtcctttgaagggattggtggcaatcaaggtaggatattctgtcctgctctctagaaattaacttaatgcatttaactataatgtaaacagtatttaactttaatagtcatttcctttttttttttctttttttgagatggagtttcacttgttgctcaggctggagtgcaatggggtgatcttggttcactgcaacctccacctccccggttcaagcgattctcctgccacagcctcccaagtagctgggattacaggcatgcgccaccatgcccagctaattttttttttttgagacggagtctcgctctgtaacccaggccggactgcagcggcacaatctctgctcactgcaagctccgcctcccgggttcatgccattctcctgcctcatcctcccaagtagctgagactacaggcgcccgccaccacgcccggctaatttttgtatttttagtagagacggggtttcaccgtgttagccaggatggtcacgatctcctgaccttgtgatccgcccgcctcggtctcccaaagtgctgggattacaggcgtgagccactgtgccccgcctgtatttttagtagagacagggtttcaccatgttgatcaggctggtatcaaactcctgacttcaagtgactcacccacctcagcctcccaaagtgctggcattacaggcatgagccaccacgcccagcctcgtagtcatttctaaaagatctgtattcctattttttttgttatgtgaatatttaatcacttctttatgagctctgtccccatgtgacctttctcattacatgtatttattactgctttcagaaaatatctaatgcaagcatgttcttttcttcctttcatcatattaaggacataataatatttcctttcagtccctttaggttgtacttaggtttttttcttttgttttataacaccaagtttttagattatttcattaagctattatgtcactacttacaaaccatggaaatattgctgtaaatatataaaagtaggtcattatattgaaataatttacggttcaatgtggaaaatattagaaaaacaaaatatttgattttgattttaaatattatctatttttgttttgcctctttgtttgccctcagacaaagtagactggtgtaaccctgggatgggaaatcctatgatccacagaccgatgtctgacccaggagtattttcacaacatcaagcaatggagcgagatagtacaggaattgtaactccttctggtacattccatcagcatgttcctgcaggctacatggactttcctaaagttggggtaaagtcctgattttgtactagttatttaagggaggattttctgagaaaatgttttgaatatagtaggcatatgtataatctaatgttaaaataagttatataatgggtaataatttttagatttcttagataagttacacattcccaggatgaggtgaactttcaaatatcaattttaaggctattgattatattgggaaaaatgaacaatgacttggatgttaatgtgtgtgttttccttttttaagggtatgcctttttctgtgtatgggaatgcaatgattcctccagtagcacctatccctgatggtgctggaggacccatatttaatggccctcatgctgcagacccttcttggaactcactgataaagatggtttccagctccacggaaaataatggccctcaaacggtgaggctgatcattcagtgaataaacagttgttttgtgtttaagaaatgcaaagacaaataggattcaggtaactcatgatagcaagagagtttggtgaatatgggcagttgaggaaatctaatatagctgcaatatagcagagggctgtgggcagtggtaccaaaggcaggtttggggctaaaattatgaaaggtattgtatattctactgggtagcagataataaatgaaagattttaagttgcaaagtgactgtcatatgattttatacattaaagtttactagtggtgtgaaaagaccatctaaaggttatttattaaaggtactataaataactctgagaattcacataaatggttgtatattttagtttagtgtatgtttaatatctttgatttatttttcttccacaaccgtgaatctataaatgctcaggtaatgattttttttttaaaggttgtaaatcagattctgtttgagggataagaggtaggaaaataatagaaaaaaggtttttatcatttttttccattagttcctagtatattgcaaattgaagagtacctccttagttttttaaaagttttattttaataaaatatatgctagatatatattttgtaaaatgcatgctctatattcataggtgtggactggaccctgggcacctcacatgaacagtgtgcatatgaaccagcttggctgatgaggatcagcttgttagcctgcagattccttttcatttggaggaaatcacaagtggccgaaaaaaaaaattatgctcccaaatcattctactgatgtgcttgactgaagtgtgtaggctttttgcagaagatcttactaactgacctattttctgtgaacatttgtgactgcccattccccatcatcatccgttttaccttagttagcatttttcttatcatttttctttttttctttccctcttcccctttggacataactttctgttgaagctgttctttggctggttggttttagtactgtaaactgcttctgagcaaacacggaaatttagcaaaattatgtaaacttgatcctgaagttttagaatggcaaataaatgtacaattgtttacataacagaaaaggctaagcagaaagtaaatttcaatatgtcagtatagaggctctactttatgtagacttaaattaatgtgagatatgtaccttcatattcagaaatctggatgtttccttcatacattaaactattaataagcataacttttctactggtgtaatttaagtataaagtaaaataatgggcattatcattggatgtttccccacattggcttttaaaatacccatcttgctttctttttggtttatttgtagcaaggcacatatagaagaagaaatttctggcttttccatgttgttttattaccttttctcacttttaaaactaatacagacttatctcctcactcctttttctctccttacctttaccactaataccagtaaaattatctttctgatagtgaaaaggttctgtcaagattttcactgtaatggctgctacagagatggaccatcttcatcatcaccagtggtttcttctaattataaaatgtttaaactttctgagaatttaaaaagccaccactgttcccagtcagcatatacaagctcttaatattctgtttattaaataattcaatgtactattttatattggatgatattgattcttaacattggcttttcagtcatcaacagtcaacataaaaatttcaattttcagtaatttagtggaaaatatcttatttcttttttcaattttaaaggcttcctgcttttttacccttgtatattatcagtgaaaaggatcaacagttaatttgagccaagtaataaaagaaattctgcatttgtcacgaagacaatttatggtagacagataaatacacagattacagtgtaaagtctccatttaacctgtttataaaagatacaaggccacactaaactactcagtgggatttatatattccatccacttgaaacaataaacagtaatgtatccaagaagattatgtgtcctaccctgtctcatggaaaaattaattatatggttgaaatgtaaaagaaagtaagcataaaaatcgagtaatgtatatatcaatttgtcttctttttttttaatt

SEQ ID NO: 6837 - DNA, 473 bp, Homo sapiens
aaataaaattatagcactttactaaaaaagggatgtaataatgttatttaacgaagtattttatatatgacttgccactattctatacataaaattttttttcttaattctttcctgtgttaactagggttattttctatttaaggtaatcctgctggagaacagatgctatccaatatttattacaacacatgagttgtgttgtttcacaatactgaatttcttaggtgaggtattttatttaaaaaggagggggaaaactcctatattttcttgacttcaaacctgtggggccaggggatatagattgaaatgctccgtatttagtcttggggatcaggcttgtttagtacaataccatggttttagaagtctgtactaggaacatttttaaaatacattttttatatttcagatgtaatgcagtgcacttttatttgaacaataaaaaaacccataactttttgagacca

SEQ ID NO: 6838 - DNA, 2607 bp, Homo sapiens
tctgtgtctaagtgttgcagaaaaacccaacaggcacagacacacctacctggaaacaatgcttccctagaagtgggaggaaaccagaactggaggtgccctccttctgggggtaggagtcagctaatagacatccaaggtgtgcaggagtgctttcactctgcgcaggaaagatcagagagaagtccagagccttgcctgcttgtaagtacccacttgtggctggggggaatttcctaactgttcacggttgcagagcttgattaaataaagctctcattagtttaagaaatgacccaagaaaggagagagaagtcgggctgtttttaaatgtaatatgattttccatttacttatttatctttaaaatgaggtaaagagcaaaacatctggagtaagttgcctcaggaaggtcttattggctgttggctttgcaggtgatcctggtggagaaggtggagtatggtgagctgcttgctaaggacagccaggcaacgctgtgtttgtgaagatgtgctccaccttctcctctgcgcatcccagctcctcctgctgaaacagctgagcttgctttttggatttcttagactcctggcctctgagagacacctctaaggacaaactgaccttgcattgggaactttattatccagatcctcataggctttgtctactctggattgcttgttgcaacagttcttaggaagcaagagtgtctcctgcaccagcatctgcctgtgtttgcttttacctactttgagcaagacccagtgaggccctagctctgttggtcctgaaaagcctgaaccctgaggctgtttctcctgcctccaaaatgcaattataggaaataagaagcacagaaacagtggaaacaaccaggaggagaaacaagaaaacctaaaattttcaatattcaaaaatacctgtcgtggtggttgatgcagaaaacactgagttcatcaaagagctttgtaattgttggaccagagaacccctttgctacaggaactgatatgttttgtctttctggcctagtcaagggaggataagtaagtatctggggcatggaaggaatgcactcttgggctgttttgcttgtatctgactcacccctgactctccagtgaagcagaaaggaagaaacctcacaccacccaggtgtggccagactttggccattattgtgaatccccaagagttaccacaggcccttcccaaatatatatttaatcttgtggttcaaataagcttttggctcacatctaagcacatcataaagaacgctgtagaagaggtgacatgatgaggcgggaagacgaggaagaggagggaacaatgatgaaggcaaaaggggacttagagatgaaggaggaggaagagattagtgagacaggagaactggttggcccttttgtgagtgctatgcccactccaatgccccacaacaagggcacccggttctctgaggcatgggaatatttccacctagctcctgctcgtgctgggcaccatcccaaccagtatgccacctgccgcctgtgtggcaggcaggtgagccgtggccctggggtcaacgtgggcaccactgcactgtggaagcatctgaaaagcatgcacagagaggagctggagaagagtggccatggtcaggctgggcagcgccaggatccaaggccccacgggccccagctccccacaggcattgagggtaactggggtaggctcctggagcaggtgggcaccatggctttgtgggccagccaaagggaaaaggaggtgcttaggagggaaagggcagtggaatggcgggagagggctgtggaaaaaagggagcgagccctggaggaggtggaaagggccatcctggagatgaagtggaaggtgagggctgagaaggaggcatgccagcgggagaaagagctgcctgcagcagtacatcccttccattttgtttaaattgggcttggagaatctattctgaaaacattgactctagacttgtagaaaagagccattttagtttcaactcaaatgtaaagcaaagtagtttggtgacattttgcttttatgtgaaatagtgcacagtatgagttaatctgagcaggtctgaattgaccaaatgcttatctacgaggttcctagagctctgctgacccttggccgaaactctaaaatgtacctattaaagataaatgcttctaccaaagtaaaactctgtgagttgtttcagggcagaatgtaccagccagtcagcgttgtttaacaaaataatcagatttttgcctagcactcggttttggtggagctgacgattttgagggctgaggctggttaggtagctggaatgtgcctatgtgaccagctcacttgcagacaccctgccggaagcagagcttaatcttcctaggactgaggtcttagcacatgtactggtggagtttccagaccaccagtatgaataaaagcttgttctgtgtgacccagcaagtggaaggacaaagaactgtgagcctcagatctttggacctttccaatgcgtctctttctcctgttattgctgcaatgtattttcttgcttatattaaagttgtttcatcagtataa

SEQ ID NO: 6839 - DNA, 326 bp, Homo sapiens
atctcctgacctcaagtgatccacctgcctcggcctcccaaagtgctgggactacaggcaagatccatggctcctggcctgcaatgccatttctatctttccttttataacacaaagttttttcttcttctattgataccttctttagagtcttcctatctcctcttggtaggttttccttctcaatctaaatatgtatacacacacatatatatattatgcatattatatataatgtatgtatatatataatatatatgtgtgtatacatttaatatttcagcctttcccactcttcctccttcaaatcgcttgctttacttgag

SEQ ID NO: 6840 - DNA, 3514 bp, Homo sapiens
gtgggagagagcgcgatgggccgcggcggtgggcgcacgttccgcggggactcatgccacgcgcgtcccggcccgacgcgcaattagcagccacctccgcagcccgccgccaccgcctccctgccctcccgggctgccgcagctaggagctccagccgtcgcctcgcgcaggctgcgggcattgtcctctcggttcgccgcccgggctgctgctgccgccgcggactgctgcggggcccggacccgcaccccagggatacgctgccgccgccgccggccggcccggcgcccggcctccgttcggtggtttccgccctgcgttctctgggttgctctctcctgggtttttcctgcgtagctgaggaaggggaagagaagtccagccgccaagcccagccttccccggcgcgcagccccgacggggccgcggcaggcgcggcgagagcgctgacggagccatgagagagtacaaagtggtggtgctgggctcgggcggcgtgggcaagtccgcgctcaccgtgcagttcgtgacgggctccttcatcgagaagtacgacccgaccatcgaagacttttaccgcaaggagattgaggtggactcgtcgccgtcggtgctggagatcctggatacggcgggcaccgagcagttcgcgtccatgcgggacctgtacatcaagaacggccagggcttcatcctggtctacagcctcgtcaaccagcagagcttccaggacatcaagcccatgcgggaccagatcatccgcgtgaagcggtacgagcgcgtgcccatgatcctggtgggcaacaaggtggacctggagggtgagcgcgaggtctcgtacggggagggcaaggccctggctgaggagtggagctgccccttcatggagacgtcggccaaaaacaaagcctcggtagacgagctatttgccgagatcgtgcggcagatgaactacgcggcgcagcccaacggcgatgagggctgctgctcggcctgcgtgatcctctgaggcggccaccgcgcgccggccgcgctctgcgcacaaaagccaaacgcatccgactctctaaatgtgatttatttcttgctttgagattggagaccactttgcattggccagggtgtcttgggagcccggctggcctccgcggccggcgtcccctgcctccaccctgtgcccgagggggtgtccggtcctgcccatccgatactctggtggaaatgtggctctttgcagcatgtacgtttctccctgattttggttgatgcatatttccccgtttaagtagccgttagggcgcagtatcggcagcttgacacccaccaagcaaaagtttcagcctggaaaaaaaatgggggggaagggtggatgaaaaggagggagagaaggtggaaatggtttttttttttttttttctattttctttcctttttttttttttttttttgggccaacagccgtttttctagttccaagttttaaatacatggaaggaagtccgggagaaccatatgaaggagcaggaggagaggaagaaactttttttccttcttttccaggagtagctggaaattaagatcgggttccttttctgccagcttggaagggcaaccccatgactgattgcgattctgaggatgtctatgcaaagttggattcttgttacagtgtatccaatctgaagtattgcacatctgaactgggactgttaacactgatgccaatacagtgtggggtgccagaaagtgtctgctgatatttgtggaaaaaaaatctattttgtttacctactgtatcaaaggggagtctgggggagaatggtagtattttttttttttatcagctgtgaaaaaaatgttacagatctgcacattttcgtgtgtactatggtgtgtgtgtgtatgtgtgtggtgtgtgtgtgttttaagtttagccttttgtttttgttttttggttggcagtaaccgattttaatgactagcttttaaaaatacagtacaaagactttgtaaatgtgattcagggcccccagcacccctgtgtctgcagagtgccttcaaaactcagctgttccagccggtgccaacctgtgaacttcccaccatatcccagaatctgctattccccaaaccacttcccagtttcctttcagtaatctttctgaaggagccaggacaatagggcctgttgtttagtgaatttctttattattttcagcctttaaaatgtaatttccatctcttgcaatgaatttgtttcccttttttttgcttcattttgtttaaattttcaggtatttagctcccctttcatattatttttaaattttttaattacctgttgtagggtgttcctccagaagcaaagagcaaaattttactgttgtgatgtaccaattctaactaattgtaatttttaatttcatgcgtttaatcattgtctcttcattttaagacttttaatacaaatgtcatttttaaagaaacaaacccaaaactattgtttgtgtttctgtgtttcatattcagtgatttaatacagtatcatggctgaggtggatggggcaggtgcatgatactcttcagagctatttgtgaaattttaaagacagaagtgtctcagtgacaagttggatgacactactcccaactttttaaatttggagaaaaccatcaaggtcgaggaagccctgggtatggccattaccatctgattagaagatgaacaggtattttgaatctgatctgacatggaacagtttacctcattgtaggtagggaacaagagaacccatctattaaaattgccttagatctgggaaagtaaccatccttctggcaaagtaggatggcacttttaagtttttcttccttttttccctctgtttatattgcacatcaagtcaaaaacatgtttgggaaagatggttttcaattctgaagttatacctagtgatgttttttgcagtacatttgaatggattgtagacactgcctcaacccttttgaggttttgatttggaaatagatttaaaagaaaacaggctaagataatatccttgttctcatttacaccctgcagtttggaccacatttgacctcataagtttttccttttaacagtaggaggcagtgtgagctttttattttttatttttcttaaggtggtcttagtaatataacatgttcatacatatcaagagagtacttggtataccttaggtctatgaagtgtagctgaaatctgaagagtcttgacaaagggatttacacccttgacaaaaccaaaagaaattaacaggccacaggtttctttaaagctgtgttaacatatcttgccttaaaatgtgtgtgtgtgtttttgctttgcttttttttttttgccccggaggcatctcagtactccggctttggcggaggaatagagacttttgcctggcaatgctcctactgccattttttttgtcccactgctggctcactggggtttggcgtcatccccacttgggaggc

SEQ ID NO: 6841 - DNA, 4933 bp, Homo sapiens
gtgggagagagcgcgatgggccgcggcggtgggcgcacgttccgcggggactcatgccacgcgcgtcccggcccgacgcgcaattagcagccacctccgcagcccgccgccaccgcctccctgccctcccgggctgccgcagctaggagctccagccgtcgcctcgcgcaggctgcgggcattgtcctctcggttcgccgcccgggctgctgctgccgccgcggactgctgcggggcccggacccgcaccccagggatacgctgccgccgccgccggccggcccggcgcccggcctccgttcggtggtttccgccctgcgttctctgggttgctctctcctgggtttttcctgcgtagctgaggaaggggaagagaagtccagccgccaagcccagccttccccggcgcgcagccccgacggggccgcggcaggcgcggcgagagcgctgacggagccatgagagagtacaaagtggtggtgctgggctcgggcggcgtgggcaagtccgcgctcaccgtgcagttcgtgacgggctccttcatcgagaagtacgacccgaccatcgaagacttttaccgcaaggagattgaggtggactcgtcgccgtcggtgctggagatcctggatacggcgggcaccgagcagttcgcgtccatgcgggacctgtacatcaagaacggccagggcttcatcctggtctacagcctcgtcaaccagcagagcttccaggacatcaagcccatgcgggaccagatcatccgcgtgaagcggtacgagcgcgtgcccatgatcctggtgggcaacaaggtggacctggagggtgagcgcgaggtctcgtacggggagggcaaggccctggctgaggagtggagctgccccttcatggagacgtcggccaaaaacaaagcctcggtagacgagctatttgccgagatcgtgcggcagatgaactacgcggcgcagcccaacggcgatgagggctgctgctcggcctgcgtgatcctctgaggcggccaccgcgcgccggccgcgctctgcgcacaaaagccaaacgcatccgactctctaaatgtgatttatttcttgctttgagattggagaccactttgcattggccagggtgtcttgggagcccggctggcctccgcggccggcgtcccctgcctccaccctgtgcccgagggggtgtccggtcctgcccatccgatactctggtggaaatgtggctctttgcagcatgtacgtttctccctgattttggttgatgcatatttccccgtttaagtagccgttagggcgcagtatcggcagcttgacacccaccaagcaaaagtttcagcctggaaaaaaaatgggggggaagggtggatgaaaaggagggagagaaggtggaaatggtttttttttttttttttctattttctttctttttttttttttttttttttggtcaacagccgtttttctagttccaagttttaaatacatggaaggaagtccgggagaaccatatgaaggagcaggaggagaggaagaaactttttttccttcttttccaggagtagctggaaattaagatcgggttccttttctgccagcttggaagggcaaccccatgactgattgcgattctgaggatgtctatgcaaagttggattcttgttacagtgtatccaatctgaagtattgcacatctgaactgggactgttaacactgatgccaatacagtgtggggtgccagaaagtgtctgctgatatttgtggaaaaaaaatctattttgtttacctactgtatcaaaggggagtctgggggagaatggtagtattttttttttttatcagctgtgaaaaaaatgttacagatctgcacattttcgtgtgtactatggtgtgtgtgtgtatgtgtgtggtgtgtgtgtgttttaagtttagccttttgtttttgttttttggttggcagtaaccgattttaatgactagcttttaaaaatacagtacaaagactttgtaaatgtgattcagggcccccagcacccctgtgtctgcagagtgccttcaaaactcagctgttccagccggtgccaacctgtgaacttcccaccatatcccagaatctgctattccccaaaccacttcccagtttcctttcagtaatctttctgaaggagccaggacaatagggcctgttgtttagtgaatttctttattattttcagcctttaaaatgtaatttccatctcttgcaatgaatttgtttcccttttttttgcttcattttgtttaaattttcaggtatttagctcccctttcatattatttttaaattttttaattacctgttgtagggtgttcctccagaagcaaagagcaaaattttactgttgtgatgtaccaattctaactaattgtaatttttaatttcatgcgtttaatcattgtctcttcattttaagacttttaatacaaatgtcatttttaaagaaacaaacccaaaactattgtttgtgtttctgtgtttcatattcagtgatttaatacagtatcatggctgaggtggatggggcaggtgcatgatactcttcagagctatttgtgaaattttaaagacagaagtgtctcagtgacaagttggatgacactactcccaactttttaaatttggagaaaaccatcaaggtcgaggaagccctgggtatggccattaccatctgattagaagatgaacaggtattttgaatctgatctgacatggaacagtttacctcattgtaggtagggaacaagagaacccatctattaaaattgccttagatctgggaaagtaaccatccttctggcaaagtaggatggcacttttaagtttttcttccttttttccctctgtttatattgcacatcaagtcaaaaacatgtttgggaaagatggttttcaattctgaagttatacctagtgatgttttttgcagtacatttgaatggattgtagacactgcctcaacccttttgaggttttgatttggaaatagatttaaaagaaaacaggctaagataatatccttgttctcatttacaccctgcagtttggaccacatttgacctcataagtttttccttttaacagtaggaggcagtgtgagctttttattttttatttttcttaaggtggtcttagtaatataacatgttcatacatatcaagagagtacttggtataccttaggtctatgaagtgtagctgaaatctgaagagtcttgacaaagggatttacacccttgacaaaaccaaaagaaattaacaggccacaggtttctttaaagctgtgttaacatatcttgccttaaaatgtgtgtgtgtgtttttgctttgcttttttttttttgcccaagaggcatctcagtactccagcaatggaggaagaatagagaattttgcctggcaatggtcctactgccattttttttttcccactctgatctcacttaagtttgatatcaaacacaattgggaggcaatagtatcaatatcctaaatgtagaaattaaaagatactgtataattttatgcctttgcaaagattcgttcttgtatttgaataaattcagttgctaaagtagatccaaagtgttaaaaatgctgaagtcatgtcaagtactgtctggagggtttttttaagaaaaggcatttggcatttaactgtctcttgttttatttttaagtttttggaaaccttttgacataaaatgctgccaagtatctaagaaatgtatatactgacagaagatatttgaaagtggaaaattggaaatgaaatatgttgctgggtgcgttaatcacctccgcccaggatttagtcacttgcaggacctctttatagtctaggatggcagagcagaagattttaatatgcttttattaagtgatgtaaaataaatgctttttggattatcaatgaaagcaattttatgtgtgcctgaagcaagaaaatagcgtttttggttttatctcatattttcttggcaaaattgagagaaattaggaacactgctatttttttcttaaaaatgtttttaagaatatgttcgtttctttgactattaagaaccccttgtggtattagtgtgtgaagagataagggcatttgtttcaatgaaaaagttagtgttaaaggaagtgagtcagggagggcggagtttgttgtaaggcaatcacctgtcaaaacagaaattgggtgggaaaggagtctttatcttggggagcaaaagctgacttttaaacttgacccctgctgtttttaaacagcttttccttttggtctctgacagtcaatccaggttttatgttatttcaaaagggttatttttgtcctccttttttaatagcttcaggaaagttaaaggtatcatcttaggtctaacactctagtctttgagagttacggttctttcgtagaacaatttccatgttgttaactgttgtagacttaattgaatcacattttgggaccagatgtatttggggatagaattctttaaatgtatgggacttcatgcttcctgattatgtaatatttcctgtggttgggaatcctagaatgcctgatctattttatctgttcaggtagttttgttattgtaccctcttttgggtcatattctagtatttctcacagggggtatgagaaacagaaagctatatgtagcagctggtcttgagaagtagaagcatcttaactgtcataagagcatagattttttgtttttcacaacagctggaataagttcctgcattataagtataaagggaaccgagatttaatttggagatcatcactgttaaaacgataccagacatttgtcacagtgtcttatttggggaaagtttgctaatatacattttgtctgtgaaaatatagtaaattttaaaatacta

SEQ ID NO: 6842 - DNA, 4934 bp, Homo sapiens
gtgggagagagcgcgatgggccgcggcggtgggcgcacgttccgcggggactcatgccacgcgcgtcccggcccgacgcgcaattagcagccacctccgcagcccgccgccaccgcctccctgccctcccgggctgccgcagctaggagctccagccgtcgcctcgcgcaggctgcgggcattgtcctctcggttcgccgcccgggctgctgctgccgccgcggactgctgcggggcccggacccgcaccccagggatacgctgccgccgccgccggccggcccggcgcccggcctccgttcggtggtttccgccctgcgttctctgggttgctctctcctgggtttttcctgcgtagctgaggaaggggaagagaagtccagccgccaagcccagccttccccggcgcgcagccccgacggggccgcggcaggcgcggcgagagcgctgacggagccatgagagagtacaaagtggtggtgctgggctcgggcggcgtgggcaagtccgcgctcaccgtgcagttcgtgacgggctccttcatcgagaagtacgacccgaccatcgaagacttttaccgcaaggagattgaggtggactcgtcgccgtcggtgctggagatcctggatacggcgggcaccgagcagttcgcgtccatgcgggacctgtacatcaagaacggccagggcttcatcctggtctacagcctcgtcaaccagcagagcttccaggacatcaagcccatgcgggaccagatcatccgcgtgaagcggtacgagcgcgtgcccatgatcctggtgggcaacaaggtggacctggagggtgagcgcgaggtctcgtacggggagggcaaggccctggctgaggagtggagctgccccttcatggagacgtcggccaaaaacaaagcctcggtagacgagctatttgccgagatcgtgcggcagatgaactacgcggcgcagcccaacggcgatgagggctgctgctcggcctgcgtgatcctctgaggcggccaccgcgcgccggccgcgctctgcgcacaaaagccaaacgcatccgactctctaaatgtgatttatttcttgctttgagattggagaccactttgcattggccagggtgtcttgggagcccggctggcctccgcggccggcgtcccctgcctccaccctgtgcccgagggggtgtccggtcctgcccatccgatactctggtggaaatgtggctctttgcagcatgtacgtttctccctgattttggttgatgcatatttccccgtttaagtagccgttagggcgcagtatcggcagcttgacacccaccaagcaaaagtttcagcctggaaaaaaaatgggggggaagggtggatgaaaaggagggagagaaggtggaaatggtttttttttttttttttctattttctttctttttttttttttttttttttggtcaacagccgtttttctagttccaagttttaaatacatggaaggaagtccgggagaaccatatgaaggagcaggaggagaggaagaaactttttttccttcttttccaggagtagctggaaattaagatcgggttccttttctgccagcttggaagggcaaccccatgactgattgcgattctgaggatgtctatgcaaagttggattcttgttacagtgtatccaatctgaagtattgcacatctgaactgggactgttaacactgatgccaatacagtgtggggtgccagaaagtgtctgctgatatttgtggaaaaaaaatctattttgtttacctactgtatcaaaggggagtctgggggagaatggtagtattttttttttttatcagctgtgaaaaaaatgttacagatctgcacattttcgtgtgtactatggtgtgtgtgtgtatgtgtgtggtgtgtgtgtgttttaagtttagccttttgtttttgttttttggttggcagtaaccgattttaatgactagcttttaaaaatacagtacaaagactttgtaaatgtgattcagggcccccagcacccctgtgtctgcagagtgccttcaaaactcagctgttccagccggtgccaacctgtgaacttcccaccatatcccagaatctgctattccccaaaccacttcccagtttcctttcagtaatctttctgaaggagccaggacaatagggcctgttgtttagtgaatttctttattattttcagcctttaaaatgtaatttccatctcttgcaatgaatttgtttcccttttttttgcttcattttgtttaaattttcaggtatttagctcccctttcatattatttttaaattttttaattacctgttgtagggtgttcctccagaagcaaagagcaaaattttactgttgtgatgtaccaattctaactaattgtaatttttaatttcatgcgtttaatcattgtctcttcattttaagacttttaatacaaatgtcatttttaaagaaacaaacccaaaactattgtttgtgtttctgtgtttcatattcagtgatttaatacagtatcatggctgaggtggatggggcaggtgcatgatactcttcagagctatttgtgaaattttaaagacagaagtgtctcagtgacaagttggatgacactactcccaactttttaaatttggagaaaaccatcaaggtcgaggaagccctgggtatggccattaccatctgattagaagatgaacaggtattttgaatctgatctgacatggaacagtttacctcattgtaggtagggaacaagagaacccatctattaaaattgccttagatctgggaaagtaaccatccttctggcaaagtaggatggcacttttaagtttttcttccttttttccctctgtttatattgcacatcaagtcaaaaacatgtttgggaaagatggttttcaattctgaagttatacctagtgatgttttttgcagtacatttgaatggattgtagacactgcctcaacccttttgaggttttgatttggaaatagatttaaaagaaaacaggctaagataatatccttgttctcatttacaccctgcagtttggaccacatttgacctcataagtttttccttttaacagtaggaggcagtgtgagctttttattttttatttttcttaaggtggtcttagtaatataacatgttcatacatatcaagagagtacttggtataccttaggtctatgaagtgtagctgaaatctgaagagtcttgacaaagggatttacacccttgacaaaaccaaaagaaattaacaggccacaggtttctttaaagctgtgttaacatatcttgccttaaaatgtgtgtgtgtgtttttgctttgcttttttttttttgcccaagaggcatctcagtactccagcaatggaggaagaatagagaattttgcctggcaatggtcctactgccattttttttttcccactctgatctcacttaagtttgatatcaaacacaattgggaggcaatagtatcaatatcctaaatgtagaaattaaaagatactgtataattttatgcctttgcaaagattcgttcttgtatttgaataaattcagttgctaaagtagatccaaagtgttaaaaatgctgaagtcatgtcaagtactgtctggagggtttttttaagaaaaggcatttggcatttaactgtctcttgttttatttttaagtttttggaaaccttttgacataaaatgctgccaagtatctaagaaatgtatatactgacagaagatatttgaaagtggaaaattggaaatgaaatatgttgctgggtgcgttaatcacctccgcccaggatttagtcacttgcaggacctctttatagtctaggatggcagagcagaagattttaatatgcttttattaagtgatgtaaaataaatgctttttggattatcaatgaaagcaattttatgtgtgcctgaagcaagaaaatagcgtttttggttttatctcatattttcttggcaaaattgagagaaattaggaacactgctatttttttcttaaaaatgtttttaagaatatgttcgtttctttgactattaagaaccccttgtggtattagtgtgtgaagagataagggcatttgtttcaatgaaaaagttagtgttaaaggaagtgagtcagggagggcggagtttgttgtaaggcaatcacctgtcaaaacagaaattgggtgggaaaggagtctttatcttggggagcaaaagctgacttttaaacttgacccctgctgtttttaaacagcttttccttttggtctctgacagtcaatccaggttttatgttatttcaaaagggttatttttgtcctccttttttaatagcttcaggaaagttaaaggtatcatcttaggtctaacactctagtctttgagagttacggttctttcgtagaacaatttccatgttgttaactgttgtagacttaattgaatcacattttgggaccagatgtatttggggatagaattctttaaatgtatgggacttcatgcttcctgattatgtaatatttcctgtggttgggaatcctagaatgcctgatctattttatctgttcaggtagttttgttattgtaccctcttttgggtcatattctagtatatacacacagggggtatgagaaacagaaagctatatgtagcagctggtcttgagaagtagaagcatcttaactgtcataagagcatagattttttgtttttcacaacagctggaataagttcctgcattataagtataaagggaaccgagatttaatttggagatcatcactgttaaaacgataccagacatttgtcacagtgtcttatttggggaaagtttgctaatatacattttgtctgtgaaaatatagtaaattttaaaatacta

SEQ ID NO: 6843 - DNA, 5690 bp, Homo sapiens
agtgattctcctgcctcagcttcttgagtagctgggactacaggcatccgccaccacacccggctaattttttgtatttttagtagagacggggtttcaccatgttggcgaggatggtcttgatctcttgacctcgtgatccacccgcctcggcctccccaagtgctgagattacaggcgtgagtcactgcgcccggcaggaaaattctttttaatgcaacagtgcaatttctctcattcttgctgtatttggttttctggaacagaaggttgtgaggagacaaatcttaaacagactattaatttatatgttgagatcattatttaatattaaattgttaaacaacagctttgagacatagctattttgattctcctatttgtttttgcctgtaaaaaagtttatagaaaacttgattttaagaggttatttaatttaaaatttaagactcttctacacactttcctttgaagaataattaaaataggaaaaaagaatcagagtacaagttatataggcagacactgaaattagaaaactaggcagatctttgtctctcctagttatcatgctaggattttaggacactgttaaaatataaagacataaaatctcattacaagtaattgttcttacaaaatggcttcccaaagtataatatgaatagtatatagtagtgtgaaataatgtgtaatatgttgtctacccaaagtgtaatctgaatagtatgaatagtatgaaatgataatgatggtttggttgatgtacaaaatatttttagagacattactgaagattattaaaaaaggaccattgataaagtaaaatatcctaagcctactagtggatatgtggtcatgttataatatattcagttacttaacacatattgagaacacagtaaggcacagttattctcacacttatacctccactttatttatttttttgagatggagtctcactctgtcacccaggctggagtgcagtggcacaatctctgctcactgcaacctctgcctcccaggttcgagtgattctcctgcctcagcccccccaagtagctgggaccacaagcatgtgccaccacacccagccaatttttgtatttttagtagagatggggttttgccgttttggccaggctggactcaaactcctgacctcgtgatctgcccgcctcggcctcccaaagtgctgggattacaggtgtgagccattgcgcctggcctacttcagctttcaaataatgatatatggtcactatcaacttacctttgatgctttcaaaattagaatttgttcagaattttttgtttacctataggtgacactaactaaaactatgaacattatgaaacaaacctccacttacctagtacaaatgaaaagaacaagcgggtagttattttcttgaggacgtaaaacagtcacattctaagaaatctaattctttcaaggcccaacctgtgtatcttggaaggaggtcactctgtgagcaaaggttaggaatgggacccctgtttatgcaaagtatcaaagttaagctgtctcttcctgatagcttttatgttagattgtttttcaaaaatgcctttccacataatctgaaaatgtcttcttcagacaaaagctttatccattggatgctttggtatctttcctcaagatagcactgatttagtgttttcaccccaataaatgaagactttgatcactccagcatctttgtgactcagggagacagactgacacattagtatacatttttctgtggatcgaaaacatgttatgtcttatcaaggattgatatgatcttctaacacaaatagagtttggaaaaggataaaataccattcacacattcattaataaatatttgagggctttctacggtactaagtgctgtgaaggacaaaggtggctctaaagataaactagacatggaccttgcccttgagtatttcacatggtgcttaaggtgaccagacttagttatggaaatgtaataattatagtacaggatagataatgtttcacgctgtgagtgggggtaaaaatattcctaacaaattttacatgaagaaatgatcaaccctaaaaatttgtacactgggccgggcacagtggctcatgcctctaatcccagtactttgggaggctgatgtgggcagatcacctgagatcaggagttcgagaccagcctggccaacatgatgaaaccctgtctctactaaaaatacaaaaattagttaggcgtggtggcacgcccctgtaatcccagttactcaggaggctgaggctggagaatcacttgaacctgggaggcagaggttgcagtgagctgagatcgtgccattgcactccagcctgggcgacagagcaagacactgtctcaaaaaaaaaaaaaaattgtacatttttcattgcttcatttgaaatcccaaaggtccaatataaatctttctgtggaagaccatctgaatgtaataaaaattgctattgaagaatccctaataaaaagtattcaaattgtggcatctttctggtactgaggaggccataaaggttcagtaatacccatccacatggctacctagagtcttaggaatggtcatttctcaagggactgtcaggctgtctgggtctgagcagtaatttgatgcacgtatggggtgctgcagctttagaaacatgtttccgtctattatctgttaattattatccctctggacagcctggcacatggtaagggcagctaagacagcagggtcctaattctgctcagctctctctgctgtaaaatgattgatttggtgaccggattttctccaagtttccttgtgtaggtaggtgcgtagggcaaattatattatcaccattttatagaaagggaaactaaggttaggagagcttaagtgactcgcctaaggcctctgataataactgatatccaatacttgagattagacttcaggcccagaaggacaaagcatctgcttctatatcacactcagaaccacacctaatatttgtggttaagagtaccaatagaggcccacatagcattaacctaagtatttaagtcataaatcaagataacaaactgttaaacaaaatatgatctgtcctcccaccttgacaaatacctcctacacggagctggatggccagttgtgaactatgaattcctggacttctctaagggccaggctggaaggtgtcatggaggataaagctgatcgcgaatgatccctcttcctgcattacgaggggcccaaagcacctgggagtgcacaccttagcccacaggtccaggtactgtccacaccccaaagaagagctatttcttggacacaggagtgagttcagagtcccgaccagatcctgaaagtgaacttggcaccatttgggcagagcagtccagagttctgactacatggagcgtatgtagtctagaagagggtcaggctccagctgggccatcagcctgaccggaagaggggcactgccagaggagagccagagggtggctgtgggcggaggtccctcttgggtttaagagccagtctgatcacacagcctctaaaatcaccctaagaaagaataacataccggaacattcatgtgacgggtaagtatggtccagtggttatgagactaggctctgcaggcaaatccctgggttggaatcttaggttggccactttctagttgtggcatcgcaggcaaattattgatcatctcacagcctcagtttcctcatctttaaaatgggtaaataatcattattatgaggagtggcagtatatgtaaaacgcttggtggacattacacattgggtggatgttgacagggttctctccagcttaggcgagtttgcctctgagaggtttttctggagaattatataagcttcataacatccaagcactctgacagtcaaggtgaaagtctcctctctctactaaattggggtgaggcgcgggtgtgggcaccacccaccccacccaaggcatcaggggcagcccacgtcccgcccggttctgtgcccaaggacttcacgctgcagacgtgcacggaagctgctttggccaggggtttggaggttaactagcaaacgcagcgtgagtcacggcggcactaggaactgaaaccgtgttagccatgcccaggtttaccctccgatgcggacggtgaaaccagggagcagtgacatcaggacggggagccagcgctgacgcagctccaccgcctccctccccatcccgcacccgccgccgccgagctcagcctgcagacaggtcttgacatccctcctcagcgaggagcgagggagtcggaacaagtcggggcatctcccttgcacctcccgggagcgccagcccagccaagtctagcgattgcccggcccgccagcgaagacgcttcctctgaagcaagcttggacactcccctacccctccgggtgaaacgaattccaagtggcccatttcggctcctcgccccctcccactccctgcaaaaaaacttggcaactctgcggtttcttgcggaccaaaacctgtaattagccctttgtgctccctttaaggggcagtcgtgactggaaaccgaggagtcagaccctctcgaaaacaccaacaaagaactatatttagttctgagctctcagcctaaatgcctcttattttttcacttttacttcaaaacgccagggttggggaagtgggaggcagagggtgggggagcaacggagaaagaacagctgtgcctccgcctctccgctcaatctctataaataaccaatcgcgagcggaggctactttttagccaatgaagcgccccaaactgataaagccttggcggcagccaatgaacaacacttaggggtgtcagactcgcgccccgagaccaatgagtgcagagtctgggagaggtaatttgagctagagtgtgggtgtgtggtgcaaaagcttcctacttccaagcccaaaaacctgctctgcgactgagcatgccctgaactaactgcgggcgccctgagacttctggattgggatgtaatccggtctccgggttttgaccgcactcgagcggggaggtgggtacgacccgcgggaccctgccccgagagagctgcaggtaccagaagctacccctttcctagtcggaacagtatctcagacttggagtacctcctgttttctttgtgcaaggctgcagtgcacagagtcggtcagagaagacagagtagcgtttctgtggcgaacggtttagaaaaatctatggggcaggtttgctccgccggctgctcgtgcattccacggcacccacaggacttcgggtttccggcccccagacccacgcccgcccggggctgagtgaatggcgtccttgggcctttgataacgggagttggcaagaccacagcctactccatccctgaggcggcccgccgcgcccacgtgcttctcgcagagccgccgcccttgtccaccactcccacagctgtaaaataaagcggcctgcatgcttcctacagcgctttcctcgctcccatatacgcacacacaccccatcttccagccagttcctaactcgcgccactccccaaatcggactcaaatccggagccccgcccactgccccgccccctcccggccccgcggaaaaccaggagcggccg

SEQ ID NO: 6844 - DNA, 751 bp, Homo sapiens
atcttcatatcatggtaagcacatgcgtatgtctgtgactcagtttcttagccagacttccaggtgttagttaattccttctcatttagttctactgtaatccattctgggaaaatgcataccacaaaactgtgtatcttgcagcttctttcgttatgcatcttaattccctcagaaggtcccagaactttatgttaaagatctgggtttttaaagacaatttgggggccttctaaagaaacaatagtagatctaattacaagtagtggattgcttacttcaaatttctcttttacaatttagaaagtttagtaccagtttatagactgagggagtagtagctactatttagatgctgagaataatattatcatgcttgggtggggaagaaaggcccttactcaaatctccattttcatttttaatgcttcctggacttcagttattttcttgcttttgcctcaagaataataaatatttttggttaaaattttttttgttcaaccctgttgttgttactgttattttcatagcacagtagtctacagctctctatagtagcttaatagctatttgctgaatgaatggaacatggagtgttacatctgaaactattctattagaaggtgaaaagtgttgattgaagaatggtaggattttatcttccctacccatgatagatttattaagattgtctttggagctatgtcttccattccaactatacagaaataaacttttttaaagttta

SEQ ID NO: 6845 - DNA, 5690 bp, Homo sapiens
agtgattctcctgcctcagcttcttgagtagctgggactacaggcatccgccaccacacccggctaattttttgtatttttagtagagacggggtttcaccatgttggcgaggatggtcttgatctcttgacctcgtgatccacccgcctcggcctccccaagtgctgagattacaggcgtgagtcactgcgcccggcaggaaaattctttttaatgcaacagtgcaatttctctcattcttgctgtatttggttttctggaacagaaggttgtgaggagacaaatcttaaacagactattaatttatatgttgagatcattatttaatattaaattgttaaacaacagctttgagacatagctattttgattctcctatttgtttttgcctgtaaaaaagtttatagaaaacttgattttaagaggttatttaatttaaaatttaagactcttctacacactttcctttgaagaataattaaaataggaaaaaagaatcagagtacaagttatataggcagacactgaaattagaaaactaggcagatctttgtctctcctagttatcatgctaggattttaggacactgttaaaatataaagacataaaatctcattacaagtaattgttcttacaaaatggcttcccaaagtataatatgaatagtatatagtagtgtgaaataatgtgtaatatgttgtctacccaaagtgtaatctgaatagtatgaatagtatgaaatgataatgatggtttggttgatgtacaaaatatttttagagacattactgaagattattaaaaaaggaccattgataaagtaaaatatcctaagcctactagtggatatgtggtcatgttataatatattcagttacttaacacatattgagaacacagtaaggcacagttattctcacacttatacctccactttatttatttttttgagatggagtctcactctgtcacccaggctggagtgcagtggcacaatctctgctcactgcaacctctgcctcccaggttcgagtgattctcctgcctcagcccccccaagtagctgggaccacaagcatgtgccaccacacccagccaatttttgtatttttagtagagatggggttttgccgttttggccaggctggactcaaactcctgacctcgtgatctgcccgcctcggcctcccaaagtgctgggattacaggtgtgagccattgcgcctggcctacttcagctttcaaataatgatatatggtcactatcaacttacctttgatgctttcaaaattagaatttgttcagaattttttgtttacctataggtgacactaactaaaactatgaacattatgaaacaaacctccacttacctagtacaaatgaaaagaacaagcgggtagttattttcttgaggacgtaaaacagtcacattctaagaaatctaattctttcaagacccaacctgtgtatcttggaaggaggtcactctgtgagcaaaggttaggaatgggacccctgtttatgcaaagtatcaaagttaagctgtctcttcctgatagcttttatgttagattgtttttcaaaaatgcctttccacataatctgaaaatgtcttcttcagacaaaagctttatccattggatgctttggtatctttcctcaagatagcactgatttagtgttttcaccccaataaatgaagactttgatcactccagcatctttgtgactcagggagacagactgacacattagtatacatttttctgtggatcgaaaacatgttatgtcttatcaaggattgatatgatcttctaacacaaatagagtttggaaaaggataaaataccattcacacattcattaataaatatttgagggctttctacggtactaagtgctgtgaaggacaaaggtggctctaaagataaactagacatggaccttgcccttgagtatttcacatggtgcttaaggtgaccagacttagttatggaaatgtaataattatagtacaggatagataatgtttcacgctgtgagtgggggtaaaaatattcctaacaaattttacatgaagaaatgatcaaccctaaaaatttgtacactgggccgggcacagtggctcatgcctctaatcccagtactttgggaggctgatgtgggcagatcacctgagatcaggagttcgagaccagcctggccaacatgatgaaaccctgtctctactaaaaatacaaaaattagttaggcgtggtggcacgcccctgtaatcccagttactcaggaggctgaggctggagaatcacttgaacctgggaggcagaggttgcagtgagctgagatcgtgccattgcactccagcctgggcgacagagcaagacactgtctcaaaaaaaaaaaaaaattgtacatttttcattgcttcatttgaaatcccaaaggtccaatataaatctttctgtggaagaccatctgaatgtaataaaaattgctattgaagaatccctaataaaaagtattcaaattgtggcatctttctggtactgaggaggccataaaggttcagtaatacccatccacatggctacctagagtcttaggaatggtcatttctcaagggactgtcaggctgtctgggtctgagcagtaatttgatgcacgtatggggtgctgcagctttagaaacatgtttccgtctattatctgttaattattatccctctggacagcctggcacatggtaagggcagctaagacagcagggtcctaattctgctcagctctctctgctgtaaaatgattgatttggtgaccggattttctccaagtttccttgtgtaggtaggtgcgtagggcaaattatattatcaccattttatagaaagggaaactaaggttaggagagcttaagtgactcgcctaaggcctctgataataactgatatccaatacttgagattagacttcaggcccagaaggacaaagcatctgcttctatatcacactcagaaccacacctaatatttgtggttaagagtaccaatagaggcccacatagcattaacctaagtatttaagtcataaatcaagataacaaactgttaaacaaaatatgatctgtcctcccaccttgacaaatacctcctacacggagctggatggccagttgtgaactatgaattcctggacttctctaagggccaggctggaaggtgtcatggaggataaagctgatcgcgaatgatccctcttcctgcattacgaggggcccaaagcacctgggagtgcacaccttagcccacaggtccaggtactgtccacaccccaaagaagagctatttcttggacacaggagtgagttcagagtcccgaccagatcctgaaagtgaacttggcaccatttgggcagagcagtccagagttctgactacatggagcgtatgtagtctagaagagggtcaggctccagctgggccatcagcctgaccggaagaggggcactgccagaggagagccagagggtggctgtgggcggaggtccctcttgggtttaagagccagtctgatcacacagcctctaaaatcaccctaagaaagaataacataccggaacattcatgtgacgggtaagtatggtccagtggttatgagactaggctctgcaggcaaatccctgggttggaatcttaggttggccactttctagttgtggcatcgcaggcaaattattgatcatctcacagcctcagtttcctcatctttaaaatgggtaaataatcattattatgaggagtggcagtatatgtaaaacgcttggtggacattacacattgggtggatgttgacagggttctctccagcttaggcgagtttgcctctgagaggtttttctggagaattatataagcttcataacatccaagcactctgacagtcaaggtgaaagtctcctctctctactaaattggggtgaggcgcgggtgtgggcaccacccaccccacccaaggcatcaggggcagcccacgtcccgcccggttctgtgcccaaggacttcacgctgcagacgtgcacggaagctgctttggccaggggtttggaggttaactagcaaacgcagcgtgagtcacggcggcactaggaactgaaaccgtgttagccatgcccaggtttaccctccgatgcggacggtgaaaccagggagcagtgacatcaggacggggagccagcgctgacgcagctccaccgcctccctccccatcccgcacccgccgccgccgagctcagcctgcagacaggtcttgacatccctcctcagcgaggagcgagggagtcggaacaagtcggggcatctcccttgcacctcccgggagcgccagcccagccaagtctagcgattgcccggcccgccagcgaagacgcttcctctgaagcaagcttggacactcccctacccctccgggtgaaacgaattccaagtggcccatttcggctcctcgccccctcccactccctgcaaaaaaacttggcaactctgcggtttcttgcggaccaaaacctgtaattagccctttgtgctccctttaaggggcagtcgtgactggaaaccgaggagtcagaccctctcgaaaacaccaacaaagaactatatttagttctgagctctcagcctaaatgcctcttattttttcacttttacttcaaaacgccagggttggggaagtgggaggcagagggtgggggagcaacggagaaagaacagctgtgcctccgcctctccgctcaatctctataaataaccaatcgcgagcggaggctactttttagccaatgaagcgccccaaactgataaagccttggcggcagccaatgaacaacacttaggggtgtcagactcgcgccccgagaccaatgagtgcagagtctgggagaggtaatttgagctagagtgtgggtgtgtggtgcaaaagcttcctacttccaagcccaaaaacctgctctgcgactgagcatgccctgaactaactgcgggcgccctgagacttctggattgggatgtaatccggtctccgggttttgaccgcactcgagcggggaggtgggtacgacccgcgggaccctgccccgagagagctgcaggtaccagaagctacccctttcctagtcggaacagtatctcagacttggagtacctcctgttttctttgtgcaaggctgcagtgcacagagtcggtcagagaagacagagtagcgtttctgtggcgaacggtttagaaaaatctatggggcaggtttgctccgccggctgctcgtgcattccacggcacccacaggacttcgggtttccggcccccagacccacgcccgcccggggctgagtgaatggcgtccttgggcctttgataacgggagttggcaagaccacagcctactccatccctgaggcggcccgccgcgcccacgtgcttctcgcagagccgccgcccttgtccaccactcccacagctgtaaaataaagcggcctgcatgcttcctacagcgctttcctcgctcccatatacgcacacacaccccatcttccagccagttcctaactcgcgccactccccaaatcggactcaaatccggagccccgcccactgccccgccccctcccggccccgcggaaaaccaggagcggccg

SEQ ID NO: 6846 - DNA, 5690 bp, Homo sapiens; identical to SEQ ID NO: 6843

SEQ ID NO: 6847 - DNA, 751 bp, Homo sapiens; identical to SEQ ID NO: 6844

SEQ ID NO: 6848 - DNA, 1265 bp, Homo sapiens
ggtcaaggacaagtgccttctaaggcatggataagggctttcttcttatgaaagtctagactgtcttactgtgaagatggccagggaggatagcaagcaatggcattcttgaacagtctaaggcaggtttctcagtgtggtcctgagaacagaagcatctgcatcacctgggaatgtattagaaatgcaagttcccagccccatcccagacctactgaatcagaaactctgggggcgagggctgaaacctgctttcataagcccttcaggcgatactgatgtaaactaaagcttaaaaaccaccgttttactgtgacttcatgaagaatataattgcaatatcacctaaatttttatcctggctgggatggggcagattcttactatggacaatttctggaacttacagtatgaagagcagatgaggagtttgagacaaagaaaaaattgtacagggagtttagtgaattttccatcaggttggccattactttctttctctaaagtctcaggatgtctggaagcaaggaaagacaaaagacttgaagcaccgggtgcatgctgtgtgtcacaagtgaggtggagagttggctgtggaaggtacagcaattcctctggaattaaatgaccgaccaacacagtaccaagaggatgaagagaagatgttttgcgttgctacgtgaatcagtggatgactcatatttcacttgcatatgaaatataaggcagttaacatcttgtttgtggcttaagcaaggacattaatcctactagatgaaggggaagttggttctgttgtcttaagggatgcccccttgtgattttggtcaactgaatgaaaaagaaaagatagccttggacttttttttcatgggaggtttggaggtcaagcatgtagaaggaaaaggctgtagtcatgaatatagaactgtctgctctccaccttttcctcactctacatttagtcatcacactgaacaggatgtggcctgctgacagtgagtagctgaagtgcctgtttggtaagtaggttagcattcatcatgaactctgaaagccatttcagagtttggctgctgctctgaccctgctgtggtacaaaaaacatggatttttttttttttaactggagtaataccaaattccctttagaagcttgaagtttgatactattgctttccccattataaggattatacagtattaattaattataaggcccaaagtttgttttggcaaataaagtattattctctatcatcatc

SEQ ID NO: 6849 - DNA, 1265 bp, Homo sapiens; identical to SEQ ID NO: 6848

SEQ ID NO: 6850 - DNA, 1265 bp, Homo sapiens; identical to SEQ ID NO: 6848

SEQ ID NO: 6851 - DNA, 32694 bp, Homo sapiens
caccccgctctccggccgccgccggtgcgggtgctccgctaccggctcctctccgttctgtgctctcttctgctctcggctccccaccccctctcccttccctcctctccccttgcctcccctcctctgcagcgcctgcattattttctgcccgcaggctcggcttgcactgctgctgcagcccggggaggtggctgggtgggtggggaggagactgtgcaagttgtaggggagggggtgccttcttcttccccgctcccttcccccgccaactccttcccctccttctccccctttcccctccccgcccccaccttcttcctcctttcggaaggactggtaacttgtcgtgcggagcgaacggcggcggcggcggcggcggcggcaccatccaggcgggcaccatgggcacgtccgcgctctgggcgctctggctgctgctcgcgctgtgctgggcgccccgggagagcggcgccaccggaaccggtgagtgaggacgcgcccctccgccggcgggcgggacccagccggggcaccgggagaccccgaggcgtaggtctccgtttgcccacccgcctcctaggaggcgcctctcggttctcctcgccttccctccctcccctccgtggtggcgcctctgagctgtcagcgccgaggctaaagggagccgggcttggggaacagcggggttcggggtgccccgacgcctcgcctgaactagtcttctgcccctcactccgcctcccccagagccgctgcttcgcctcgtttctcgccctcttgacgggcgccgaggtgcgtgggcttctgagcattgaacaatggttctgcctcctctgccaggcgcagtgttgggaaggaggcagagggccaagacgtgtgcggcagcctcgggcgcaccctcgaaccccggggagtgcgggagcggacggggggagaaggtgagcgcctccggggacgcggagcgccaggggccggccgggcttcagagtcttccggcggccgcgagctggcgcacgttcggtgggcggcggccgggagctccgcggagccgagggcacccggactgcgactccccacggcgcggggcgcctctccggcgtgcggggtaggggagcggcggggctttacgcaggactctgctctgggcgcttctcctctcccttttccagcctcgggcggcgtttggaaaccgctcgggtctcccgtgtagctgaacgcggagggggagtggaggggagacttaatcaggttagtttgctgaccctccttcccggtgacgtttcctcgagaggaattgagtcctaggctagtgactgtaattagccttcattctacacaatagctcaaaggagcagcgcgagagcgagcgtgtggccctgtcttgttgggaagggcggcggtgactactgtcggtccccagactctgccccgcggcctggggccccgcctggtcgtcagccacgttcccacttgggcctcgtaactttcctggacaggcgacaggaagcctttctgagaggactcagtcggaatcctagcgcgtccccgaagtgatcttcagatgtgacgccgaggggcttgcttgccagctgcagggaattgggactgaaagccgcccaggcccttaacacccgttccagagtccctggctcccgtcgccgggtggcttcaggggccctgccggcctgcagtcacgtgctcctgaagtgagagcgaactttaaagcatgtggtcaaggagcctgtcgggcagcgcctggggtttttacgtctccgaatgcccctgccctttggttgccactgtccggagcgtgtgaactgggactggcctttccgccctctgcgattggttagcggtgcgatcacgtttaggttggtcacatggttccgcggactcttaagtgggcagcatgggcagtgttattttcaatggaaagtaggagactccacaggctcttacgggctgttctctcaaatgccttcccctgcctggactctttgaagaggacgaatgtgtagtgaacatggaatctgatgtgtaacaagcctgagagcctagaaaagctctgcttacaagagtttccaaacgctagcattaatcattaatagatgagtaatactaacttattaaacgatttctcagtatagtgccatgacttgcattatgccttttgtaacatttcaaaacgctaaggtataccagaaggagggacaattatccaggaaggtgagagaaaagtttcgtttttgctgcatgtcccttccactagaggttaactttaccttatagaatgctaggaatgcacctaaactactgacatgagttagtcaaagccagatgttcaccttgtattgggcaggtgaggatccttttcactttgtcacatgtgaaatatttgacatgccatgaacaatggaaaaacaaattcttcaaaggagaggaagcagattcttccagaactggaggaaatttgggctgaggcagttattgaccctaaaccaatcccaaccggcatctgtcttaagttcaaagtctcagggcatgtgggctgactttctaccctggagcttctacacataccccttctgtccactggcacatggtgctgttccacaatactcctggacaagacaggtgaacactgagactctggcaaggaacttaaggctaacaagaagttggtatacctgattgcacaattcctgggggttctgggacattttccttcagcctaagtagtcaagattaagatctgtggtatgatatattctttaaggccagagtctaaaagaaccaaggttttttgagagctattcatatatggctagcaactagcctaagaatagaaagaaaattccctcattgtgagaagtgggttggtggtactggtggtagtaatagacctggaggtaggaaactggttggcatggaaagtaaacttggctcatccagatagcaccaatgaaggtatgacgatgatagtaccccttatcaaagactgatcactcatgtgagcagggactgcgtaaaggaaggtcaccagccaagccctccttggcagtaacagcttcatgaaatccagtgtagctttgttccctggatcaccctcttgcccactttatgtggcatttacctatagtgcctgtcctgtgtcattttgattgtttgcttttatggcctgagtccccagatacttaaagcatgtataaaggtcaagtagagctgccaaatattaagactttagtacaatagactgctatttaacactaaacattgctagcaaaggtgacagtctccatgctcaaaagaagtgaagacctgatccaagtgtctctacctgtcataaaattgaataaccgtaaacttgacttgagtagtttcattacagttttggaagaggaaaaaagttgttacaagccccttctgctccaggagaggtatcaaattgataagacttaacaagaactcctagagtagaacatgaccataagatcaagggaacacatagtacccagccgtgtggcttcgggttttgatcccaaaccttgaagacttggcacacagcatagaaatacagctaattcattttaaatatctagcccattttctgtttctcacagaatgtaaatttgttcttttcagtgcagggaaaagtgtttaagacaaggcagttgcctacgtgacttaaagtaatgattgcattcactttggatactgactttcatttggaaaaccaccttcacatactagcctataagaaattaaatgtattaaagggcttgatgaggtctataatgatgttcgttgtaaatgtacctgccttagggagctccttgtggtggctaatacaactgccctctacatggttagttgataaattcaaaattgcttagtttggtccctactaatttaatctcaaaagaatacttggacaacagagtgatagactactttcaaggcaaacagtccaaaaatactgtctgctgaggttatgggcgagatatacttgttaagcggaagtaagtagtccagggacaattttttctgccacctaaagagttttgggctagaaaatctgaggactgatagtttttctgaagagttggggcagagtctaacctagctataggcgaatctggcttttaagtaaaaatcatctcaattttactgtctgcatttttcaaactaaatcagtgtctctttgctaagttcgtctattggcttgcaacaaaaactctaaacactgttaataccacttagttaagtacactaactgcactgcaggaaccaaatgagatggcaggtgataacacaggttaagtgtcctttatctgaaatacttgaaaccagaagggttccacagagtttagattttttcagattttgggacattcacacatacataataaggtatcttggggatgggacccaagtctaaacatgaaattcgtttatatttcacatacaccttatacacatagcctgaaggtaattttatagactatttttaatgattttatacaagaaacaaagttttgactgcaacttgtcacgtgatgtcaggtgtggaatttccacacttacggcatcatgtcagcactcaaagttttggattttggagcatctcagattgcggattagggatgctcaacctggaccataaatttagcatacttttccccttgagtgaagtctcctaggaaagcttgggcccaacagttattttgagtctctaagcaagagaatgcctgttaggtcctgtgagagtaagtgtggagattctgttagaaatgtttcaatgcttgcttagagatcctttgcctactttgtagtttagagatgctggaaactataagatgaagcctctggctagagcagctgattttgccaacttgggggccatctggggagcctttatgtatgtagacgaggtggtggggatggggggacttgcaatttgccaaccaagggacataacaaagcctcggcgatagacagcatttgtgagttacatcacaagtttgttagaacttaatagttctcccacatgctgtgagtaaacagggtttctattttatagactgcctctaatctttcattttcttaagaaagacttccccacatctgaggtattaactgatctgtatgttcactaagtaggttgcagattgatgttggtcatctttgtgcatcttctggaaaccacttaatgtacatctactgagtacctaccatatggcaccaggcatggggacagagtgaccatagcactggttccttcctttgtggcacttagtctagtaggggaatcaaagcaggaaacagccaaagaccgcttggaatagaagctctgaagaggagtgagcagatccagtgtttaagacttaatcataaaagaggcagatagcagctggagatttctggaatttccatatgctatctgggttctagcttatgaagtttccctaaaattaccaagaacttagactttaatttcaaaaagccagaaataattctatgtctgcagataatcctacaaaagtgatatgactaaagcaacaatggattactgccagtattaccaaagagcattaaaacatgtcagaagtaaaatctgcgtctgatatatcacactcaactttaccagttagccgctgctaaccttctcaggtgttggaacctctcttttcacatggaaatgaagccaacacacccaaagggacacactcattctgacagacaagtgtgtgaaaatgcactgtttttaaatgataaattgcaacaaagaggccgggcgcggtggctcaaacctataatcccagtgcttttggaggccgaggcaggcagatcacgaggtcaggagttcgagaccagcctggccaacatagtgaaagcccatctctactaaaaatacaaaaaaattagctgggtgtggtggtgcgagcctgtaatcccagctactcaggaggctgaggcaggagaatcgcttgaacccgggtggcagagatttcagtgagccgagataacgccactgcactccagcctgggctacagtgcgagaatccatctcaaaaaaaaaaaaaaaaaattgctacaaagatgaggtgaaggtaccctcataggcctagggaacagggacctttataacctagagtctttcaaagtattctagctagtaaaacaaccagtcacacttggtttcaagttctgaaaaagctgggggaaatgtttttgacaaaagtttttagttcagaccagctttattagtaaactaataaatcaactcatgcacccaagactaccaactagtgcctagagaatataggatgtcaggcaccaggtcctgagttacaaatgtgaactgcagcccatgccttaggggatctctgtgtctaaaggtgaaaaatggtagctgaactcatctccttgggtgatggctctgtgacagggactattatgagaaagcagccagaccatacctagtttttccaaaaaaggcattgaggcctcattcaagaatacaatctgagcccactcctggtgaatgggtggacaagggcaacatgaacaaactgagacaaagcagccatgaggaagggcaaagccatggggaagtgagtgggtcccctttgagctgttagctcagcccgtatagcagatggtgggtagtgaccaatagggaaaagtctgaggaaattagtagggaacttaatcctagagatagtggtaagccaagaaatgaccccattcttggctattctaggttgcttgaatcactaggttgcttgatatgggtagagaatgtggcagcctggaggcaaaggaacaagacatttaaattgacatcaggtgagaggagggcttgggcatagccagggattgatggccaaatgtcagggaagaatttgggctcatttctggagtactgatttagagtaagtaatggggccaatcaaagatagactacacagggagggaaggatggattttagaagaacctctgcctagtaagacacccaaataaattttttctgcaaaatagttttgagggctttactcacatgttactatcatgtgtattgtaaaagaggcatttatctcctgtgtccctcctgtgatgaacattaggccttatgagggtgttattggtatatgctacaaccctgaaaatgaaagagccacttacattatgggtagaagctgtagcttcttaaccttagtgcagtggttctcaaagtgtggaccgaaattggcaacattaattcaatgttaattgagttcatgtgtcaacattgactcattagaaatgcaaacttaggccctgttctagacctgctgaatcagaatccaggctggggcccagcattctgtgttttaacaagccttcctggggattctgatgcacacgggagcttgagaacgactgacttagtttaccactcacagaagctaacgattttcaaggtatatccgatggagggcctttcctctgacttgaaccctagacaagaaaaccaagagctataatccttttagaagacttgctgaggaattctagaaacatttttaaaaacttagaatgaggaaggaaagcaggcctccatctcaacaacaaggctaaatctaagttgatgcttagtaacacagtatctagagccagtgcctgggttcaactcctagctctgcccagggcaatctgggacaagtgactgtactttccttctctaccaggtttcctgatctgtaaaagaggaataatagggccaactgtgcaggattaagaattttaaaagctaagagatgtgaagtcttagagcagtgtttgaccaacaacaaaaacgatttgattatgtccatgattcttaagatcaatttgatgtaaatggaaattgaatgtaactgacaattgaactgtaaaattcacttatttccatgactcagaagaattagcctacatattcaccactttttagtggcccccgaactagtgtttttgttgctgtttgtttgtttgttttcgagatggagtttcactcttgttgcccaggctggagtgcaatggcactatctcggctcactgcaacttctacctcccaggttcaaacaattctcctgcatcagcctcccaaggagctgggattacaggtgtgtgtaatgcctggctaatttttgtatttttagcagacactgggtttcaccatgttgaccaggctggtcttgaacccctgacctcaggtgatctgcccgcctcagcctcccaaagtgctgggattacaggcatgagccaccgtgcctggcccaaactggttcttacaatgtttcagaggctgactttaaggccagagcacaatctttgtgcttgacagctcagaacatttcccttaacacctgttgtggtactttgcctcttacaaacccttctccccttaggaaaacttttttgctgactcagaaatttgcttgtcctgaaaggagttttagcttacaaatagaaacactgtcattaaagtggcaagcagtagaagtgaactagactaaaaataaatgcccttggtggccccagaagtgccaaaacaaatggacggaaggaattccagcaagtaacacccatatgctcaagcaatgagtaagggcatgagagatgtaaatgcttggccctggtggccccagcagtgtggcagcatgagcctctgtgcaggctgaagtacgctctgagcctggtacccagagacactttctctatattctgggcatgcatcttggagtgctcctgccagggtgctgctcggagccccatagggagatttgtagtccgtttggaaggcttggtatttactcgaaggcctatgcagttttttactgaagcttatgtattagtcctccatgtcaaccgctacagggaaaattagacaatggcggctgacttctatatgcattaaaaaccctgagtttccctctaggacattggtctagacaaggaatttatgaaagagacctcaaaagcttaggccacaaaaacaaaatagacaaatgggacttaattaaactaaaaagcttctgcacagcaaaagaaataatcaacaaagtgaagaacaacctgccgaatgggagaaaatatttgcaaactattatctgacaggagactaatatccagaatatacaaactcaaacaatggggaaaaaataatcccattaaaaagtggagaaaggacatgaatagacatttctcaaaagaggacataaaaataaccaacagatacatgaaaaaatcgttaccattactaatcattagagaaatgcaaaccaaaaccaaaatgacatataatcttataccagtcagaatggctattaataaaaagacaaaatacaacagatgttgctgaggatatggagaaaagggaagtcttatacactgctggtgagaatgtaaactaatacagccaccaaggaaaacaatatgcagatttcccaaaaaactaaaactggaattaacatttgatccagcaatccctctactgggtatctacccaaaggaaaaatcagtatatccaagggatacctgcactggcatgtttattgcagcactattcacagtaacaaagatacagaatcaacctaaatgcccatcaataatgaaagggtaaagaaaatatggtacatatacacaatggaatactattcagccatgaaaatgaatgaaatcatgccatttgcagcagcatggggatggaattggaggtcattatgctaagggaaataagccaggcacagcaggacaaatatcttatgttctcaatcgtatgtggaagcttaaatatttcattccatggaggtagatggtagaaagatgacagagactcagaagtagggggaaagggagagcagatgaaaggaagtgggttaaagaatacaaacctacagtaaggtagaagaaataacgtcaatgactgtagttaacaaaaacgtgctcgcgtgatggacaccctaaatcctcggatttcatcagtatagattcattacatacatgtaacaaaattttacatgtacctcataaatttatacaaacaccaccaagaagaaccctgtttttcttggagccagtgaactgccaatgtgtctgtgtagcaaagttaactacttagagaagcaaggctcccaggaaaataggtccttgaagttagtgtgcatattctatagtctgattccatctatataagtgacagtaaaagtgagaattttttgacgctccaggaattcattcattacaaatttaaataggcacataagtgagtaggtacaagcgacttccaaccccctcacccaaaggagcagagatattctaaggattagagctggaagaaaacctagacaatttcttaatagaacccttttcaaattcttacaccaaaatccaatattcaaaagaaagtcttggtagaggcagaggtggaacacccagggcctctgctactgtggcctttccctccacttcaaccacccctctagcctgaggcattcttgtgaaacctcatggctttaaggaacccactaacaattgcattttgccccatcttctcacctgtctgagcagaaatgcctagcacttctacttccaaggtattttttgaggtgtcattggctttagtttagcctgaagaattaaaagaatctcgagtgtagatgatttcaagctcaacttgttccctttatgaaagtataatactgaatttgagacgtaactttcatggatggaaatagactgcaggtccacaatcctataatcccaaagctttggaaaccaaaagcctcttaactcatttggtgctttcagttctcctagagctctgcacagcagcagtcccagctgagcaccagaggtggataggtagaaccttttaaaaacttgaacagaaaacttaacagtgttccagtcaggtggctaagggctgggcattcgatttagtgtctgagctctccctctctgtgggaagcagagaattaaacagaactagggagcactttctgcccagtagcagtccctcaaaacaaagtgcttaggaaactaggaaacgaagaggcatagccataaagcttaaggtctttatttgcctgtctttaaagagtcctttataaagccagcttgtcttcccacccccaccccaatgtcattcttttaaacaggcagggacattttagtagcacactgtactcctaatgcctgttgctactccttattggagagagagagagagagagagtgtgtgtgtgtgtgtgtgtgtgtgtgtgtgtgtgtggttgagagagagggagtaaaacacagctttatgatgatcaggcagaagcttgagtaaagtggaaatatctcggataagaaaagctagaaattaaactcctttttggcttcggatattttcttagtagaaaatgctgatgcctgtcctgagtctcctcaatatagactcttagagcagagctgctaggattttaatagaatttattactgttgatagcttgtatattacaactaaattcagagaccctctttaaggcaatagtagagtaaatatcagccttgggatactgtatgcccatacttaatcccaggccactctgagtgcctaggaaatctgtagcttcaaactcattcttaaggaggttgtcttccaggtaccttaaccctgaggtgggaaactatcaattgacattgacctttaagttgctattcaaatctgattacaaggtttccattttgattatgtagatatcaatgtcaatgttgttgtctcattttgacttaataacctttggtaactaaaaccttaaaaaaaaaatcagaggctttcagtctttactgtatcttaactccaacctgactattctttccaagtatatttatacctatgttctcagactacaaatcattcttttcctgattactcaaggtagagtcttaccactttcacagtccccaaaggtagtaaggtcatatagaactgcaagacacgtaccctcagcattgagaatattgcaaacatattaagaatccagtggcaatgaggggagaggggagaggcaccaggtacctcagatttggtttagcagtataaaacaacacaggtgatgcttcctgacaacaatctctaccctcctctagttccccttctaaatccctagtatattacaaccaataaaacgtgaagaatgaaaaagtattatgaaatgaaggtaggaaaccattctgctttgtagctgggtcctagcttaattagactcatgggagcagagtgatagatgcagttttaaaagcaacatatttaatatccaaggaagtaaccacacccatatggtcatcttgatttgggccaaattttaatctccctgggaagagccacaaagcacgaaatgctcccagacagcagggagtagctgacactagggagaccaactagggtattgtgcacgtaacacaagagttccagtctgtgcttgtctctgtaatatcagttcttatgccagcatgccacagctgcaaatgctgaaaggtggcaggaaatcggaaggccttctgctgggacaccctccctaagtaatctgcgtgaactatatgattccactgtttttctcaaatatttgcagtatatttgctttaagggccacatctgtgccttttatcgtgaagcaatcacatccgccagaaggacggaactgctaatgataggaagcacctgaacattagctggcctgtgccgggcaaaacaccaactgtcccacttagaagtcttagttcacaccattgtgtgaattaaatatccatacattaagcatagaaaaccagattcagagaaatcgaaactacatcttcagctccacctcactttcctttcctctcctctttaaatgacaaatgatcttcctttccctcttaactatactttcttgttgcttttatcttggagctgttttttaaagctgtgtttttccaattagacctcagtttctaagaggaggaatcatgtattaaatctctatttctaccctattcttgctgctccttctaaatcttcttcactgtgcttgtaatagaaacatcattaatggataatagtatggatgtggacaagaaatgccattaaaggattaggacttggctgattatagccacacacgtagtttcaacaaatgagagaaatgagtccacaggcagagatgatgccccttgtggtctctgggcaatctggattccttctattttcgtctggctccatttgcccgagatcactattccagccaccatgcccaattttcaggtaccaggaatgaagagatggaaagaaaatggatcctctatcctcttaaggacatttcccaaagttgtatataccattttagtttacattccattagtcagaatgtagccccttggctgcacctcactgagaaagaggcttgaaaatctagtatttagtcttagcatgcacccagctaagaacgcaattactgtcagtcactggctgaagagccatcctactctggcccttaggatgtcatagcctgccgagtctgcagtatccttctgagaaggtccccatccatgggtattaggtatcttgaatctataaccaatccttgctttaccgaatgttcccttcttattctagggagaaaagccaaatgtgaaccctcccaattccagtgcacaaatggtcgctgtattacgctgttgtggaaatgtgatggggatgaagactgtgttgacggcagtgatgaaaagaactgtggtaagtaaagagtttgatgacttatgcattttgttaaaatatgatgttatcttagtctgcaaatgtattgagattctgaaaataaaatccacttctaacaattgctttgaaagaatctatacttctctgtgtaaaggaataaaattgaatgtttgacgtggggttatcaacttgagaatggaatgataaggtgatgttccatttaaatgacaggacctagtttatcttagatcagacaaacgtggaataggaatctgggagaagggagaagaggaccagaaatagagacaaacagaagattgcttagaaggggcttttttccccttttaattttcaaatggctctgatcctagaaaagaaggcaagccatggacatgagaaaatcccataaagtttcagggggttaattaacccttgacatagaaactacaagccagcacagatcaaagatcagataaggattcttttttaattctctgcctacaatagttgctaattctaaagcattagcagggcggaagacattctctccccaagagaatggggatacagtgtcacagccatcaatcagcatctattaaaagatcactgtgagaaatgcctatgtatgcaatctatacaacctcatgtcaagccaaaatagctgagaactgcatggcaagattacatttacataccatgaatacatgctgaaatttgctctacgatccctttgttcagggttgtaaacattctgaaacaatattctatgtgaatattggtgctaacattgtcatttatcttttaaaagatgttatataaagatgttcactatacaaggtagaaatacagaagaaaagtagagtctaaatgtaggtttcatcaactgccatcttgttatgcctttacctacttcttcatgcatcattattaaaatgctataaagtatgcatcatggcagaccttgtgctacacctgatctctcagagcagtatcacaggtgttttcatgccaatgtgtaaagcagatcagtagctcctttagaagcataagaaagtccattctaccatctcagggaagaaacttacatccagtctcaggaccaagaatagttctcctgtgcaacactttatcatcatttgcattttaacactaagattttaatctattccacaagacactgagtctcatgctatttctgggttacctaggtaatttagttctcttactaaatatctccttagagagtcctcactcttgtcaactattttcctgttgtaagttgcaattttttttcctctcttctaaacgatatatttggcaaaacccattgcttgttcttaaaaagtaattattctctttgtgttgcacaagtctttttttaccatgtgactcagtaggaactaacctgggtcaacttgggatttttctaaaatagtcttgtataagtactctctactagccacatggtaggagagtttggcaaagaaaaagaggtagatgtatatctaatcaagatcatttgaggcaggaaaaattatatccttagccaaaatttgtctctacttcctgtgtgtgacagtagagaaagaaagtagaaatattacaatcagggaaggtctgagtgcttactttgtttctctatggaagaggaaagctatagaattacttaaaacttccaaagctgcctcctatttttagtctaacctcttaatatggaacttggttacaatatttagcttagttctttatttccagtatgtcaatgggcatagtcaacttaaccttagattctattagccatgtgcttctgttggtcccattaactcattcttttataatgttaggctgagctaattaatcagcaacctaagtactctaaatatgtaactgctaattctcttcctctgtagcacatctaaattcctatttgtctctcaaggcccagttcacatatcctttctttaccctcccagtctatgctccaaatgaagagagagaaccatacggcaatttgtctgtctctgtttatcttttgctcaaacactgtggtatacagccaatctttcacatcctccttacgttttctaagacttaaaatcatggagggccgggtgcggtggctcacgcctataatcccagcactttgggcggcctaggcaggcgaatcacgaggtcaggagatcgagaccaccctggctaacacagtgaaaccccgtctccactaaaaatacaaaaaaatttagccggacatggtggcaggtgcctgtagtcccagctactcgggaggctgaggcaggagaatggcgtgaacccgggaggcggagcttgcagtgagccaagaccacgccactgcactccagcctgggtgacagagcgagactccatctcaaaaaaataaataaaaataaataaaaaatcaatcaatcaatcaatcatggggtctctttacagccattccgctactccctcttttgtagcttccaaagaatatcacaggttgaattatagcaactaaccctgcagaccctctgacttcttcctccatgctcaggagaacacagaccttgaatagcacttaattcattaacattagtgtttgagtttttcagtgattttagaaacaggcatgaatctaaagctagcatggccagtcttgtttccttggctgtgtaattcaaggagataatcctttatagatcatcataatttgtcaacccatcttgagttctagaaattaactgtaatcactgtctctctcctttacaatatcttactctcaaccagagtggtccaagggcacactctaagctctgagagttctacctgctttaaaccagtgatttgagaaacagtccctttcaaatgttcatcaaattgtgaatttttcacttatttaccttcacagaatatatgttatagaggaatgttttaaaatagaaattgggtagaaggtataagcatataggcaagaaagaatataatctaagaaagataagcttagggtatcctgtgtggctactttatatcaagattcatcctgctccgtgattccttcatgggtaggataatcaagctgcccgatttgcttaggacagtcctggtttatgcttatcttccagatataattaaaagtgtcccctttctgctgagactgtcccagtttggacaaaaaattgcatggtaaccctaagtataggggaaagacctgccccaggaagaattagcaacagaatcaattcctctccttaggctattttaacattagcaggcagttatggatattagcactgacagcttcaatgacttttagctggttgatgttagcctaccccttggctagaaaggctaaaatcttctctcccttgaattctaagtacaacatctcttgttacactgattgagttttctcccctttctacctgatgagtttctttgcccctgtagaccagtatgggtgacaatattcagtactggggtttggccttcattctccacactaaacacatgtgttgttaggggatgccccttgaacagtatattagtcagctcagactgctgtcacaaaaataccataagtgggtggctgaaacaacagaaatttatttctcatagttgtggaggctgagaagagacctgccagtagatctgatatcaggtgagggctgtctttctggtttgcagatgaccatcttctcactgtgtccttacatagtagataacaaagagagagagagtaagcgctctggtttctttttatgagggtgctaatcccattcatgggggctccaccctcatgacttaattacctcccagaggccctacctcctaataacatcatgttaggggttaggatttccacacgtgaattctgggtggagacaaacattcagtccccagcaagcagttctactatgatccagtcagaagatggaatgtttagctgttaaatgaagtacttgaatgacttggaagaaatgcatgtagaaaatgaaagtgttacttaatctcaacattataaaacaggcaggaagttaaatgtaaggtatctccgagttgtaagataatgggcaacctctgtctgaccttgacttcagtttcctccaagtctctcaaatgagcatcttcctcctctgaaaaaaaataataatttttctgaagtttcccctggatattggcagttgagtgcccattgactcagcttttttttagagcaaaacatgccaaaatgcagtatgagccctcatgtgaagctagggctgtgggtaaatgacttcaactttaacccttcaaataaacgtttgtagtaaagaagacgtgtgctgaatctgacttcgtgtgcaacaatggccagtgtgttcccagccgatggaagtgtgatggagatcctgactgcgaagatggttcagatgaaagcccagaacagtgccgtgagtgtaacttgctttggccttgaactttgccaagttgttcggtgtctaacatttctaagtattgcttaatctcctacttggtattcatttttctttgcctgccttaaagtttaggtcaattgactccaagggcagtcaaatcattaccagtttatcagcctcctttaaagaatgttctccctggtccaacaagactgacattctcttgggtagcttcactattgaatacttaaaactgaagtcagcagattcaatcaagaactccttgactaggtgcatagatttcaaatgtctgtttataataactgagcagatggtactctggtcctggaagctaagtcaagaagtgagggttccctatgggccaagcaaaagcttttagaagcacagcttatcatactattaaaaagctattactgaagaggtaaggtagctagtaattgggtgatatagtgactcctgacacacatgtaacctcaagttactaaaatggagatcttacagcatattcttaaataagagaaacttcataggtatgcaagtatatacctgtgtccttaggaaaaagtctatgagaccataaagaatgatggtttgggatcatataaattgagatcacacgaatgtcaaggcaaagaaagtcttagagtttgagtcagtagaggcctgcactggtagaaacactaaaaaaggactaacatgaacacagtttaggtctaaagtgtgattatgaaagaaaatcaaatagaaaggaagataaggctgttactttcaattttctagataagaagtgaggggagtaatattggtcaaggcaagtgagttcaaggcctgtgagctaaagacaggttgtgtaaagattcagcctcaacttttagtggagaatgacctggtcaagtcaagcattagggcatgcttctactttgcaagatgtcaatctaaaggacattgtgaaggaggcccataaaggaatctaggcaatagaagattttgtaggtgtttgaccatctgacttttcatgtatttgagattagatgacaatatctaggtgtgcccacttgacatccaacagataaatagtggtctaggagcaggccagccaataaacttcaccacgccaagtaaaacaaaagccagaactgagcacgccatgggaccttgaaggagtgacgtggtcaaagctgtcacgtacactgccaggtagcataggttggcacagcttctaaggagtggagctgatgaaagagctccccgggcttcagccagttagtagaatttcaccagtgtgccaggctactgagtcacaggtattagcgcttccaggcagcacaggagcagcagctttgcattgatcagttctgaggctcttttgagactgtatatcatcaacagatatgagaacatgccgcatacatgaaatcagctgtggcgcccattctactcagtgtatcccagtgtcctggagatgtgatggtgaaaatgattgtgacagtggagaagatgaagaaaactgtggtaagaagatcagtgttgagtgacgtaacccaaagacccttttcctaaaggaagggtgggcaggggaaactaatctaagcctgaagacgcactgacattgactcacttttcagtgacttcactatctgctcaattacttgtccttcataactgccctaaaaccctaaaagacattcatgtggcaattgaccatcgcttggtgtttcttttaggcaaatagaaataagaaggtaagtcattcaaggcacttatatatagaagtagctcagggaagcagcaattgtgtgggcttttgttttgacagtaattcatgtgtcttttgcactttggcacaataaaattagaaggtgagtagggttggcaaacacattcataggtctaaatttgattgggttattggaataaattatttgagtattatacaagcatttctttgcccatgaactagattctggcataactttcccagaaaaaaaaaaaaaaaagacacagaagcatgaattaacatcttgcctcagatacccaaagaaaagtctacccaactggtgatacctttgtctcctgttgcagttcctgtctctgaaagctaactctgcttcctattctttcatgtttctggtcttggaaaatctttaataaaatgctgcatgttgaaggtgagggcctgggaaaatcactaggttgaacaaacagtgctttgaatgttctttcaagctactgccctttttatagggcctctaaaacctacagctcccaagtctgacaagcatgggcctcctgatatggtagtagtcaagggagctcagggcacttacagttgaaacaccagtcttgtgtgtagaagtcgcctcctgaggtcaataccactgcacctagtccaatgagttttagtgttcaatcctagaattgggttttctgtattggtaagccctggtgctgccaagtgtttcccttataaatctagactttgcttcccaagagagtcgtggtctctattctaattgccaccaaattgtgaccttgaaacatttggcaggaatttaagtcaaagtaccaattggctagtaggactagcttatcattgtcagcatacctgattgttaaatggtgattatagccctggcagtgactttttcaaaatggaaagtgtttaagacttgttattcctgatccttatttaaaggaccaaaaagaggaaccatatatggtggtatgtggttcacctcttttggtgacaaagtcttaatgcttgttgtgagtattacgttgcatgatattctcaactagtgataagatctgacaagcagtatgttgattcaaggacaactcaatctctgccttccaaattgaaatcccttgttacagtttgttatttatgatggccacttttagaatcaattgtggttctcatctcaaattaatttccagtcttcaactattttcttggttctttatttctgttcttcttatttattgtgtgccttcattttttgtacaatgagactgtacaaaagttcttgatttaactccattgtagcctttaagttgggctagtaagttaggattaatgaataaagatcaatgtattagattttgggacaagaatcttgaacggaccaatcttgatgcattttcagtggggcatcctctctcttaataggcaatataacatgtagtcccgacgagttcacctgctccagtggccgctgcatctccaggaactttgtatgcaatggccaggatgactgcagcgatggcagtgatgagctggactgtgccccgccaacctgtggcgcccatgagttccagtgcagcacctcctcctgcatccccatcagctgggtatgcgacgatgatgcagactgctccgaccaatctgatgagtccctggagcagtgtggccgtcagccagtcatacacaccaagtgtccagccagcgaaatccagtgcggctctggcgagtgcatccataagaagtggcgatgtgatggggaccctgactgcaaggatggcagtgatgaggtcaactgtcgtaagtagctttctagcatggcatgttcagttctcttccctgtatcaactgggacaatttgctggcttcattccatggtgtttcctccctttgtagcctctcgaacttgccgacctgaccaatttgaatgtgaggatggcagctgcatccatggcagcaggcagtgtaatggtatccgagactgtgtcgatggttccgatgaagtcaactgcaaaaatggtaagggtttcttcttgttggttaagcaatggattgctctgaccagacccactcatggaatctctcttctttgtttctctttgtagtcaatcagtgcttgggccctggaaaattcaagtgcagaagtggagaatgcatagatatcagcaaagtatgtaaccaggagcaggactgcagggactggagtgatgagcccctgaaagagtgtcgtaagtgtacttgttgttcaagtacagatcctggaagtttgacacaatccagtatagctaacactgtgtggaccccccgtgatggctagttaaacttttgaatgtactgaagttcaattgtagacttcagagtgaaactttatgacttaaaagcccaggtaggacaaactagtttatagtttttgtttttgttgttttttttttttttttttttttgagatggagttccactcttgttgcccaggctggagtgcaatgatgcaatctcggctcactgcaacctctgcctcccgggttcaagcagttcttctgcctcagcctcctgagtagctgggactataggcgcccaccaccacgcccggctaatttttttttttttttttgtatttttagtagagacagggtttcaccatgttggccaggctggtctcgaactcctgacctcgtgatccacccgcctcggccttccaaagtgctgggattacaggcatgagccaccgcgcccggcccaaactagtttatagtttaacctccttaaagataactgatcatcaatagagaaacttgactaaatgcttgaccagctggtaacttgccgaggagttagataatccaccctgaaatatatacctataaaataaatgattaggtcttagacaaatcgtgggtttgaccaggccaactagataagttatcacaaatagcctgggttttaaatgtgaaagatattaattgaaaataagttgtcaagtgactactacatttttattccagatataaacgaatgcttggtaaataatggtggatgttctcatatctgcaaagacctagttataggctacgagtgtgactgtgcagctgggtttgaactgatagataggaaaacctgtggaggtgagtctaagaagaaaacctggaccctgcaggtgatgggaaaggatagtatgtacctagtaaggtataggagcagcaagactaattctgatttccctcccagatattgatgaatgccaaaatccaggaatctgcagtcaaatttgtatcaacttaaaaggcggttacaagtgtgaatgtagtcgtggctatcaaatggatcttgctactggcgtgtgcaaggcagtaggtaaatgaacttggactggtatggctgttgtacctttatgagtaagtgcctctaaaaggtacagccagtgactacaatagtcaaactaaacatgaaattgtacttgagaacaatgctgctaacctcataatacagcagtataggtcaaatagcagatctctcccctagatatgtaccttgatcattccttttgcatatgataccatgaatacctaccaggtttgcatgctctgtttccaaaacttgagtccaactcaaacaagtgacttattcatcactcaccctgttcttgaaggctgtaaccccacgactgccttcctaaactgtaggaagcacttgcaggtcccaggggcaggaactccagaacagatactactgaggtattccacaatacctttattttctaagtgctcctctgctgggaggaggtggtttagaaagaccttgccttcttaaagcaaaactaagtaacccagacttccatcttgcaggcaaagagccaagtctgatcttcactaatcgaagagacatcaggaagattggcttagagaggaaagaatatatccaactagttgaacagctaagaaacactgtggctctcgatgctgacattgctgcccagaaactattctgggccgatctaagccaaaaggctatcttcaggtaactttcagttccttttgtggtgtcttgacataagtcattgtcacttgggaagtgatctgtgggatagtttggaggagtttcttttgtgtctagccccatctagcatcgaattacctggggacattaaatctaatgctaattctttattaaactgttatcacttcctaattagaaactaacaattgtctatgaagtaaaagatgacatctttcatattttttatattttctcccttttctctacagttaattgagaactgttcattgttgctacaaatagaaatggtagtacagccttttcttaatgggaactatagaaactcagatgatggatactgaaacaaatagcttcacttagaaatttgttgttcttgtatatagaatacataccagcaactagataatctacagcattattaatttaggatcagtaagcagcatggttaaataatttgagtggtgagctgtggtgttaactggatttctttctgaacaaagtcattgaccattttgtaagcaaaaagtccattctccaagctctaattgtgtcaaactcttaaatttcttgtgacctattctgtttcagtgcctcaattgatgacaaggttggtagacatgttaaaatgatcgacaatgtctataatcctgcagccattgctgttgattgggtgtacaagaccatctactggactgatgcggcttctaagactatttcagtagctaccctagatggaaccaagaggaagttcctgtttaactctgacttgcgagagcctgcctccatagctgtggacccactgtctgggtttgtagtctgttttccatcacagactttggaatggtatctgtgtaggtcaggagctttctcatacctgaattagtactcaaatctcaaggtttatgagccttctgcaacaaagaattagaattctaatttaagatatcagttttgccccaggtgagtgaccctgggatgtccttatctatatgacaggtcctcctgtctgactctcgtatgactgattgctggctgacattaatgaattaacattcctgatttgatgtgtgtaccaaaagctgtatctgaacccttttgtccacccagtttctacgcaagtgattttttaatttttgactgaaagctttgctgggctagctctggatgatcaaacctaaacgacagcctgaattgtgaggatttgggtaaccacattgcatctaagtgtgcaagttgtctgaaagtccagcagaaataaacagacctttctagaaacatttcactaagggggttctgtaaattgccactaagtaacatagaagagcagctcaggaagttgactaaggctgtagttgtcatcacaactggcccccgtgcagcctcattagaactcagtcagccagccaacccctgctatgaaatttgaaggatgttcgtcttgcactcctctgtaagaactgaccttttaaaaaggaaacataaccttgtgactttgggccgaaatttaaatgtcagacaaacatagattattatagttaataatgagcttgtagattcttaatattcaattttatttacctagaacataatttagacccttaagtgttactatttgtcactagagaatgccttgagttttctgctcaaattttaaatttttgtttccagctactacaactttattccttctaaaccactgaggcttatttctcatttaatttttcacagctttgtttactggtcagactggggtgaaccagctaaaatagaaaaagcaggaatgaatggattcgatagacgtccactggtgacagcggatatccagtggcctaacggaattacacttggtatgtatgttcttccttctcgaccacccactcaactatcttcatagtgtttccatttatctccatggtgaattctggactagcagatgactctactgcttccgcctaaattctagcaggaattttcaatgggagtaactgaacaacacaagtaaaatggtggattaacaaattacacattccataattactggcctgttgtccagctgggcctaatatgtgacacaaattcagtgaacgttgggtcttgggtgcactcatactaaatattctgggcatgagtgccttagcatttcctgaattgcaggcttttaacagttttcttctggctttttggaggagaacaacaaaatggtagcctcttttaatattttctgtaatgtgagtaatatttcttaagtcatttgctttgagaatctcaggtaccctgttagtccccaaaaatgaacgtggatacaggctctgcatgctgcttcgcaaggtttatggtgaccccgttaagaaaccctgctggggaaagaaccgtgaaagtagattattaattcattagatatttttaatggaagccagagtagtagtggcttgtcatgtaatgacaattcttttcctacctagaccttataaaaagtcgcctctattggcttgattctaagttgcacatgttatccagcgtggacttgaatggccaagatcgtaggatagtactaaagtctctggagttcctagctcatcctcttgcactaacaatatttgaggtaagatgtgtctcacatcaaagtgtgtacctttgagctactatatcactttgagaagaaataacagacatagcgggaggagggaagagcagctgaacatggcttgagaaactgctttcacttaaaacctggtacaaatcagacactaagtcccagaagcactccacacctaaacttgattcttttacagttttatatccagtgtcccagttcagcattcagtaaacttagtccattaaatgagaagtaaatgatgatgaccttagaaatggacttgtgttaatcctggatgtacatgctaattgtgggcttctgttttaggatcgtgtctactggatagatggggaaaatgaagcagtctatggtgccaataaattcactggatcagagctagccactctagtcaacaacctgaatgatgcccaagacatcattgtctatcatgaacttgtacagccatcaggtaccgtggagaagcacagtccttaataactactttaagggaagcagcatgacacagaacctgctggatgtcagtagctcttggcaactcagttttctttaaaagggaacttttgccctcctgtaccctaccttaaacatttcacatgttatttttttatttctgctgcctcagagaaatggcttctcaacttcagctcctggctttcctcccaagcctcagtgtcagagcttttatttctgtttcattcatgtccccttggccttcagcccctcttgccaagactattgcagtagcctccaaagtagcttttgtgctacaagctttctctactgttagtttgctaggatttttgcaatgaagtaccacagactatcttaaacaacagaaatttattgtctcaaaactctggaggccagaagtttgaaatcaaggtgccaggagggttggtgcctcttgagggctgtgagggaagggtctgttccaggcctcttcttggtctgttgatggtgctcttccccctttgtctcttcacatcatcgtccctctgtatatgctcgtgtccagctttcttgctttctttctttttctgttttttggagactgactcttgctctgtcacccaggctggagtgcagtggcacaatctcggctcactgcaacctccgcctcctgtgttcaagcaattctcctgcctcagcctcccgagtagctgggactacaggagtgagccaccacgtccagctaaactttgtatctttagtagagatggggtttcaccatgttggccagactggtctcgaactcctgacccaaagtaatctgcctgcctcggcctcctaaagtgccggaattacaggcgtgagctgtaataacagtcatattggattagagcccaccttaatgacctcattttaacttgattacctctgtaaatatcctatcctcaatatctccaaataagatcacattctgaggtactaggacttcattatatgaattttagggaggaacaccattcaactcataacacctactttccccctgtgacacacctgatataggattgtgtagattctcaaacacatcgggttatattatctcctgctgaaaacacttggctggttctatctaaataaagccttcaaaccttcctaaggctgagtttccttccactttgttggagcaagtcaagagaaaaccaggagaacatgcctagtctcctttctctgagccttcacgctaaacctcgggcaaatagtgagagccagtcctggtccctcacctcccttccccacctcctcttttggcatctgtctcttaaaggcataacttttacagtctatctcgaagaggtcccttatctggtgtccttagagcatgctgcctgtacctgtatacttattcttccttgatactgttctcacttgaaggattagcagagtagacaagtttaagctcttgggggcaaggactcaggtcttcaacatgtagaacaaggctttatatatactaggcaccggaatacccattttaatggtattttttttcctgactaggtaaaaattggtgtgaagaagacatggagaatggaggatgtgaatacctatgcctgccagcaccacagattaatgatcactctccaaaatatacctgttcctgtcccagtgggtacaatgtagaggaaaatggccgagactgtcaaagtaaggcattttgtgtttcaaccacaagtagaacctacaacaagcaatataataagacacaagcttggatttttaagaattctgtcttagctaattctttgaatagatttgagaagatatctgctattgtatgccgggttatcatgtcatttctttagaactgactttaacccatttcaacattaaatgagtttataggagactaaagtgtcaacataccttacactaatttgtacctagtcccttaacagcactgagctagccaacttgcaggtaattaaatgaggccttaacatttttcctcaaaaggaggaggacagaaattatgcttaaggaaggccatggttacagaaacctcattgcctcagtgggtgacgctaccctaaaataacacttaggctgaatttgcatttagtcttctgttcttaacttttgattaagtggcaaattaaagtcatttgtgtgatcaaggagcttgtatggtgaggctgatgaggtttttattagcgtaattcatggtcaggcagggattagctcagtttaccaagaaattagttgcaagacagtctggtatgcctggtataccagagcatcttgagaacatttctcgtagtttccaggaacatgggatgttgtttagagggataaaatgtggttgtccatcattttgaattgtcaaattccaaacaccgactgtccttcccaaagtttcatgtatctcttttttgcatgaagattgctatttcaatgttgacacatcagctgtacaacttagttcagcagtggtttgtctattttacctggttttaaaataaccttttacatggcttgtctggacaaaacagctagccatgctggaaccctggcattaaccaggttcttggtttttataattcaggtactgcaactactgtgacttacagtgagacaaaagatacgaacacaacagaaatttcagcaactagtggactagttcctggaggtattgagttcagtactgcaaactgttaatctcaactaacagccacactctttgtatctacagcttaaataattaatgcagcctttaactactatttctgccccaattggtaacctatatttaaacaccaaagacttaaaacttgcatatcttttcctgactgatcttaaaggtttctagtagagaactgtcagtgaaatggctactacagcatgtgactcaaatacttctaagccagagttgttcctggtgttcaattgttgtagatactgaacatcaatattggatgcaaaggttttggctccttacctgatgggtaaatttctaagtctgaatacagatccttctaaactgattccttttattcctctgtagggatcaatgtgaccacagcagtatcagaggtcagtgttcccccaaaagggacttctgccgcatgggccattcttcctctctgtaagtagatttcctacaagtctgggttcaagaacttcttagataccagatgaagattttttgttcatctggagctacccctttcatgggcctttatgctgtctagcatttatgacactgaattacgttcgctttctcccccacataatacactaaattaaggcccatatctttctcttcagttgtacctttggcacagtaactggcaatgataagtgttcaacggttaatgctttctacttccgcactgttaacctggcttatccccttttataataagtctctttaactagtgtactgttctgttccccctttgaaatgtgtgtaatgcttcatacagaggagatgcacaaatgcttaaatgctaagagttacaggacttgttgaggataaattaaaagcagttaagaattttcaaacctatggaaaaggacctctaaacgagacacgcaaattctaaggactttgctataaaaacctttgtcctaaatgaagagacccaagcttagctaacacgccaggaccacctgaatagctctccagaaccttctgcaattttaatttggtgagcctaaggtgggaccgaggaccctgcccttgcctggatggatgtggctagtccagctccagtgcacagagctacctctgggctgaacttgtttcaagctcctggcccatgtgtattccaacttctagttatcctagctccataaaacatggcatttttactaatgtcaattattatggattcctgaacgttattacctttcttgtatgttccaatactagacttagctcacttagctaccctctgatttttttcagtgctcttagtgatggcagcagtaggtggctacttgatgtggcggaattggcaacacaagaacatgaaaagcatgaactttgacaatcctgtgtacttgaaaaccactgaagaggacctctccatagacattggtagacacagtgcttctgttggacacacgtacccagcagtaagtcagctttgtgtctttatacaccatggcttgaagtgagacttttcagaaaggagacctgggtgagagagagagagccattaggatgatggagttaccaaacacttcatctgctacctggctattagacagacagtatagcctgttagaacataagtcactcagttgatcagcatctaaccctcaccaactgacaagtgggtcaacttaaagtcaccactatattaagatatttttggttatagaaatgacatgtaaatactagcatgaaccaagtagctcattactgaactattaaatccattgcctactggatatttgaaagtaaattagcatatcatatataggggagttggcttaaagtcagtgtattgagtaagattcacttagccaaaattattatatgctttgctttaaaaaggtatcccaccgcccttagtatagctagcttttcttccagcaatagtcactcacttgttcttcagatgaaacccaagtggagtatttggccttcacgtaggaaacaggctgaacaaaacaagtattgatcactcccctctcaaactccggtgaaacatggaacagtggtcaattcttgacacacacatggcttttcacatttttccccaagacttatgatcattaagtagaaaagacagaattagtcacactatcttatctcactaccaagcaggtatagttgaattcaagttaaatgcatgaatgatacaactcagtattcttttgtatctgactgacttttcttctaagcactctgagtgtttgaatgaccaactcaaaagcaaggtccattttaaagactagagttgccatcagtgagtgatcaccaagctcattctatacttcttcttttccacagatatcagttgtaagcacagatgatgatctagcttgacttctgtgacaaatgttgacctttgaggtctaaacaaataatacccccgtcggaatggtaaccgagccagcagctgaagtctctttttcttcctctcggctggaagaacatcaagatacctttgcgtggatcaagcttgtgtacttgaccgtttttatattacttttgtaaatattcttgtccacattctacttcagctttggatgtggttaccgagtatctgtaacccttgaatttctagacagtattgccacctctggccaaatatgcactttccctagaaagccatattccagcagtgaaacttgtgctatagtgtataccacctgtacatacattgtataggccatctgtaaatatcccagagaacaatcactattcttaagcactttgaaaatatttctatgtaaattattgtaaactttttcaatggttgggacaatggcaataggacaaaacgggttactaagatgaaattgccaaaaaaatttataaactaattttgtacgtatgaatgatatctttgacctcaatggaggtttgcaaagactgagtgttcaaactactgtacattttttttcaagtgctaaaaaattaaaccaagcagcttaaccatg

SEQ ID NO: 6852 - DNA, 210 bp, Homo sapiens
tggcatttgcttctgttccttgtatctgtggaagtcaagtagcccttctcaaaaatgagaagccaagctttaaatagcaaactacagggtattaaaagactaactcttcagttaagaacactgtagaaatggtagaccaacttaaagtctaccttttaacaatctttaccccaaacctaaagattctaggggtcacttatctctattacg

SEQ ID NO: 6853 - DNA, 210 bp, Homo sapiens; identical to SEQ ID NO: 6852

SEQ ID NO: 6854 - DNA, 7004 bp, Homo sapiens
ggtcagactggggtgaaccagctaaaatagaaaaagcaggaatgaatggattcgatagacgtccactggtgacagcggatatccagtggcctaacggaattacacttggtatgtatgttcttccttctcgaccacccactcaactatcttcatagtgtttccatttatctccatggtgaattctggactagcagatgactctactgcttccgcctaaattctagcaggaattttcaatgggagtaactgaacaacacaagtaaaatggtggattaacaaattacacattccataattactggcctgttgtccagctgggcctaatatgtgacacaaattcagtgaacgttgggtcttgggtgcactcatactaaatattctgggcatgagtgccttagcatttcctgaattgcaggcttttaacagttttcttctggctttttggaggagaacaacaaaatggtagcctcttttaatattttctgtaatgtgagtaatatttcttaagtcatttgctttgagaatctcaggtaccctgttagtccccaaaaatgaacgtggatacaggctctgcatgctgcttcgcaaggtttatggtgaccccgttaagaaaccctgctggggaaagaaccgtgaaagtagattattaattcattagatatttttaatggaagccagagtagtagtggcttgtcatgtaatgacaattcttttcctacctagaccttataaaaagtcgcctctattggcttgattctaagttgcacatgttatccagcgtggacttgaatggccaagatcgtaggatagtactaaagtctctggagttcctagctcatcctcttgcactaacaatatttgaggtaagatgtgtctcacatcaaagtgtgtacctttgagctactatatcactttgagaagaaataacagacatagcgggaggagggaagagcagctgaacatggcttgagaaactgctttcacttaaaacctggtacaaatcagacactaagtcccagaagcactccacacctaaacttgattcttttacagttttatatccagtgtcccagttcagcattcagtaaacttagtccattaaatgagaagtaaatgatgatgaccttagaaatggacttgtgttaatcctggatgtacatgctaattgtgggcttctgttttaggatcgtgtctactggatagatggggaaaatgaagcagtctatggtgccaataaattcactggatcagagctagccactctagtcaacaacctgaatgatgcccaagacatcattgtctatcatgaacttgtacagccatcaggtaccgtggagaagcacagtccttaataactactttaagggaagcagcatgacacagaacctgctggatgtcagtagctcttggcaactcagttttctttaaaagggaacttttgccctcctgtaccctaccttaaacatttcacatgttatttttttatttctgctgcctcagagaaatggcttctcaacttcagctcctggctttcctcccaagcctcagtgtcagagcttttatttctgtttcattcatgtccccttggccttcagcccctcttgccaagactattgcagtagcctccaaagtagcttttgtgctacaagctttctctactgttagtttgctaggatttttgcaatgaagtaccacagactatcttaaacaacagaaatttattgtctcaaaactctggaggccagaagtttgaaatcaaggtgccaggagggttggtgcctcttgagggctgtgagggaagggtctgttccaggcctcttcttggtctgttgatggtgctcttccccctttgtctcttcacatcatcgtccctctgtatatgctcgtgtccagctttcttgctttctttctttttctgttttttggagactgactcttgctctgtcacccaggctggagtgcagtggcacaatctcggctcactgcaacctccgcctcctgtgttcaagcaattctcctgcctcagcctcccgagtagctgggactacaggagtgagccaccacgtccagctaaactttgtatctttagtagagatggggtttcaccatgttggccagactggtctcgaactcctgacccaaagtaatctgcctgcctcggcctcctaaagtgccggaattacaggcgtgagctgtaataacagtcatattggattagagcccaccttaatgacctcattttaacttgattacctctgtaaatatcctatcctcaatatctccaaataagatcacattctgaggtactaggacttcattatatgaattttagggaggaacaccattcaactcataacacctactttcccccctgtgacacacctgatataggattgtgtagattctcaaacacatcgggttatattatctcctgctgaaaacacttggctggttctatctaaataaagccttcaaaccttcctaaggctgagtttccttccactttgttggagcaagtcaagagaaaaccaggagaacatgcctagtctcctttctctgagccttcacgctaaacctcgggcaaatagtgagagccagtcctggtccctcacctcccttccccacctcctcttttggcatctgtctcttaaaggcataacttttacagtctatctcgaagaggtcccttatctggtgtccttagagcatgctgcctgtacctgtatacttattcttccttgatactgttctcacttgaaggattagcagagtagacaagtttaagctcttgggggcaaggactcaggtcttcaacatgtagaacaaggctttatatatactaggcaccggaatacccattttaatggtattttttttcctgactaggtaaaaattggtgtgaagaagacatggagaatggaggatgtgaatacctatgcctgccagcaccacagattaatgatcactctccaaaatatacctgttcctgtcccagtgggtacaatgtagaggaaaatggccgagactgtcaaagtaaggcattttgtgtttcaaccacaagtagaacctacaacaagcaatataataagacacaagcttggatttttaagaattctgtcttagctaattctttgaatagatttgagaagatatctgctattgtatgccgggttatcatgtcatttctttagaactgactttaacccatttcaacattaaatgagtttataggagactaaagtgtcaacataccttacactaatttgtacctagtcccttaacagcactgagctagccaacttgcaggtaattaaatgaggccttaacatttttcctcaaaaggaggaggacagaaattatgcttaaggaaggccatggttacagaaacctcattgcctcagtgggtgacgctaccctaaaataacacttaggctgaatttgcatttagtcttctgttcttaacttttgattaagtggcaaattaaagtcatttgtgtgatcaaggagcttgtatggtgaggctgatgaggtttttattagcgtaattcatggtcaggcagggattagctcagtttaccaagaaattagttgcaagacagtctggtatgcctggtataccagagcatcttgagaacatttctcgtagtttccaggaacatgggatgttgtttagagggataaaatgtggttgtccatcattttgaattgtcaaattccaaacaccgactgtccttcccaaagtttcatgtatctcttttttgcatgaagattgctatttcaatgttgacacatcagctgtacaacttagttcagcagtggtttgtctattttacctggttttaaaataaccttttacatggcttgtctggacaaaacagctagccatgctggaaccctggcattaaccaggttcttggtttttataattcaggtactgcaactactgtgacttacagtgagacaaaagatacgaacacaacagaaatttcagcaactagtggactagttcctggaggtattgagttcagtactgcaaactgttaatctcaactaacagccacactctttgtatctacagcttaaataattaatgcagcctttaactactatttctgccccaattggtaacctatatttaaacaccaaagacttaaaacttgcatatcttttcctgactgatcttaaaggtttctagtagagaactgtcagtgaaatggctactacagcatgtgactcaaatacttctaagccagagttgttcctggtgttcaattgttgtagatactgaacatcaatattggatgcaaaggttttggctccttacctgatgggtaaatttctaagtctgaatacagatccttctaaactgattccttttattcctctgtagggatcaatgtgaccacagcagtatcagaggtcagtgttcccccaaaagggacttctgccgcatgggccattcttcctctctgtaagtagatttcctacaagtctgggttcaagaacttcttagataccagatgaagattttttgttcatctggagctacccctttcatgggcctttatgctgtctagcatttatgacactgaattacgttcgctttctcccccacataatacactaaattaaggcccatatctttctcttcagttgtacctttggcacagtaactggcaatgataagtgttcaacggttaatgctttctacttccgcactgttaacctggcttatccccttttataataagtctctttaactagtgtactgttctgttccccctttgaaatgtgtgtaatgcttcatacagaggagatgcacaaatgcttaaatgctaagagttacaggacttgttgaggataaattaaaagcagttaagaattttcaaacctatggaaaaggacctctaaacgagacacgcaaattctaaggactttgctataaaaacctttgtcctaaatgaagagacccaagcttagctaacacgccaggaccacctgaatagctctccagaaccttctgcaattttaatttggtgagcctaaggtgggaccgaggaccctgcccttgcctggatggatgtggctagtccagctccagtgcacagagctacctctgggctgaacttgtttcaagctcctggcccatgtgtattccaacttctagttatcctagctccataaaacatggcatttttactaatgtcaattattatggattcctgaacgttattacctttcttgtatgttccaatactagacttagctcacttagctaccctctgatttttttcagtgctcttagtgatggcagcagtaggtggctacttgatgtggcggaattggcaacacaagaacatgaaaagcatgaactttgacaatcctgtgtacttgaaaaccactgaagaggacctctccatagacattggtagacacagtgcttctgttggacacacgtacccagcagtaagtcagctttgtgtctttatacaccatggcttgaagtgagacttttcagaaaggagacctgggtgagagagagagagccattaggatgatggagttaccaaacacttcatctgctacctggctattagacagacagtatagcctgttagaacataagtcactcagttgatcagcatctaaccctcaccaactgacaagtgggtcaacttaaagtcaccactatattaagatatttttggttatagaaatgacatgtaaatactagcatgaaccaagtagctcattactgaactattaaatccattgcctactggatatttgaaagtaaattagcatatcatatataggggagttggcttaaagtcagtgtattgagtaagattcacttagccaaaattattatatgctttgctttaaaaaggtatcccaccgcccttagtatagctagcttttcttccagcaatagtcactcacttgttcttcagatgaaacccaagtggagtatttggccttcacgtaggaaacaggctgaacaaaacaagtattgatcactcccctctcaaactccggtgaaacatggaacagtggtcaattcttgacacacacatggcttttcacatttttccccaagacttatgatcattaagtagaaaagacagaattagtcacactatcttatctcactaccaagcaggtatagttgaattcaagttaaatgcatgaatgatacaactcagtattcttgtgtatctgactgacttatcttctaagcactctgagtgtttgaatgaccaactcaaaagcaaggtccatattaaagactagagttgccatcagtgagtgatcaccaagctcattctatacttcttcttttccacagatatcagttgtaagcacagatggatgatctagcttgacttctgtgacaaatgtttgcctttgaggtctaaacaaataatacccccgtcggaaatggtacccgagccagcagctgaagtctctttttcttcctctcggctggaagaacatcaagatacctttgcgtggatcaagcttgtgtacttgaccgtttttatattacttttgtaaatattcttgtccacattctacttcagctttggatgtggttaccgagtatctgtaacccttgaatttctagacagtattgccacctctggccaaatatgcactttccctagaaagccatattccagcagtgaaacttgtgctatagtgtataccacctgtacatacattgtataggccatctgtaaatatcccagagaacaatcactattcttaagcactttgaaaatatttctatgtaaattattgtaaactttttcaatggttgggacaatggcaataggacaaaacgggttactaagatgaaattgccaaaaaaatttataaactaattttgtacgtatgaatgatatctttgacctcaatggaggtttgcaaagactgagtgttcaaactactgtacattttttttcaagtgctaaaaaattaaaccaagcagcttaaccatg

SEQ ID NO: 6855 - DNA, 210 bp, Homo sapiens; identical to SEQ ID NO: 6852

SEQ ID NO: 6856 - DNA, 3029 bp, Homo sapiens
acacaacagaaatttcagcaactagtggactagttcctggaggtattgagttcagtactgcaaactgttaatctcaactaacagccacactctttgtatctacagcttaaataattaatgcagcctttaactactatttctgccccaattggtaacctatatttaaacaccaaagacttaaaacttgcatatcttttcctgactgatcttaaaggtttctagtagagaactgtcagtgaaatggctactacagcatgtgactcaaatacttctaagccagagttgttcctggtgttcaattgttgtagatactgaacatcaatattggatgcaaaggttttggctccttacctgatgggtaaatttctaagtctgaatacagatccttctaaactgattccttttattcctctgtagggatcaatgtgaccacagcagtatcagaggtcagtgttcccccaaaagggacttctgccgcatgggccattcttcctctctgtaagtagatttcctacaagtctgggttcaagaacttcttagataccagatgaagattttttgttcatctggagctacccctttcatgggcctttatgctgtctagcatttatgacactgaattacgttcgctttctcccccacataatacactaaattaaggcccatatctttctcttcagttgtacctttggcacagtaactggcaatgataagtgttcaacggttaatgctttctacttccgcactgttaacctggcttatccccttttataataagtctctttaactagtgtactgttctgttccccctttgaaatgtgtgtaatgcttcatacagaggagatgcacaaatgcttaaatgctaagagttacaggacttgttgaggataaattaaaagcagttaagaattttcaaacctatggaaaaggacctctaaacgagacacgcaaattctaaggactttgctataaaaacctttgtcctaaatgaagagacccaagcttagctaacacgccaggaccacctgaatagctctccagaaccttctgcaattttaatttggtgagcctaaggtgggaccgaggaccctgcccttgcctggatggatgtggctagtccagctccagtgcacagagctacctctgggctgaacttgtttcaagctcctggcccatgtgtattccaacttctagttatcctagctccataaaacatggcatttttactaatgtcaattattatggattcctgaacgttattacctttcttgtatgttccaatactagacttagctcacttagctaccctctgatttttttcagtgctcttagtgatggcagcagtaggtggctacttgatgtggcggaattggcaacacaagaacatgaaaagcatgaactttgacaatcctgtgtacttgaaaaccactgaagaggacctctccatagacattggtagacacagtgcttctgttggacacacgtacccagcagtaagtcagctttgtgtctttatacaccatggcttgaagtgagacttttcagaaaggagacctgggtgagagagagagagccattaggatgatggagttaccaaacacttcatctgctacctggctattagacagacagtatagcctgttagaacataagtcactcagttgatcagcatctaaccctcaccaactgacaagtgggtcaacttaaagtcaccactatattaagatatttttggttatagaaatgacatgtaaatactagcatgaaccaagtagctcattactgaactattaaatccattgcctactggatatttgaaagtaaattagcatatcatatataggggagttggcttaaagtcagtgtattgagtaagattcacttagccaaaattattatatgctttgctttaaaaaggtatcccaccgcccttagtatagctagcttttcttccagcaatagtcactcacttgttcttcagatgaaacccaagtggagtatttggccttcacgtaggaaacaggctgaacaaaacaagtattgatcactcccctctcaaactccggtgaaacatggaacagtggtcaattcttgacacacacatggcttttcacatttttccccaagacttatgatcattaagtagaaaagacagaattagtcacactatcttatctcactaccaagcaggtatagttgaattcaagttaaatgcatgaatgatacaactcagtattcttttgtatctgactgacttttcttctaagcactctgagtgtttgaatgaccaactcaaaagcaaggtccattttaaagactagagttgccatcagtgagtgatcaccaagctcattctatacttcttcttttccacagatatcagttgtaagcacagatgatgatctagcttgacttctgtgacaaatgttgacctttgaggtctaaacaaataatacccccgtcggaatggtaaccgagccagcagctgaagtctctttttcttcctctcggctggaagaacatcaagatacctttgcgtggatcaagcttgtgtacttgaccgtttttatattacttttgtaaatattcttgtccacattctacttcagctttggatgtggttaccgagtatctgtaacccttgaatttctagacagtattgccacctctggccaaatatgcactttccctagaaagccatattccagcagtgaaacttgtgctatagtgtataccacctgtacatacattgtataggccatctgtaaatatcccagagaacaatcactattcttaagcactttgaaaatatttctatgtaaattattgtaaactttttcaatggttgggacaatggcaataggacaaaacgggttactaagatgaaattgccaaaaaaatttataaactaattttgtacgtatgaatgatatctttgacctcaatggaggtttgcaaagactgagtgttcaaactactgtacattttttttcaagtgctaaaaaattaaaccaagcagcttaaccatg

SEQ ID NO: 6857 - DNA, 14036 bp, Homo sapiens
ctgggaacaataacatgagagtttattatcacatgactactcaggaggggacatgaagcggagcaggatggggaaggggtgtaaggaatgggcaagtgctgctggagcagggctgtggccacggtcatggggccaggataactggggctgttgaagagcctcttttcctcagtctggttcttcttccagcagtcagatgcagggacgcccggtgcagaagcaccaggcactaataatcaggagaggcatggctagattccactcacttccaacatttccttctggtctcttttctaatggaagaggaaaggcaagacaatcgtgagtgggagagaaagggcggagtctctcctccaggggcagcttagctctggagctaccagaatcagcagcatggtacctgatccaaaggcatagcatggatatggacttccctggattcctgggctctttgacttgggggccacttggttggggataggggctttctgggctgggccaccactgggtagaaagacaggcatgataataggtgggacttgggtcatgggcccctttctcctccccaaactgtccactgtccattcctgtctcctttgagcagttccactgccccaaatacacaggcacacaccttagggactcacccctttggttgggaacattctccagcagtacagccacagaggggtcagagatgccagaagcagcagaatccagacacccaagagcatggcctgaagggttctgaacaaggcctggggacagagggccaaggccataagcaccaggatgacagctgccttcctgctctgtccccatgctccttattgacctgggaaaatctctacccctttatctccaagttcgtggcttctggaggggaagtcaatgcattcaatgtacagaatacagctggaaactgctcacattgggcctgtgtcctcatttgtacagtgacaggtttgggctatgatttgattccctgataacctccaagacttcagaggatcaagggaaaacatgcatttaacacctttgcagcacttggcacacttgctatagtggttcatttattattattttaatgcttgtatttcccacttgtctgtaacaccctacaggagccatttctattttgtctgatgctttgtctttggtgacaatacgcaagcttggtgcagaataggtaacacctatttctggtggagaacctgactcttgcccctggcctggcctggccatccctgccccacctgctgctgccccttccccttggccacctaccttcagcatgtccatgaaggaggtacataggtgtagccttctgacttcttctggactctgagtgggggctggagtgttccagtcactcgagctggagatgcggcaggcactgttgtaataagagtagccatatcggaaatcttcattccaaagtttgagggcagcgatggctgtggagaaagctgccagcgttagcagagtcctcagcagggcctggggagggaggaggcagagagaaatctttgtgtttcagtctctctcagagtccagtcgggggaaaaaagggcaaggcccagagaagcctgcaacagggcaggagattggggtgacctccagcctgaacctggtcccctcccatgcccttccctgaacttacccagtatgtaccaccccgtttctcgtaaatgaaggcagcagctccagccagcacagcctggggagagattgagccaggagcaggcttagtacaggaaatgcaactcctctcccacgagagagcctccatgcaggcccttccccagcacacagcttgggcgggaggtttcatgctaagctttattatccatggtaagataattgctgagagggtggagcctggatccaactcctgaggctgcaaaaggccctgctttagtgacacctaagagcttgtggtcaagccaggtgtgagcccctcttcccttctaaaccttcctttttaaacaacaccaagtgctttatgaaagttctagggatggtgggatcctgtggataaaagtcatggggtgctggagaagatctcaatgaagggtgagtctatacagagtgggcactgttaggtctagaagcctgtcctaacagtgcccaataatccactcagctgggcttgaagaacaggaaatctagtatgtcccagtggacaggtggacctgaatcctgtttggctaattctgtaattaagctgggtattttgccacaggctgggtgaaggtaattactctcggcttctgtcagtaaatatgagtgttttagtgctattctgagagtgtaggtaccatgaccagcctacccagctcctgtgcaaactgcacacacccatctgttgacaacaattcctgggtttccattgtgtacagggcctgtggaggacaatgagaataaccagggggtgatgcttcctgggggaccacatactatctggaacgctctgccttccccatctcaatgcaagtatctggagatgagcaggtccttagatccttagttgacattaactgttgaaggcagggagaggcagccagcctggtgggaacagcactgggaagggtatgggagagcagacagtgtgaataggacatgccaccaccgccctcagctgtttgctcatctgaacaggcagggaatggtcctagataatcagatctctccgactgccagcattctgtggcgccatgttggaggaaggcaatcaggagagcaatgccccacccctctcacaggcagtcaagcactgtcctgctctactcaccacagcccctgtccagatggcagctcccgaggtgacgaggagggtgtagtcgcggatgtagaaaaatcctcctaggactgcactcaagatccccagcacgatctgcatcacctgaaagacaaaggacccaagatcccggctcctaggtggacctgccactgcagggattaaccgctaaaaccccaaaaagagagggagaggtagagagagagagaaagaaagaagagaagagaagagaagagaagagaaaaggagaagaaagaggaggagaaggagaaagaagaagaggcaggaggaggagaaaagagaagggaaaggaaggagaggagagccggcccatcctgagtttggcccagaggaaaggatggactcagggctccactgattgggactctgcatggtcagtggctcctccacaccccttcagcccagagcctcccctccccaggctcttactgagaaggccagagaatcacatcgctaagtaagaagacataactggctcggtgtcctgttcagagggaggctggcagagagtgctgctgcggctggaggtggggagttcctcccgccgcccgacgaggcaggccgtcacactcacccacgaggccaccagcagccggctgctgcccctggcctgggtggcccggggccgcagcgcagagcagcaggtgagcaggagcttggccagggcagactcctggtggatgtgcacatcgatgtgggtgtgctgtggggcctccggggccatctcatcactgtcggctgttcccattgtcagggacacagtctatgaggaagggagcaccagagaggaacggctgtcagaagattttcgcagatttcattggagttggggaggtcaggggccagtggtggctcaaagtcacccaatgaatggctgtcctggtcacagggccgcacccctggcccctcacgaggggaatgtgtgtagcagagggggtgctgaccatgctggaactgcggcgactacagagcctgcgggaacctcccctttcgcccaagatctgctctgtccccctcatcctcctcccagggccctggcgtctgggtcaagcagcgccccacacctcgacccctcaccccctcctcccgggctcttcctgcggcctcccctccacagtccgcaggctctgggacaggaccgagtccttggctgcctgtggagctcctgtgccagcagctgcgccccggctgcgctccggatacccccatccccgccaccgccgacctcccgctccaccgactgctgctcacgcccgacgggttcacgccgcccctgccccgtgaaggaccgcgctgcggtgcggaggtaggtcaaaagccggggccgcacctggcttcctctgcagtccccttcctggagtgtcatccctgggtgggggtccctcctacgctcctccaactgtgcggaggcagctcggggtgcgtgcggaaggaggcccgggggccgccgggagtggggtgccgcctcacctgcgctcctcgggacctgcgagcgggcggcgggagggctggggcgctggctggagaagtgggttgagagttggagggggaggcggggaggggaggcgggggtggggctgaacttcagcccctcgggttcatgacaggctgcagggcctggggtccgtctggggttctcctgctgcgcgagggtcactgggctctggggagctgggagggtccgcgggcggacggccctgggaaagcccgtggggtcgttctcgcctccagccccgcccggccagggccggcgtgcaagtgtgcgcgagtgggagcgcagggggcgcgcgggggctcggtcttctcccgcccggtccgctcctccgggcggaaccccctttgccgggcccccgggccgcagctggtttcgggaaaccgcgcagcctgggcggggccgcagcccccacccgtgcatctgccgtctccgccctcccgtcgctcccctgctcggggtcagctagtgtccgctctgctcggccgcgggctcccggaggactgcaggtgaggcagggcctccgcggcccgggagaccctcttgccgcaggaccctctgtcacgaggagtccccagggccatgcccccaccccgtcctgtccacaggacgtctttcttcctccaacctggtttccaggaggactcacgtaggagggagggacagctgggtgcaggtgtttctccccagaaaaacggctggagagcgggaggagaggcctggggctggcgcgtcccgtccaccttctgccgcctgcacgcctggaccctggctggagccctacggtggggtggctcctgggacggggccagggagcggcggggctgccggacgctttccccagccccggggcacgggaagagctggacagaggaaagtgttcggggcagccgggaagagcccaccacctaccaggcgtcgggcggcccgcaggggaatctccgtggtgccggcctggttcagatccgactcttcaggcgggggcgaggcagatctaggggttggcgtggggcgggggaagcggtggtcctgggggcccggaggtagctggaacccgaggtgccctcagggcgaggcctgggccgtcaagggaaggtctggctggaatctggggctgggctggaagcagtctgaagctcctttgtacgtgtgcggaattgtctaactcctgtcctttctaaccccaaggaggccaggtgggtgaaagagtgaaactgctttgaaaagtaggtagagtacgaatgggaggtgttattagaattgttaataatatttgatttaaactgtgatacttagccaggatgtccattagaattgcctatgcaggatttattttagagccaggcaagctgattctaaagtgcatgtgaagaagtagtctagcaaaaatggccatgacaattctgaaagaaaaaccacacgaggggatcatgaaacagcccaattagcattaagctccatgttaaaattgtggtaatgatgcctagcccatgagacatgccaatgggcagaatataaggactagaataggcctacattcctaggggaacttcatttctgctcaggagagaattttaaatcactgagaaaaagaggatgtattttccgcaaatggaacgtatctttcagaagttaaacatctgaatgacagcaacagaacttggatccgtgtctcccaacggcgaaggttggtcacccagctcccaaattccagatggtcggcatttaaaagtgaaaactgaaagcataaaggcacttagaagaaaatgtggaagattattttataatctcgaaacggggaagtcctttaaaagtgtaagagctagacaccataaatagaatgaaatagaacatggattgtatgaatatacaagcaaggtcaaaaaataaacttcaaattgtaaagaaacatttgaaactcatatcacaaacggtaattttgtgaatagataaagaacttccatagaaaaaagcaaaacaaaacaaaacgaaacaaggacataggatgtgaacggagagctcacaaaagaagaaataaaaatggccctgaacatatgaaaagacaaccaacctcactcataataagagaactatgggccaggcgtggtggctcacacctgtaattgcagcactttgggaggctgaggtgggaggattgcttgagtccaggagtttgagaccaccctgggcaacaaagcaacaccccatctctctctctaaaaaaagagaactggccgggcgcggtggctcacgcctgtaatctcagcactttgggaggccgaggcgggcggatcatgaggtcaggagatcgagaccatcctggctaacacggtgaaaccccgtctctactaaaaatacaaaaaattagctgggcttgatggcgggcgcctgtagttactcgggaggctgaggcaggagaatggcgtgaacccgggaggtggagctggcagtgagccgagatcgcgccaccctagcctgggcgacagagcgagactccatctcaaaaaatgaataaataaataaatacataataaaaaaatgaaataaaagaaaaccatggattaaaaatatatggaaatcattacagaaagcaggtcagtggttgctcatggccagtggttgggggtattttctggggaggggctttagggaatgtattgctgtgtaggaatgtcctttatcttgattgtagctgtaattgcacaaatgtgtaaatttgtcaaaactcgttgagatatacatttaaaatgggacatttttattacataaaattgattaaaatcaatgcatttttccccatataaaaggaaaaagataaaagagtttgcctcctgcatgtgaattgctaccacctccgtggaggataactgacaatatctactaaaattgcaaatgcgcattcctggtgccctgccaattccacattgtctgtaatggaaaaggattagaaataacctaaatgtctgccaatagggaaccacttaaataaattatgaggaattcatactctcaaaatatatgcagttacacaaatgagtgaagaagcttttgtgaaagttgtcagaatcataatcgagtcacttgagttaaaaaaaaaatctgaaaatggaaggcccacaaggcagggttctcatgcgtaaataacctgggaacaaaagtcatcacaaaggactctgtaaaatgacaaccttacacaaaaaaatacttctgtgaggacatccaccagcaactgcctgtctaaccctggacttgtgtcacccttgttattgatccttgtagccaaggatgatcacctcaaagagattatgtaagtctccccatttttcctttaaaaacctttgtcttcctttacctccctgaacgtgcacatgatttactatggtaagcatattctcattgcaatgccctattccagaatcaatctcattttcttttggagagcctctctctgttatttaggttgacactttttatggactcatgtaggattattctaaaaacatatgatcgtgtgatcacagcatcatgcaaatcagtgtgtatagtatgctgctatttgtgggaaaagggggcagaaatactttttcacacttttgtatgcaaaaatgtcatggtaggatttataagagactgataatattactttgcatctgcaaggcaaataggtggttgagggaaaaagatgagcgataaggttttaaaggtatatatacccttttgtatctcttaacttttttatgtgtaaaatcactattgatttccagtgccattgatatctgcactgggaagcccctttgaattttgacaaagacactgttttttgtttgtttgtttgtttgtttttgttttttttgagatggagtctcactctgttgcccaggctggagtgcagtggcaagatctgagctcactgcaacctcagcctcccaggttgaagtgattctcctgcctcagcctcctgagtagctgggactacaggtgcacaccaccgtgcggatttttgtatttttagtagagagggagttttgccacattggccaggctggtcttgaactcctgacctcaggtaatccacccacctcagcctcccaaagcactgggattacaggcgtgagctattgtgcccagctgggatcttgacaaagacactatttctctcctttcacctgtgctgtgtatttttccctcgcctagttcccagacctcactgctatatgtcttctccctggcaggcaggatgacgcaaaacacggtgattgtgaatggagttgctatggcctctaggccatcccagcccacccacgtcaacgtccacatccaccaggagtcagctttgacacaactgctgaaagctggaggttctctgaagaagtttctttttcaccctggggacactgtgccttccacagccaggattggttatgagcagctggctctaggggtaagactggggtggtgcggggttggggggcacgttaacgaggtgatgaggtcaattaaaatatagagccaaatcttcaaaattaaaacgttttatttgggaggagagaattgcaatttggggcatacacacagaccaggtggtctccagtatgtctttagaacaaagagaaggttagaggcttataaaaaggagaaatgttacatattgcccttcatgaaagatcataggttttggggagctggtgagctctgatgggtgagcgatggcatgagtaaaactaatcctagagttgtagcaaggtcagaagctgtagataaagctggtttcaggttgcagcaggcagcttcagcagcctgatttgtagagaattacattttgggagcaacattttgtgccccgagtgctttttgcccctggcctctcgactctgttttagttgagtgtgacaagaatgaccccatttgtaggctcagctttcacagtggaaactctccttcttcaataggatgcaaaagaggaaagtgggttgaattcccatgagagggacatgagaaatcactatttatatctcattctgtgtaggaaaaagttgtaagtgtccccacagaaatttggatggaaaggaagaatcgacctcctctttggcacagaggagtcggtcccagccagaggtagggcaacaggaagaacagtctagaggctgttaattcggttttattgaccccacatggactgaaagcctacaggtgcaaggcaatgtgttcagcacttcaggccaagctacagagagaatccctgggctatatctaaaagtactcagtgaccatcagaaggaacagcagctacactaatgactggaactaaaggtagatcaggtgagggagaagcacatctgacatccttgagggcaggagaaccctgaatggagaaggaataggtatagacagaggtggaagatggacaaaaaagaattccaggttaaagaatggcaggagcaaaggcaaagaggccagaaggcatagggcaagttctataatggttaagagtaaagggaatgggcttcatgaatgggtgatttgggcccatattgctgagagccttgaacgaccaggtgaggagtctgtcctgaatcagctttgacagtgagaacgctgtcaatggattctgagcaggaacctgcctcagagtcaggaggcatccaggtgagaaggatcgaggatctgcactcacataatcatagcagaaatggtgaggagacaaaggagtccctgtccttcacagacctccatggcatgggagtgaaggggtttggggcataaggaaagagaggcattcacagcatgcagagagggttgaagtgtgggtgaccaggagatcggagccctgaaagtcaggaggagcagccattcgagaggtgtgtgtgtgtgtgtgtgtgtgtgtgtgtgtgtgtgtgtggtagtaggggatttggatgtgacaaatccgagatgctggtaggatgtggaggtggtgacagttgggttttccaggaagaagaggagttctcttctgagtcggagttgggtgtgtgaacggcttattggggtatgacacctatgaaatgaaaagagggggagcaggattgagcaggaggaaccatcaggctgcaatgcagactctgccaggccagtgggggagctcccaggcaaaggttgcccactgcaggagttccacactgggtggagatggcccttgagccactgtcttgcttaatcattggctggggggccctcctcagtgtgtgtcttcagcttgaaaaattagggtgaccctgaaggagctgacaactgcaggctgtcagcaatcaaacaagccctttcttgaaggaggtctcagcggcacttctttgtgtctgccacagagccctcaagagtgtgtgtttggatctgaagagaaaggataggccagaagctcaggtcaggctgggggtttggatgggacaatgggacctctgaaggagaatggggggggaaaagtgggaatcttcaggtgggatgagaaagtgttgaagttgggaaaaattgatgaaggataaatagccaagcctatgagaagggtgaggggagacccaggccagtgctgcttcatggattttaaggggacagaatcttccagaatcagagctgcagagaggtcaaggcagaggaaaaggagaggagagccacctaggtaggagccaggcagctggtcccagggcagccggggcatgtggactcacgggaaggggtctggtttctcatcctgtcttgcaggtgactcagatattgctgggggttgtgagttgtgttcttggagtgtgtctcagcttggggccctggactgtgctgagtgcctcaggctgtgccttctgggcggggtctgtggtgagtaaggaacaggctgtgagcctggagggaggcaagtggtgatgggcaagaaggcgcttatggatcttggttggggctttggggaagcgaccaaagtctctggagccaaatggcctttggccatgaggaggctgctctggggtgtagctaaaaccctgtcacttccatttttctcttgaagacagatgggaggggtggggcaggtataggtggaatcctggtctgtgtgtcagagttctttgtctgtccctgggatcctgcttcacattggctattctgggaactgctggtgggagggtgatgatagaccaattcagaagagtaaactggaggcctttttctggtgtctcttttcaggtgatcgcagcaggagctggggccattgtccatgagaagcacccgggcaaacttgctgtgagtcttggacaccctctctccaccttgttcactgaccccctcctgaattctgctccattatctgtcttctgccctttggttgtcaatatcttggggtctttcttggaggggaggagagggtttcctggacaagggctggggaagaggagagggatttgaggcggggacctcatgactcttccaccgattgaaggagcgtgtgtcatgaccctctttctcttccagggctatatatccagcctgctcaccctggcaggctttgctacagctatggctgctgttgtcctctgcgtgaatagcttcatctggcaaactgaaccctttttatacatcgacactgtgtgtgatcgctcagaccctgtcttccctaccactgggtacagatggatgcggcgaagtcaagagaaccaatggcagaaggaggagtgtagagcttacatgcagatgctgagggtgagcaggaagagtccagtcttcggggacccatcacagctcttttttcccagggagctgggggccctggaggacagagatgtaggctctttgagcttggacttcatgctgggtctttcattcaggaggttttaatgtaagctacagacatttttcagacctcatgacacgaagattctctgaatcaaggagggtgaggaacaaagaggagacatttcagagaggagatagtgggtcacccttctggcttttctggtgtgttggtatcacagttttccattactgaattaaaaaccacaccaaaatgtagtggcttaaaatgacaacttattatttctcacggtgctgtgagttggctggattcagatgagccattctcactcacgggttttctcatgcagttacagtcagatgggggtgaagttatccaagtgctcgccgaggctggaggtctgagatgatgtagttgcatggtccggagctcagcgggggctgtcagcaagagccggcaatggcttctccacttggcttgggcttctcatagcacagaaactggattccaatggggagtaccctagttgcaagcatttcaggagacagaaagtagaagctgccagaccagctaagggcttccctgtcactgtatagtgtcactttcactgtggccaaagcagttctaggcccttccagattctacgggttgaaggaatagtctccacttcttgacagggagtgataagttcactctgcagacaagccaacgggatggaagctgtggctggaaacacagtcagctgtggtgggagcagcaagctggatagagtcagtgcctgggtgggtggagagggtggtgatgtgggcagcattggagtagctgacacctgactatctttgttcttcccttatctccagaagttgttcacagcaatccgtgccctgttcctggctgtctgtgtcttgaaggtcattgtgtccttggtttccttgggagtaggtcttcgaaacttgtgtggccagagctcccagcccctggtgagttgtcggggaggggcctctgggcagcgtgagtctgggtggtgagtgtgtgggacaggtaggagtgcggggccaggggcacccgaacctgaggctgggcctggtgcccctcagcttctttccatatgcagctctcccctttgctgtctggggaatgtggccatcaccatggtcctgggccaactgtcgccgccctgtgcctctctgcgccctcctctgctctgatctccccactctcccctctgccctgtcccaggtgttcgtctgactccccttcctctgccaccttgttttttttttgcctgatctgcttttcctgtcaccttttcctttccctcctcctttcctctttctgctttctgagttctatgatactaactctgcctgcatccttttcccctaaggatttcttttttcttttttttccagaatgaggaaggatcagagaagaggctactgggggagaattcagtgcccccttcgccctctagggagcagacctccactgccattgtcctgtgagctgccaaagaccccacggggtgcccgcatgtccctgtctagggcagcccagggcccccactcctggctcctcacacttgcctcccctatggccgctctccagaccctcctcctttcttctccccacatccgcacctgctgttcccactctggggttctcaagtccatgaacagatattgttgcattttccacaatgctgattaaacataataaacaatccagaaaagcagttttgcccagaaagatatggtttccctttgtttatacacctcgtgcgccatgaaaggcctttctttgtgtcgctatgtatgaggttaaatgggagctgatttatcccattaaaacactgtcccaagaagattaaatttaattatgttctgctgtacatccaggtggcaaaacccctttttatgattttcttcaattcagtgtaaagtgtaagtcta

SEQ ID NO: 6858 - DNA, 481 bp, Homo sapiens
ctggttcaaatggactattttatccatttatatttattgcagttactcataaacttaatttataatcatcatcttttttttgctttctatttatttgtctcactttaaaaaatatagtcatgctgatcatttaagggtttagttgaaggtaaatttctccagcagaatttgcatttgtttctgacaggtgtcaggggtcactaccatcttgagaacctttaaattattttctcagggtttgggggtttatccaaggagtgggaattccatccataagtccatgttagggccggcttgtattcacgaatcttcatctgactcctttcaccaagagtttacttgtcatctccctcaaaggagtggattttttcccaaatgtcctctgaaagtgaagatttatactgggtccttcactgtaactctccagcttaagtggctctaggcttcatttactgtctttcacatagttattaagtgcagt

SEQ ID NO: 6859 - DNA, 488 bp, Homo sapiens
tccttcctttcattgtaaatgatagcaaactgattttgactttttccattttctttatatatgaagatataacataaatatatagatgtaagcatttctgaagggcaggaaagctggtaggggctttatgaaatctccatgaggccagtttcatgacttagcagccccacagggctggtcttcagatccaaggcgatgggctgcagggcctgcaccttccctcttggcagagcggtgccacagaggtgcagagctgctgcgctgggcaagacctgctcctgcacaggacttggagtaggggcctgtgccgagggcggtgctgctcttcctggggccctcaccagcctgtgctttacatagaggcttgtaaagaagcctgcgagacaggagtgtgttcagaatatggacagggtcagccgattacagcctgaggggtaaatccagcctgccattgaattttgtaaataaaaatgtatctaaacacaacc

SEQ ID NO: 6860 - DNA, 9914 bp, Homo sapiens
cgcgaggaggcggaaggagcagaggaccggcagccggcgtcgaggcggggcgcgggaacgacggcggccatggcggcctcggggcccgggtgtcgcagctggtgcttgtgtcccgaggtgccatccgccaccttcttcactgcgctgctctcgctgctggtttccgggcctcgcctgttcctgctgcagcagcccctggcgccctcgggcctcacgctgaagtccgaggcccttcgcaactggcaaggtgagcaggggcgggccgggatcgcggggcgagtccttgtcctccgactttgccggttcctgggctctagcctccgggactcgccccttcaggcctcaccgccagtctccccctgtctcggtcctcatcaccatgcccgccccccggaggaccgacctccagcaccgtctcttgctctccgtgttccacacctttgtctgcagaccccatcttcgtcatcactgtaatcccttccctacccgaatttgttcccttccctgtcgccaccagactggttaaggccccaaatccattcgctagcaaatccatgctcgctctccaagggtaaagatttttcgtctccccctcccatttcacatacacacctacgtctgctttaggcctaagccccactgaaaaacgtttttctctcacctacatcacgacaattggactttatccacaaacccctataagccctataaacgtcctgccctcttgagatttggaatttcttctgctttttcatctgtatcttaatcttgactgccattcccagctcatgggggtaccagggtgtcttctgcctttggagagaagtgtttgtttttctctaggggagagaaattttgcagaccaattaagtataaacatccattcctgaaagacattcctagtctccgtgtcttcctcattttctcgagaggaacacaggaaatttgcatatctcctgctgttttgcaaagcacacacactgatatgtattaatttcgtttaaccctcacaaggatcccatgacgtaggacctgttattggcccgttatctagataagattgaggtttcatgcagagaatcgcagagctgttgcgtcatgcaattgagataggaatctatatttttttttttattctgtgatgttttggaactagagccttcgggtagataatctccaaatcatgtacagttgcttctagaatcttttcatgtttatacttggaatttcagttttggaaatactcaacaaataatgaagtactcttcagataatgaagcctctggtgatggccagactgaggtatatggttccatagcctgcttccccactccaatctaaaactgttccccccaccctaggtatacatagcaccacctcacagacagaagcaaaatgccaacctaaccttaacctcccactttctggggttcactgcttccctgggtgtgggtttcgtggatatgtgagcgttagagacgtaagggacctttgaagtcctcaatctaactcttgttactttacagtgaggaaactgacgcctagaggacctgtgacatgattaaactcagccagcctggatgtaatagagccaagattccactccaagtctttagactcccaagtccaatattaccatcagttctttggtctctctccttgagtttagtcgtatttgggcatgcagggacataaaaatacttaagagataaccacttctaaaatttttttagagatagggtcttcgtcttacccaggctggagtgcagagatgcaatcatagctcactgcagcgttcaactcctggaatcaagcgagcctcctgcctcagcctcccaagtagctgggactacaagtacacatcatcacacctgactaatttttaaattttttttaaagacgggggtctcactatgttacctaggctggtcttgaactcctgggctcaagtgatccttccacctaagcctcccaaaatgctgggattacaggtgtgagccaccatgcctggcgataactgcttttagaaaaataaaaggccaggaatgatggttcgtatgtgtagtttcagcactttgggaattcaaggcaggaggatcactggaggccaggagttcaaggctagcctgggcaacgtagcaagactttgtctctacaaataaaaatttaaaaaaaggaaaaggaggattctttgatgtcttattacatataaagcatcagtttacctgtgagatcggataagcactttctgaggagacttataatttctataatctttattgttaatgatagtgttataattcttacagctgcaaaataattcatggtcccttttttcttcctctgaacagccactatggaaggaggggtcaggattacagcagaggagactggcacacagagtgttaagtgacacccactcaatccaccccgaagctgttacacttaattaaccctcaaactgcccagtgaggtaggtcagtatgaaaacctgaaaaaggattataaagcactttacaaattcagagactgccctctaccgaaaagtattatttttttccctctggaagtcagttaccgctaagagttgcaccaggcctggggaagtgtagggattagatattcatgcctctcctttgaggctctgggtccttcattgttgaacgcactgcttgtattgcctcctgctgcgactcactggctctcacttctctgtcacggaggggggctctctgcctttcctaggcggcttataacctggcttccctcctgggagcaacccgccgccaggcctctaacccgactccctctgcagtttacaggctggtaacctacatctttgtctacgagaatcccatctccctgctctgcggcgctatcatcatctggcgctttgctggcaatttcgagagaaccgtgggcaccgtccgccactgcttcttcaccgtgatcttcgccatcttctccgctatcatcttcctgtcattcgaggctgtgtcatcactgtcaaagctgggggaagtggaggatgccagaggtttcaccccagtggcctttgccatgctgggagtcaccaccgtccgttctcggatgaggcgggccctggtgtttggcatggttgtgccctcagtcctggttccgtggctcctgctgggtgcctcgtggctcattccccagacctctttcctcagtaatgtctgcgggctgtccatcgggctggcctgtatccttcctagcagagagctatagaacaacgcatgtcaaagggtgaaccaggctggagggtctggggtgtcaagtagataaaattgggcttactttgtattttttcgaaacagagtctctgtcacccaggctggagtgcagtggcaggatctcaactcactgcaacctctgcctcctgggctcaagcaatcctgcctcagccccctgagtagctgggactacaggtgtgcaccactacacccggctaatttttatattttctttttagtagacacagggtttcaccatgttgcccaggctggtcttgaactcctggtctcaggtgatctacccaccgtggcctcccaaagtgctaggattacaggtgtgagccaccgtggccgagtcatatctgatcataatttttttttactttttttttcatatctggtaattttttattttatgctagacactgaatgctgtattaggggctctagattttgttgttttcctttaaaaaatgttgacttttgttctgataggcggttaacttacttgaagattggcttgaaacttgaggtttgtttctaagctcttttcgggagagtctagcatagcctttattcaaaggctgaatctttgtggctgcctaatcagtggtgggtgacttaggtcagacgaccaggataccaccaagttgctggggatggtgacagggtatggaggaagcacagccagagaggcccacatgaagctcacatggtcgcactgaggcaggtgccctctatttgagataaaaggacgaggtgttagtccctcaggatgatactggtacagcctcctgccttatcctgctacaccagcagaggcatgtcctggcttctgactgactgcagtggctagaagggtgcaagtggtggcacacatgggtgtaggagaagggacagcattaataccccctgctgctgggcgcattcattcccggtgaggcacagtgagtagaaacctttggctctggggtcaggcgcagtggctcacgcctgtaatactagcactttgggaggctgaggcaggcagatcacgaggtcaggagtttaagaccagcctagccaatatggtgaaacactgtctctactgaaaatacaaaaattagctgggtgtggtgacgggcacctgtagtcccagctactctggaggctgaggcaggagaatggtgtgatctgggaggcggagcttgcagtgagccaagatcacaccactgcactccagcctgggctgctagagtgagactccatctcaaaaaaaaaaacaaacctttggctctgggtttcccctgagctgcaaactccagccagagtgtgcagcgtgctaagcatgaaggcttctgtagagtgagtgggaacctgtgttctccccggggagtgttcggccctcctccctttgctgcctccagtttcacttaacacgccaacctcagatggcctcacctactgctattccatcgacctctcagagcgagtggcactgaagctcgatcagaccttccccttcagcctgatgaggaggatatccgtgttcaagtacgtctcagggtcttcagccgagaggagggcagcccagagccggaagtaagtgacagaactcttaagtgctgttaaatcttttttaaaaaaaaaattattttttttttttgagacggagtctcactctgtcacccaggctgtagtgcagtggcacaatctcggctcactgcaacctctgcttcaggttcaagtgattcttctgcctcagtctcctcagtgtctgggattacaggtgcccaccactacatccagctaatttttttgtatttttagtagagatggggtttcaccatgttggccaggctggtctcgaactcctgaccttgtgatttacctgcctcggcctcccaaagtgctgggattacaggcgtgagccactgcccccggccaaatgctgtcaaatcttattctgtttttttattcttttttttatttgaggacagggtcttgccctgttgcccaggctggattgcagtggtatgatcatagcccgctacagcctcacactcgtggactcaagtgatcctcccacctcagcctcccaagtaactgagactacaggcacataccatcatgcctagctaacttaaattttttgtagggacagggtctccactgtgttaccaaggctggtctcaaactcctggtctcaatccatccttccttgatttctcaaagtactgggattacaggtgtgagccactgagcctggcctaaccttattattaaagcaactccagggcatgcagagggtgtggctggtttattgccgtaagtgataaagaaatgaggtgcggcagattggaaaataatgcacagatgtcttctgagcattctggattctgcacaactgcttctgaagtagcaacagcaggaaagggaaggcatttgaggacacttaacatgtgatcctgagtgacttgtagataggctgggcaggagggcccccatctaattgacattagacacatacctgctgcaggtcagcctgggctgtgacacacaatagcctcgataagtgcagatagggctgggtgcgatggctcacgcctgtaatcccagcactttgggaggccaaggtgggcagatcatataaggtcaggaatttgagacgagcctggccaacgtgatgaaaccccatctctgctaaaaatacaaaaattatccaagcgtggtggtggttgcctgtaatcccagctactcaggaggctgaggcaggagaatcactcgaacctgggaggtggaggttgcagtgcaccgagatcacaccacagcactccagcctggttgacagagcaagacactgtctcccaagaaaaaaaaaaaaaaaaaggtgcagacagtccacacagccaactaggctgcttaggaggtggcccagcccaggttttctggtgaggtttactgttttccagttggctgattaactcacagatggaaagtgctggtaagccgccagagcttgtgtggcctggctgcttcattttatagaggaggcccaaagaagacaagggtctttctcacccactctgtttccaggtaacagagtcaggagaggggccatctggaagcacgtcccctgcttaggaggccacctccctccctctcccctgttcccagtgcctcctgcctctgagttctccgctggtttctgtccatgctgagacctcacagtgtaggattttttctttccttcagtggtcctccccccaaaaaaggagctcgctgggaaaggcgtgttcatccattttgtattgctataaagaaatacctgagcctgggtcatttataagaaaagaggtttatttggctcatggcttcgtaggctacactaggatcatggcaccggcctcaggcagcttccaatcatagggcaaggggaggcggcaccacacattgagagagggagggaggtgctgggctcttaaacacccagctcttacctaaactcagagggagaactcattactacggggaagaagccaagccactcacgcaaggtctgcccccgtgacccagacgcctcccactgagctccacctctagtgctggaacactgggaatcacgtttctttttttttgaaatggagtctcactctgtggcccaggctggagtgcagtggcgtgatctcagctcactgcaacctccacctcctgggttcaagtgattctcctgtctcagcctcccaagtacttggaattataggcgcgtgccactatacccggctaaagatccatttcagcacatgatttggagcagaggaaacatccaaagtgtatcagaaggcaaggtgcttggtccttggccctttttggcccgccaccagctgtggagtaaattttcccctgcacgctggcctggatgtggggtttttgttgaataggaagctgcccttagagcttcttccaagaggtgctcccagctgtcaacagctcagagcccttggactatttttctaaaaggccaggagggctgctgggaaaacagaaatgcggactcaccgcattattgcttcaggcaagtaattcctggggtctcaatgtgggggagactgtacatttaggactaggtgttttgtgggttttagttgttctcattgaatctggagaactgtctgtcaccaaggaatcccctctgtaatagctgatggtggtctccagctgtatctcacatacaagagctcactctccaagactggccctgatgagaaagttcttccatgctgaagggccgggcgcggtggctcacacctgtaatcccagcactttgggaggctgatgcgggtggatcacgagatcaggagatcgagaccatcctggctaacacggtgaaaccccatctctactaaaaatacaaaaaattggccatgtgcggtggtgggcacctgtagtcccagctactcgggaggctgagccaggagaatggtgtgaacctgggaggtggagcttgcagtgagccgagatcgcgccactgcactccagcctgggcaaaagagcgagactccgtctcaaaaaaaaaaaaaaagagttcttccatgctgaattgcaatcagcctcacagacactgccacacccagtgccaggtctgatcctgcctcactgtgacaggcagatcttagggtttaagaggaagatggtgttccttctgtgttccccacgtgacatggagtccagtccctcaggtctggtgcctgctgcagacactcagaatattgtgtttcaggcagcctgacagtgggtccagggccatgtcatgacacgcatgtttattttgtcagcaagatggccgtttggacagcttgtctcctcagaggctcttgttgatagataattttttttttttttttttttttacacatggtcttgctctgttgcctaggctggagtgcagtggcacagtcataactcactgcagcctcaaacttctgggtttaagcagtcctcctacctcagcctcttaagtacctgggactagaagcatatgccaccagacctggctaattaaaaaaaaaaaaaaacaatttttttttttgagacagagtcttgctctgtcacccaggctggagtgcagtggcacaatcttggctcactgcaacctctgcctcccaggttcaagcgattctcctgcctcagccttctgagtagctgggactacaggcgcctgccaccacacctggctaattttttttttttaatttttagtagagaccgggtttcatcatgttggccaggctagtctcgaactcctgacctcagatgatccacccgccttggcctcccaaagtgctgggattgcaggtgtgagccaccatgcccagcctgaatccgttctctttgggcagaattgtcgagccagccacacaggcactggcagctgtgacctggtcccaacgctccatctggtttagaagctgctgtgagcaggtcacccctccggtggtctcagtggcaggtccagtgtcctttcatacaactcccttgctgcaggactgcaactggccccaccctccctgggcatctgtggtctgattggttgaggttaacctttctcccacttggtacttagagcaagtcacagaaaacatccaaggcatgttgtactagaaagcgggggcaacctcaagcacaagatgccatgaccttgccaagactcgctgaaggaccattttctctcttgttccattccagactgaacccggtgcctggctcctaccccacacagagctgccaccctcacctgtccccaagccaccctgtgtcccagacgcagcacgccagtggtcagaagctggcctcctggccctcctgcacccccgggcacatgcccaccttgcctccgtaccagcctgcctccggcctgtgctatgtgcagaaccactttggtccaaaccccacctcctccagtgtctacccagcttctgcgggcacctccctgggcatccagccccccacgcctgtgaacagccctggcacggtgtattctggggccttgggcacaccaggggctgcaggctccaaggagtcctccagggtccccatgccctgagagaatttctagggaagtcatctcacttggccttctgaaggtcctccctaagagtctcctgacaaaagttacttattgaacacctctatgtgccaggctctgtgttgggtactttgatcaatgcccctgtttcagtctcatctgtactcacggcagccctgtggagtacggtgtactggcccagcttacagatgcagaaagcgagacgttctgccatcagataaagtcacgtggctctttagtaacacggacaaggctcctcgccaaggaactcgtggcagaagagggcagcagttggcagtagctgccgatgtctgtccccagctccaccattcctccctgtggctgtgccgtgctcgtggtttcagtgtccgtgtgtccatgtgtctgcccttcaggagctcgcagctggtgtgcttggcggtcccaggcctgtgtagtgtctctcccctgctgcgggcgcccccaccccgattcctctccccagaagcggtgggatgggcccccatgaactgcagcagcatgctgaggtgtccatgttgtctgcctttgtataaagaaacagcctctgacctgcc

SEQ ID NO: 6861 - DNA, 1290 bp, Homo sapiens
gccagagcccagaagctgggactacagttaggagggctgctggcagggctgtgccaagaaggacatgggcactgctggcgatgtccctgaagcaagacgggagaagacgctggctttaccaccagtgtctcctgttggccatgttgaccaggaaccaggagtgaggggcggggggcctctatgagacagtgcagggcactgatgagtgtggctgagctgtcactcacctggccagcccttgaggacagctggggctcctcacggcaggctgtgttgagaaggcatgccagctgcctggtgttttgtggacctagtaacacgtggccttcatttatcccaggagctggatggcccattctagactggctttctgataggttttaggtctttggacatgtataagacagaaccccaagcccatccagcctggtgagggtggggccgtgacgggcccacgcctgggggggcctcagacatgagcaagaaggggcctgcgctggggtgagagggtgtgccactgtgtgtggccctggtttttaaatctctttgttccttgggacttttccttagtctggccacaatgcacaacacagcctggagtcagctcacagtgggaccctttctcaccctcacgtgcattttggaagctctggaggccatcccaaccccttctcccatttgcctgtcaaatcatccactaatatgcccatgtccggaaaccattcactgattctgtgccaagccggaggctcaatgatgatgagccccatgtgcgcagggagcccctagcatggggcctggcactcaataaatatgagtggaatgaacggatgaataggtgatgcccgcccttggggagctcattggagcagaagaaatggaaaataattatcattcaggccgggctcagtgactcacgcctgtcattccagcactttgggaggtctgggtgggcggatcgcttgaggtcaggagttcaagaccagcctggccaacatggtgaaatcccatctctactaaaaatgcaaaaattggccgggcgcagtggctcacatctgtaatcctagcactttgggaggccaaggctggtggattacgaggtcaggaattcaagaccagcctggctaagatggtgaaaccctgtctctatttacaaaaattagccgggcgtggtggtgggcgcctgtaatcacagctatccgggaggctgaggcagggaggcggaggttgcagtgagccgagatcatgccactgcactccagcctgagtgacagagtgagactccatctc

SEQ ID NO: 6862 - DNA, 11597 bp, Homo sapiens
cggtcacgtaactagtgagttgtgcagctagggttagaataaacagatttattttttttttttcttagaaacagcaattaacaatgtgactcctaatcaaaagaaaagagatgtccttggggcttaaagtactatggtgggagtcttggactgagtaggtttgaaaatacaattttatgatcgtggagtactaggatttagtcattttgatgcagagcatttcctgatcaactgctgttgtggagtgtactgtccaatagaattctctacaattaaggaaatgttctgtatctcaagagattgttcttaatggtggccagtagtcatgtgaccgttgagcatttgaaatgtggctagtgctactgaagaatggaattgtaaattgcttttaatctaaattttgcctgtgatattattggctgtgggtttgccaaaatttgtttttttaaagaggaaaagataacggactgttggctgctttattggacagcacagctagcatatagatgcagataggtagtataacttgtttgtagtttaatataaatgttgtattttgtaattaggccaaatttgagtttcatcatggtgactatgaaaaacagtttctgcatgtactgagccgcaaggacaagactggaatcgttgtcaacaatcctaaccagtcagtgtttctcttcattgacagacagcacttgcaggtaagcagcttttttgaaaaccacttacaggctcattcaaaaacttattggttagtaaacgttttatatacaagttacttaattgttgtgtcccccaaacactgcattatttttgaagttatttaaaaagcaaaaaataggctgggcatggtggctcatgcctgtaatcccagcactttggaaagccgaggcgggcatattgcttgagctcaggaattccagaccagcctgggcaacatgacgaaaccccatctctacagaaaatataaaaactagccaggcatggtggcgtgtgcctgtagtcccagctactggggaggctgaagggggaggattgcttgagcttaggaggctacagtgagatcttgtcactgcactccagcttgaatgacagaacgagaccctgtctcaaaaaataaaatgaatttttaaaaaagtatttcccaggcctcactgtagaacaatggttcccaaattttgctgcatgttacagcaacctggcaagccttttttttttttttaaacgggaaaaaacccacctccttcgaagcttttaaaagtcatgattctagtgaacagtagtgagaactattgccctaaagcgtgtctaccagatgtgtgggcaatggatgaacatcacttgagaacttgttaaaaatatagactctcaggctctactaatcagagtctgcactttaaacagaaccctcaggtgatttgaaacacactttgtttccagaagcactgacctggacgtttttttttttcttgagagggagtctctgtcgcccaggctggagtgccgtggcgcaatctcagttcgctgcaagctccaccttccgggttcacgccattctcctgcctcagcctcccgagtagctgggactacaggtgcccgccaccacgcccagctaatttttttttttttttgtattttagtagagacagggtttcaccatgttagccaggatggtctcaatctcctgacctcatgatctgcctgccttggcctaccaaagtgctgggattacaggcgtgagccaccgcaaccggctgactttttaaatctaaaaggatgagggacatatatttaaaagatccacatttatttcaaataagcacttccatttgggcacagtgtctcacacttgtaatcctagcattttgggaagccgatgggggaggattgcttgagtccaagaccagcctgggcaacagagtgagacgacatctctacaaaaaatcaaagaaattagccggacattgtggcgtgttcctgtggtcctagctactctggaggctgaggcaggggagaatcacttgagcccaggagtttagagttgcagtgagccatggcaccaacacactcctgcctgagtaatgcagcgagaccccatctcaaaaaaaaaaaaaacaccgccaacaacaaataaccacttcccagttaagcagcaatccaagtattgcaatttagtttttagatgcagccacttgctggctgtatgatcttggacaggtaactgctgtgagcatgttgcttctgtgaaattgaacaaatgataatcctaaggttgttaaatttaacgtaaggttgttacatttaaaattaactaatacaagtaaagtatattacatatgtataggtttatttacatttgtaggctacttcagacatcttcaaagtcagagtccttattttgccttttagaggtgctagatagtgaagaaaagatgaactttgtaattaagttggatgttcaaatggtaactactttttaaaaataagggttttgatttaactggtaatactttggcttttttctagtcccttaccccaggatatgcttaaatcttttatttattttttgagacaaggtctcaactctgtcaccacgctggagtacactggcatatggatcatggctcaccgcagccttgacctcctgggcgcaggttatccacctcagcttcccgagtggctggactacaggcgtgtgccaccacatccagctaatttttatattttttgtagagatgggttttcgtcatgttgcccagaatggtcttgaactcttgggctcaagcaatcctcctgactcagcctcccaaagtgctgggattacaggtctgagccaccacacccagccttaaatttttacctattccttcatcctctcactagcttctattcttaccacatctgctttatcttcctctatataaaaatgacttcaaacttctcaaaatctgtccccatgaaatgcctttagctttaatttcttctagcaagtagtctctggtttacttccctaactttttatcttctaattctgcataaatttttcctttatcttatatggcaagattttgtctgtctagaatatggatagggactacaatttgtcccttactctgtatgttaagatgtttaataaattgtgggaaatggacttcatgtgacagttacgctaaagtcttatttttaaaaaatattaaaatgttttccccttccagactccaaaaaacaaagctacaatcttcaagttatgcagcatctgcctctacctgccacaggaacagctcacccactgggcagttggcaccatagaggatcacctccgtccttatatgccagagtagagtactgaccagcaaaatggagaagatcagagaatgcagcagcagttttttttcttgttttcttaccactttattctttcagagtttaaagaaaatggactcatgcacagaacactatgcattttgaaacttgttcatcctggatttttttaaatcatttttatctcagaacttaaacaaaaattagatgtcgtgcacggactgtgtgaaagaagatgctttgcatatttgctgcactgcatcagtatcttactaaaaatgtgaaatgaaaggactattgtacactgaaatgcttaaatgtatctgaaagcacaaggtgatactcatttttatggtcttcccatttgtgctggtttttgcctctttgacatctgtcatcagtatttagagggtgagaagtgaatgtaacaggtataaataacatttttaaaaacaataactttgctataatcacagttgttccagagcactgtcagatacattctaatgaccagaactggtttaaaaaaagaaaatacaaccatgggaaagaaatcttaaatgaaaaacgcatctcattgtaggcatttttgcctcatattttactgggccatgtttgtttcctggtactcatgtattttttttttccagatctctttccccaagttgctattgtaagagtattctgctgcgtgtggatgcagttatacacattaaagcagatctggagtctgaagtagctataaagcagctataaaacagaaatacatgcatagctgcagaaaccatgataggtagaggacttttcttttggttttgttttgttttgttttgttttgtttttggttttacagagaagagatttttattacaaagaaaaaaattccagtgaattgtgcagaaatgctggtttttacaccatcctaaagaaaaactttacaagggtgttttggagtagaaaaaaggttataaagttggaatcttaaattgtaaaattaaccattgagtgtcaaagttctaaaagcagaactcattttgtgcaatgaacataaggaaagactactgtataggtttttttttttttctccttttaaatgaagaaaagctttgcttaagggttgcatacttttattggagtaaatctgaatgatcctactcctttggagtaaaactagtgcttaccagtttccaattgtatttagcttctggttggaatttgaaaaaaaaagaaaaaaagaaaaagaaaacctaaataaaataggtgaaagttccctgactattcaggtgaatacacaaagtttgaagtgttaactttttctttccatttcactgatgttactggtcaccttagagaattatttcatagtctgtggctaaatagtaaattcagaagaaaaatacctggcaattgagtgtgtaacttcaacaagaacaggaatcaagaacatactgtcagctttcaacagttagcaacctggccttatgccttgcttcatgggaaagggccattcttaaatttcaaaatgctttcatgtgtcctcttatttaaaaattagaatctatttgaaataacattttgaatgtttattataaccaggtactcttctaagctcttgtcttaacctctcaacctttggtggaaatagatgcagaggttaagtaacttgctcaagctcagatcataagtagtggaggatttaaaaccaggctggctggctcttaaggcctatgctcttaatttaccatgttgaattaatttaccatattgaattacacttatgttcaccaagttaggcattttggcagccattgtttacgtttttattttggaataatttagaaaagttaccagagtaatatgaaagctgttgtgtaatctttaccctcatttttattattttgccacatttttttcattttctctgtacacttatacctgtgagctatttgagtttgttgcacactttgtgcttccttaccccttccttagtacttcggcatatgttccaagtacaagaatatttcatataactagagtaaaattaccaaactcagggaatgttgatactctttatcatccatattcgttttgttgtcccagtatccttggtagcttgttttagatccccccctctagagtacaggatcattgaatttagttgttctcagttgtctttaatgtggaacagttccttagcctttatgtgttccatgacctctatgttttttggagtacagggcaatttttcttgtaaattgttactcattttgcatttgaattgtttattcatgcttaacgcccttctcaagtatactctccatctgctcttcattgatgttacttttgagcgcctggtcaaggtgtcctggttttgccctatgtgtggtacttactactagcaatctctgggaagcaatgtgcaaataccctgttcctttatcaggagctcccttggcgattctttccagactaaaacccaaaccagtctttaactatgatggttacaaaatagtgattttccaaatctaatgctttgtccatttacagcatttgttgtaagagagtgttctatctctgccatttattatctacctaaacactatggcctcatattttttccctccaaatcataatttgcatgcctttattattttgagcatctcctttcatgcataagatactgtaacctttctgtcccagcctcaagccctggagtcagctgtttctccaaggagcccagcttccttttagtgggaaatactagaagtaaacatctgggactcctgtatgctcactgctgctattgctactgtggagtcttctgccctttcacagtggacagatcagcaggcgatctaatgtagggaaaggatttgtctttaactgttaacttgacttaaatttacttaaagctgcatcctttttagtctttagtcatgaaatgttcattaagattccctgacagaaatcaagtaagagtcagctgggtgcagtggttcacacctgtaagtccagtacttggggggccaaggcaggaggattgcttgagcctaggagtttgagacgaggctgggcaacagtgagaccttgtttctacaaaaataaaattaggcgtggtggcacacgcctgtagttccagctactcaggagactgaggtggaagaatgtcttgagcctgggattttgaggctatgggaagctgtgattgtatcactccagcctgagtgacagaagctgtctcagagtgccacagtcaactgaacttggagacttctgagaagtgaacttggtcttttcaatactatagacttggaggtttgagatctgcatggttttattctcggtacaagaaaaggggctagtagcatgctttttttcttccccctctattggaccatttcctgtaacactaacatgcttagcctcaaacttttcttgaggtcttttttaggcatatggctcaatctattttatttttcaatatgggctgtagttcatatattttgaagtttcataatcttaaaaaaaggaaatgcaagtgtagcttggcattttagatctgggaaggacctaagattcgctaaggattggccattgctgtggtctccatgtgtttcccctaaatttgtatgttaaaatcccaacccccaaggtgatattagcaggtgggggtctttgggaagttattagatcacgagggcagaaccctcaagattggagtaagtgcccttacaaaagagaacccaggctgggcacattggctcacacctgtaatcccagcactttggggggccaaggcaggcggatcacctgaggtcacgagttcgagaccagcctggccaacatggtgaaccctgtttctacaaaaaactacaaaaattagctaggtgtgatggcacatgcctatagtcccagctacttgggaggctgaggcaggagaatcacttgaacccagggggcagagattgcagtgagccgagatcgtgctgctgtactccagcctgggcaacagagcgagactccatttcaaaaacgagaacccagagggctcacttgccccttccaccacacagtgagaaggcaccatctatgagccaggaagcgggccctcacctaacaggatctgctgggccttgacccaggactttccagcttctagaaccatgaaaaatttctgttgttcctagcagcccaaacagaattagaaccattaatttctatttctcctttagcttaacactggactttagttttaatcttaactgagagtggtcctgctagtttctttgctttacctgtttttaaaacactttgagctaagaatttttcacccaattatcacacatgattagaaaacaagatgcttaaagtgaaaaaagacacccccacctttaccctacttgatatccaggtccttttcctccaagaatatttctagctgcttctggttttgctagtttatttcaaaaattacaattgtttgagtcaaatctatacttgatattcattgttgggtttctttaggtcattctgctgttctctcagtttcccaggtgttttgtgtgtcttccttgtgctattaattttcctgtggccttgttggtcagatccacagaggtaaatgcaagtgtttttccttgcttcagaacatgtgctgtaatcactatatcttctcctaattttgcaggtgacatgtaccttgaaagaaaatgaatatagttaacagcagataatttttcaaagggaaagttgtgtgcatctcacaacagtgttcctatgtaacttattttactcctaaaaatagttttaacggtagtattggtaagctttctgtactatcaaatgtgaatggctggtcctaaccaggttctattttacccattccttacccacacaagtttcttttcccaaatatgtgagaagaggttttcttgcctccccttttttccctttacatttcccacttcacatttatttggggctggtgaaagatttcctccagctttcatttaatctccttaacttcttagatgaaatatcacttggtgtctgtatattgtcctatccatatttacaatttatttgactctaaaatgacaatataacaactataaggaattgatatgatgtccttacaatcttgatgatggactgtctatatttttaagagatgtacatcctagtcacttgtaatcataagttgtctttaactcagctggctccagctaattaaaaaaaaaattggggagatgaggattgtttaaaacaaatgttaatgttttaaagggaaataatttccttacagtttatttttatgtttctgctttttagaaagaaacctttaaaaaggatatgtatttttgccatattcaaaataagacttcagtatttatggctaggaggtataagaaaggtggatctggccgggcacgatggctcaagcctgtaatcccagcactttgggaggccgaggtgggcagatcacctgagggcaggagttcgagaccagcccggccaacgtggtgaaaccccgtctcaactaaaaatacagaagttagctaggcatggtggtgggcacctgtaatctcagctacttttgaggctgaggcagaagaatggcaggaacccaggaggcagaggttgcagtgagccgagatcgcgccactggactccagcctgggcaacagagcaagattccatctcacaaaaaaaaaaaaaaaaaaaaaaaaaaggtggatcttattgctggaaagaacaggcttgtctttaattcacatacctcaatgtaaagaaatgaaaaatagtatgtttagtagtagtttggccagtttttattatttccctaaattttgtcttagaaatcaagaattttggctaacagccattaacttaaactgagggaagataaggaaccctttgtgctacagatgagtaaacattaagtccggggaatttggagattgacattttgtcagtaatactctaaaatttccccttttgttgttttggaacctcgcttgtttttaacctaagtcacagtctaacaggcatcctcagtctgtataatataggacttgatgtgcaggggtggagtaaatttggtaccatgtcaagtaaatcaaagagtgaatcatgaagtgttaactgactgaaacattattcatttacttttgaaatatctctaacttttgaaagaccatgtcctagtttttgttgaagtgaatcagtttttgaagcgtaggcagctcttgatggccaatgcttttggcaacacatatttgaaaggccaaaactatgtttgacttactgaaaattccttagggttctaaaggcaaaagtaccttagtagatcatgaaatgcagtgctaggtttgaagatctctctgctcttaatagagacttttagggaaaatcaagtcatctactgatctcacctcttaccacatgaaataaggactgctgaatatgcacaccagtaacataagcagagcctttcttttctgtacatcttaatttcaaaaagagcatttggctgcatcttgtaatttgcttattgtaccctcaatttaagttattcccatgaagagggactgaatgtttcttaagtaaacttgataaaatatttagattccttaaaagcctacattggctgggcgcggtggctcacgcctgtaatcccagcactttgggaggccaaggcgggcagatcacaaggtgaggagatcgagaccagcctggctaacacggtgaaaccccatctctactaaaaatacaaacaaattagtcgggcatggtggcaggcgcctgtagtcccagctactcgggaggctgaggcaggagaatggtgtgaacccgggaggcggagcttgcagtgagccgagactgcaccactgcactccagcctgggccacaaagcgagactccgtctcaaaaaaaaaaaaaaaaaaagcctacattatttccattaccctcatatctactcacaatggctctctcaacctgacctctcagttagttacatttttgttgcttaggtggaaaaagcagttgtcttgaaactaaatccctgtgcccagctctttctttattgaatggggctgcagtagtaccagtttatgttggaattgagtttcttacattttggaagtttgaccctgaggggcactgttccctgatcatgtagtttaactcacagaacatgtctgtgtagtcacagggagagatccaggattgctgcccattcttaaaactcaacactttgggaggctgaggtgggtggacactggaggtcaggagttcaagaccagcctggccaacatggtgaaaccccgtctttactaaaaacacaaaaattagcccagcatggtggcgcacacctgtaatcccagctactagggaggctgaggcaggagaattacttgagccccagaggcggaggctgaagtgagccagattgtgccgctgcactccagcctgggtgatggggagactccgtgtccaaaaaaaaaaaaaaaccccagcaatggtgttcagtttgttagagtaagattataatgtgtatatgaactctaactttactttgaattgtatgtactcaatacaatcctcatagtgttataagtggtatttttaaaattaaataatatttattttttgtagagatgggggtcttgaactccaggcttcaagcaatcctcttgcctcggcctcccaaagtgctgggattataggcgtgagccactgcgtctggccctgaatggcacttttaaggactgtatgaaacagttatgagccatcagtttgtgatttttccccctgcatcagtatacacattaaaagctgaatgttgctcttttgaatgtttgggatcattccctttttactattgatacacactgtacttgcaaattaactgctctagttctagattttaaggctggaatattttaggacaaaatctataggtgcagttaaggagataagcagctaattgaatctcatgcgttactaataatataaatgtgtttagtctcagttgtttagacagttatcacacagaagggatttggaatacagtttggatacatacgttatgttcatatcgacactgactccgggtgctcccctttccgtgcatagcagagccattgttgatatgttatctactaacgtggctgtcaaaccgccgtggagagtgcctattgcattggtatgctcttcttctactttcatttcacaaatcactttcccaggagcagcagagacaagagtaatct

SEQ ID NO: 6863 - DNA, 22073 bp, Homo sapiens
accctctcccgcccgctccacccgggcgggaattgtttcctcgatcaaatgagtgaaaacctgagtgatcctgtgtctcccgtggtgcgagtgagtcgctgccgctgaaggctaaggggtgggggtgggacttgcgggggtggaaggctaggtggtctccgggctccgcctgggatttgggagaagaacccgcctcctttgcctcggcaatgctcacaagaagataaatcgcactccccaccattttgaacgggggcagatccacagggaagtctcccttggggaatgtaggactagttgcaggctgggggtgttgggaacccgggcattaatcaggtctaaccacagagccggaataattaataccgtattatataccccttttccttctgccgtcatgattctccttggcagcagcgttagcagccgcctgagggtgaaaatgtgggtgatggggaagttggtaatgactccgctgttttttctcatggctcctttgggccacagctgcccgcccccggtatacactgtagttgattgcagggaaaccctgtacctctccctttccttctctaccgattttgcacttttctctatgctcaccaccaagtgtaatcaataacaagcactgacaatacatagcaatagtgaaatctgaaataactaagaattaggtactacagccatggagctggctgggtaaaatctaattggatatttcagtttcattcacctaccctgttttggtgtttggttttggttttggttttggtgagttttttttttttttttttttggaaagcaaggatcacacttccccctccctgttccttaatcccttttctaaaaaggggggaaaatccggatggattttagggattggtctggtgtcagctgtgttttattgcacacctaaatcctgattataggcttttcatttctccgcaaagcctttattttggcagttaagccaaatgtgttttccagaaagttagttattttctcctctttctttcctttctttcctccctttttcccgtctgaccccaaacgttattgtccaaacatgactggacagcagcttttgtttcttgaccctgtaatatgacagtctgctaatattgacagaaggtgcagtttttgggttatagtcgtgattttcgctaatcaatcatattagcaggaaaaaaaatgacttgtttctgttgtacttgagtcttaagaaaaagtgcccatagtttagtgacaatttccaaaggctttagtaccacctgtatttcaaaatgggggacccaaactcccggaagaaacaagctctgaacagactacgtgctcagcttagaaagaaaaaagaatctctagctgaccagtttgacttcaagatgtatattgcctttgtattcaaggagaaggtaatttaaagttcttaatggtgaattagcacaagtaatttttgtaagtgtatattatttgttactcttaaattattatgaatattaggttaaagagtggttgaaaaaaagtctgctttgtatgctctgttttttcacccttaggggtgattctgtgaattgagcagttgcagcatgcgaaaagacccttgagcgttctttggtttggaaataaatttgagtctgaagcttagtagtagtatacactgagttgacatggggtgggcaagattacaaaattttatatggagttaacatgggaaaccttatgatggaatttaaagattatctaatgtagagtataaataagatggttgaaagtgtgaaattgtaatcagactgtttatatgctaaagtttatcctgtttcttaaactgcgtaatgtaggtaaccttttctcttacatttaatgaagtagaatacaccttttaggagcaattaaatactgaaatggttaatttgtgtttagaagtgtgattttcttttttacttagagttcattttgccttgtatagaagtacagtttttaaaaactcaaaatgacctagaggaagtttcatttttaggggcggtggaggtcttaatcagaattagttccgcagttaaatagcaaacagtaagttgtgagtagtcaaggatgggatgataagagcagtattttttgcaacttaaaatgaacattttcttaaattatcagcaaggcttatttgaccaaagatgaggttatgaatgtaaggaagtgctacttggattttggtgcttaaattgttagctaatttcagatcagaaatacaatcttagtgtggtatctattaagtatctggaagttttccaggtttccccctactgtttaactcttattatttttgttgctgagacaggcctcactgtattgcccaggctagtcttgaactcctgggctaaagtgatcctcctgtcatggcattttaaagtgctgggattacaggcaggagctgccacgcacagccccaactcttaactcctaaaaggttatttgtatttaagaacattcttagctgctgaagtatagcattgtgaagtgatttttaagtaatttttgaagtgactgtcccaagattgggtggtatcaaggacttacatctccacttttgttttgttgacaagctgactcaaaattgatgagattggattttagttgaagatgatacagtgtatgctctttaaataaatccaagataataagtagtgagaccatatctttgtatttaatctatatattgccccaaattgcaccatcttaattctttaacaccaacgataatctggttttattctgtgaatggacagtgtccatgcagttgccctgaataattcatgatatatacttaatagtacagaattttaaaaagtagtttagtgatgcgtacttggtcttgagtagtattaaaagagaacttggtgtgcttctttttagtctttcaaatattgatggttttggctgggtgcagtggctcacggctgtaatcccagcactttgggaggctgaggcaggcggatcacttgaggtcaggagttcaaggccagcctggccaaatggtgaaaccctgtctctactgaaaatacaaaaattagccaggtgtggtggcgcaggcctgtaatcccagctactcgagaggctgaggcaggagatcccctcgaacccaggaggcagaggttgcaagtgagccaagatggtgccactgccctctagcctgggcaacacagtgagactccatctcaaaaaaaaaaaagaaaaaccagaaatattgatggttttgataatgtaatattgagaaagtaatggaaattggcccatataaggaataaaactattcatttgtctgaatagcgttgttttaaaactggtgagatttttaattttaagaagtattgtccaaaatagtgctatggataccattatgctataaaactcaagcattaaacattctaatgacagtttgtacatgtatggttggagggggaggtaggggaagaacagaaggaattacctatctgaaaatgtgttttcagtgtataagttactgcagacagttaagaattttgtggagttaatgttacatgacattgtaatatgaactgagtgttaaaaggctgtgctccctgtgggttaatacaccattttcttttcttctagaagaaaaagtcagcactttttgaagtgtctgaggttataccagtcatgacaaataattatgaagaaaatatcctgaaaggtgtgcgagattccagctattccttggaaagttccctagagcttttacagaaggatgtggtacagctccatgctcctcgatatcagtctatgagaagggtaagttctgccttaagtcttgacttgataaagtttctgtggattaaccttgcatttccccgccccccgaaccccccttaaagtggatagttatgatagtgaccagtctcttcaggtaaatttgtctttgtgccatgttgataactgggatcatgactttaaagcattgtgtttataggattagaaaaacacgtttttttacgccagaccattcttatgtggatgaagtatataaagggatttctttaatctgtgttaggtgttgatgatctcggacttttttttttttttttttttttgagacaaagtcttgctctttcgctgaggctagagtgcagtggcatgatcttggctcactgcaacctctgccctcgcgcattcaaatgattctcctgccttagcctcccgagtagctgggactacagttgtgcgccaccatgcctggctaattttttgtgtttttagtagagatggggttttgccatgttggctaggctggtctggaactcctgacctcaagtgatcctcctgccttggcctcccaaagtgctgagattacaggtgtgagccactgcaccctgccagtagccaactgtttttaataatttaagtgttatgcagaaagtttaaaaatttttgaagtaggtttgtttttgaaaacttgaccttgagtaaaacatggacaactttgttgtattaggctcataatattgtgtattattattgtggataaatgtcttatgtctccgtttattgtatttccttttttggggggaatatgaatataaggaagtgcttccagctttgtaaacttctgcaacatgttaaaagttaatctgggcatacctgaaccaagagatccccacagttacttggggagaatgctggagataaccagatactggtctggaagaaattatggaccttcaaaaattaatatgctggctacaataatgaagcagaagtcaggaatggagaaaagtagttttctatcaaaataaaaatagcatttcagctataataggatagtgattcatattaggagttctaagacatctttttaaatagattgatttttaaaggtggaaataaaggttcagggtctgacaatacaacagatatcagagattttgttggagttttcaccatgcactgataagtctaggtcttggtgttaggagcattggactgagtgtatgtgactctctgtaagataaaaattaaaattagagccaggcacagtgacttagcctgtaatcccagcacttcgggaggctgaggtgggtggatcacctgaggtcaggagttcgagaccagcctggctgacgtggtgaaaccccgtctctattaaaaatacaaaaaatattagcggggcatggtggcacacacttgtaatcccagccattcgggaggctaagtcacgagaatcgcttgaacctggtagacggaatttgcagtaagcgaagattgcaccattgcactccagtgtgggccacaaaagttaggactctgtctccaaaaataaaaaattacatcatgagctattcagattataaactattatgtttacttcctaagatataaaatgatatatggtagatcttttgtacttataaaatgtttttataggggaaccctataatttgtgacatggcttgatgtagctgtttctttaaaagtaaacttttttttttttaatcattttataggatgtaattggctgtactcaggagatggatttcattctttggcctcggaatgatattgaaaaaatcgtctgtctcctgttttctaggtggaaagaatctgatgagccttttaggcctgttcaggtattttggtctaaagtgtgatgagtatttcaatatgtgaaaactactagaatataatagggtctaacttgagaaattctttgggaaaatggtttctgatagttttatttcacgagtctcccctatttagaatattgtgatgcaagagaagaaagcgtttggattatagaatctcttgacagtgtggtggttccacctgcccagtgtggctttgaaattatgactagagaaaatcttttaaagtggacatttactgatttatagaggggcccacagatgagcttctgagatctgtaactcttgaagccttcaccacacatccttctaaaaccgtatatttaactgctgcttcccaaaggaatgtgatctgaaatgggtgaagaaatcattttgtagaagttgatctgtatataaaattatagaagaaagaagtaaatttagtagtcattcttaaccttaaaatcttgctgacttttgactgtttgtcatggtatactagacattgctcaagtgaatcccccctctagtgttaagggcatttactcatgttgaacctagttttatttacagtatatttgtatgcatagaagatggaggtccaccaaagtgttaattatgcttagttgtaggtcaggtatagctaactttccttttttaatatatatatttacatttgtgtttcctttataatttatggcatagattgccacgattttcttaagtatacttttataatcagaaaaatgatattaaggactcattttaagtacactaaatcaaatattagaaggcttctttattttaagctaattgtgaggattatttgtcatttaaaacttttgcttctacttattaccctgaagtatctttgtggtgcttatgtttttcacagactgtataaattgatatactctcccgccccatggtaatgttgctacacataagctctaataattatcatttttaatgttttaagattaattcaactaagttttaaaaataatccattggttacatacataagaaagtactgtatacagattcccctgacttataatggttcgacttaagattttttcaactttaccatgatgtgaaagccatatgaattcattgtgctcctcgatttatgatgggactacatccaggtgaagtcattgtaaattggaattgttgtaagttcaaaagtcactttttgatttaaaatacgtgtaacttacactgggtttatcaggatgtaacatcacaagtcgtggagcatctgtatttcggtcatttaatggatgatatctgactgaagggagaaaatgaatataaaaggcatgaaaacaggaatagaaaaggcatgtttaaagttctcagcgcagggctgataactctagctgctctctggaggtggtgttaggattttgttgttttttagttaaggatttcccactggaaaaatgtaggtctgcttattacagtatgttttcaaatttctaataccctgcctttcccactgggaccttatttgaaatagttgagttaactttagtcttgtgtcaaatagtactctttgaagtcatggctgatgtttattgagagttgactgtactagtttcagcttttttttttttttttttttgagacagagtctcactctgttgccagattggagtgcagtagtgtgatcttggctcactgcaacctcctcctccttgcaacctctgcctccgcctccctggttcaaatgattctcctgccttagcctcccgagtagctgggtctacagggacatgccaccacgcccagctaatttttgtatttttagtagagacgggttttcaccatgttggccgggatggtctcgatctcttgacctcgtgattcacccgcctcggcctcccaaagtgctgggattacaggtatgagccaccatgcccgtcctttttttgagacagggtcttgctctgtcgcccaagctggagtgtggtggcgtgatcttggctcactgcaacctctgcctcccaggtttgagccgttcttgtgcctcagcctcttgagtagctgggattataggcgcatgctatgacacccagctaatttttgtattttttttgtagagacggagttttgctatgttggccagggtggtgtccttgacctcaagtgatctgcctggcttggcctcccaaagtggtgggattacgggtatgagccaccacacttggccttagactttctcttactttatatatatttaatctcagtccttaaaataactgggtagataggaagaaactgagacagaaattaggtaaataaggcccaaggcagttaaataggataaaagcctggactgactgtgcttttaactcactaccctgtactgtgaaaatttacctatattaattatagaatcttaaaattctggactgagtgtaagcagtatgatgtaggtaatgactttagaattcaactgcagtaagtaggttaatattgtaagaactaatttgcttttctgaagtaatttaaaatgtgtgaatatcctatatgaggggccttaaatataactcactcagttctttctcaaagaaaatgagaaaaggaatggtaaatgttaacttgcaggcctcttttttttgttttttgttttttgactcttaaagcactttacttatttttaaaatttaattaattttttgtagagatggggtctcactttgttgcccaggctggtcttgaactcctaggttcaagtgatcctcttgcctcagcctcccaaagtgctgagattacaggtgtgagtcaccgtgcctggccttttgaagcactgtaaaacctgaatatatgggtagtgaggatataatcggaaccagaataaggattgtttttaaatactgagttcttcagtgtactgtgaagtgctgggaggtactactaaaatgtatctcttcttttctcttcattattaatgctactgccaaggttagctcctcccctgactgttagaatatttcgttacttctgtgggaattacttctttcatgctgcttatgagaagttgtgtgtgtgtgtttgtgtgtgtgtgtgtgtaccatttcttttcagataagtggatattcaatatgatagaattgaaatgctaaagaactataaggaaggcctttttcagtctcactcaaaccttttttcagtgtggttaccggttcttgcacccaccctggttgcttaccatattgcagctttgttacttgaatagtatttcagtttttaacacatttgtttttgtgttggttctgtttcctagtatggctgttttttttgttttgttttgagatggtgagatggggtattactctgtcatccaggctggagtgcagtggcatagtcatggctcactgcagccttgaactcccaggcccaagtgatcctcccacctcaacctcatgagtagctgggaccacaggtgtgcaccccatgcccaactaattatttttgtagagataggatctcactgtgttgcccgggctggtctcaaactcctggcctctagtgatcctcccgctttggactcccaaagtgctgggattataggtctgagccaccatgcccagtcagcgtttatcagattacttaccattactactttgtcctggggaaatcctcttaatctttaaaggcgcaatccaaaatcataatgttcccgtgttacttactgttacttttttttttttctcctatagtggtttgatgataagaacccaatttgggccgggcgcggttgctcacgcctgtaatcccaacactttgggaggctaagccagatggatcacctgaggtcgggagtttgagaccatcctgaccaacataaagaagtcctatctctactaaaaacacaaaattagctgggcgtggtggtgcatgcctgtattccagctacttgggaggctgaggcagaagaatcgcttgaacccaggaggcggaggttgcagtgagccgagatcgcgccattgcactccagcctgggcaacaagagcgaaattccgtctcaaaaaaaaaaaaaaaattggagttttacagataaccacatcttattctgggaaaggatttgaagcaagttgggttttatatttggctgtacttgtcctcttcagcagtataataagccccttaaggctgaagtaaccttattcctattgtttagtagctaatagcatgcttttgatatgcttatgatcatactaataatttaatatttgaattgtatggaagtacaattcagtatcattttacatatggtatattgtgatgctgtatcatattttatgttacggtttataagaaaagctcctaggtataaaatgctacatagcaggaacttggtttttcaatgttattatttcctactgtttttgacgtaacggcaataaaatttgtttgaaccaaaatggactaacaattatttgtacaactcagtattgtctaaatatcatattgttaaatctaggtttcttgaattctccatcaagcctggtcatgtcatgtagcatttggtgtctcaccatgcccaacagatattttgtgggaggatggagttgatcttcctcatgttaaaagattgaagggagtgttctgacttaattgataacagtctttcataacttcacaaatttttgagaatgacccaaggctaactgtgggaaaaattcacataaaaacatagcctatctatgaggagcaaaactatatttcagttgtgggctttacatttcatttaaccctcttaactgtcctgtgaaatgggttacagccttattttatagatgaggaagctgaagtttaagggatttgcatacggtcacgtaactagtgagttgtgcagctagggttagaataaacagatttattttttttttttcttagaaacagcaattaacaatgtgactcctaatcaaaagaaaagagatgtccttggggcttaaagtactatggtgggagtcttggactgagtaggtttgaaaatacaattttatgatcgtggagtactaggatttagtcattttgatgcagagcatttcctgatcaactgctgttgtggagtgtactgtccaatagaattctctacaattaaggaaatgttctgtatctcaagagattgttcttaatggtggccagtagtcatgtgaccgttgagcatttgaaatgtggctagtgctactgaagaatggaattgtaaattgcttttaatctaaattttgcctgtgatattattggctgtgggtttgccaaaatttgtttttttaaagaggaaaagataacggactgttggctgctttattggacagcacagctagcatatagatgcagataggtagtataacttgtttgtagtttaatataaatgttgtattttgtaattaggccaaatttgagtttcatcatggtgactatgaaaaacagtttctgcatgtactgagccgcaaggacaagactggaatcgttgtcaacaatcctaaccagtcagtgtttctcttcattgacagacagcacttgcaggtaagcagcttttttgaaaaccacttacaggctcattcaaaaacttattggttagtaaacgttttatatacaagttacttaattgttgtgtcccccaaacactgcattatttttgaagttatttaaaaagcaaaaaataggctgggcatggtggctcatgcctgtaatcccagcactttggaaagccgaggcgggcatattgcttgagctcaggaattccagaccagcctgggcaacatgacgaaaccccatctctacagaaaatataaaaactagccaggcatggtggcgtgtgcctgtagtcccagctactggggaggctgaagggggaggattgcttgagcttaagaggctacagtgagatcttgtcactgcactccagcttgaatgacagaacgagaccctgtctcaaaaaataaaatgaatttttaaaaaagtatttcccaggcctcactgtagaacaatggttcccaaattttgctgcatgttacagcaacctggcaagccttttttttttttttaaacgggaaaaaacccacctccttcgaagcttttaaaagtcatgattctagtgaacagtagtgagaactattgccctaaagcgtgtctaccagatgtgtgggcaatggatgaacatcacttgagaacttgttaaaaatatagactctcaggctctactaatcagagtctgcactttaaacagaaccctcaggtgatttgaaacacactttgtttccagaagcactgacctggacgtttttttttttcttgagagggagtctctgtcgcccaggctggagtgccgtggcgcaatctcagttcgctgcaagctccaccttccgggttcacgccattctcctgcctcagcctcccgagtagctgggactacaggtgcccgccaccacgcccagctaatttttttttttttttgtattttagtagagacagggtttcaccatgttagccaggatggtctcaatctcctgacctcatgatctgcctgccttggcctaccaaagtgctgggattacaggcgtgagccaccgcaaccggctgactttttaaatctaaaaggatgagggacatatatttaaaagatccacatttatttcaaataagcacttccatttgggcacagtgtctcacacttgtaatcctagcattttgggaagccgatgggggaggattgcttgagtccaagaccagcctgggcaacagagtgagacgacatctctacaaaaaatcaaagaaattagccggacattgtggcgtgttcctgtggtcctagctactctggaggctgaggcaggggagaatcacttgagcccaggagtttagagttgcagtgagccatggcaccaacacactcctgcctgagtaatgcagcgagaccccatctcaaaaaaaaaaaaaacaccgccaacaacaaataaccacttcccagttaagcagcaatccaagtattgcaatttagtttttagatgcagccacttgctggctgtatgatcttggacaggtaactgctgtgagcatgttgcttctgtgaaattgaacaaatgataatcctaaggttgttaaatttaacgtaaggttgttacatttaaaattaactaatacaagtaaagtatattacatatgtataggtttatttacatttgtaggctacttcagacatcttcaaagtcagagtccttattttgccttttagaggtgctagatagtgaagaaaagatgaactttgtaattaagttggatgttcaaatggtaactactttttaaaaataagggttttgatttaactggtaatactttggcttttttctagtcccttaccccaggatatgcttaaatcttttatttattttttgagacaaggtctcaactctgtcaccacgctggagtacactggcatatggatcatggctcaccgcagccttgacctcctgggcgcaggttatccacctcagcttcccgagtggctggactacaggcgtgtgccaccacatccagctaatttttatattttttgtagagatgggttttcgtcatgttgcccagaatggtcttgaactcttgggctcaagcaatcctcctgactcagcctcccaaagtgctgggattacaggtctgagccaccacacccagccttaaatttttacctattccttcatcctctcactagcttctattcttaccacatctgctttatcttcctctatataaaaatgacttcaaacttctcaaaatctgtccccatgaaatgcctttagctttaatttcttctagcaagtagtctctggtttacttccctaactttttatcttctaattctgcataaatttttcctttatcttatatggcaagattttgtctgtctagaatatggatagggactacaatttgtcccttactctgtatgttaagatgtttaataaattgtgggaaatggacttcatgtgacagttacgctaaagtcttatttttaaaaaatattaaaatgttttccccttccagactccaaaaaacaaagctacaatcttcaagttatgcagcatctgcctctacctgccacaggaacagctcacccactgggcagttggcaccatagaggatcacctccgtccttatatgccagagtagagtactgaccagcaaaatggagaagatcagagaatgcagcagcagttttttttcttgttttcttaccactttattctttcagagtttaaagaaaatggactcatgcacagaacactatgcattttgaaacttgttcatcctggatttttttaaatcatttttatctcagaacttaaacaaaaattagatgtcgtgcacggactgtgtgaaagaagatgctttgcatatttgctgcactgcatcagtatcttactaaaaatgtgaaatgaaaggactattgtacactgaaatgcttaaatgtatctgaaagcacaaggtgatactcatttttatggtcttcccatttgtgctggtttttgcctctttgacatctgtcatcagtatttagagggtgagaagtgaatgtaacaggtataaataacatttttaaaaacaataactttgctataatcacagttgttccagagcactgtcagatacattctaatgaccagaactggtttaaaaaaagaaaatacaaccatgggaaagaaatcttaaatgaaaaacgcatctcattgtaggcatttttgcctcatattttactgggccatgtttgtttcctggtactcatgtattttttttttccagatctctttccccaagttgctattgtaagagtattctgctgcgtgtggatgcagttatacacattaaagcagatctggagtctgaagtagctataaagcagctataaaacagaaatacatgcatagctgcagaaaccatgataggtagaggacttttcttttggttttgttttgttttggtttgttttgtttttggttttacagagaagagatttttattacaaagaaaaaaattccagtgaattgtgcagaaatgctggtttttacaccatcctaaagaaaaactttacaagggtgttttggagtagaaaaaaggttataaagttggaatcttaaattgtaaaattaaccattgagtgtcaaagttctaaaagcagaactcattttgtgcaatgaacataaggaaagactactgtataggtttttttttttttctccttttaaatgaagaaaagctttgcttaagggttgcatacttttattggagtaaatctgaatgatcctactcctttggagtaaaactagtgcttaccagtttccaattgtatttagcttctggttggaatttgaaaaaaaaagaaaaaaagaaaaagaaaacctaaataaaataggtgaaagttccctgactattcaggtgaatacacaaagtttgaagtgttaactttttctttccatttcactgatgttactggtcaccttagagaattatttcatagtctgtggctaaatagtaaattcagaagaaaaatacctggcaattgagtgtgtaacttcaacaagaacaggaatcaagaacatactgtcagctttcaacagttagcaacctggccttatgccttgcttcatgggaaagggccattcttaaatttcaaaatgctttcatgtgtcctcttatttaaaaattagaatctatttgaaataacattttgaatgtttattataaccaggtactcttctaagctcttgtcttaacctctcaacctttggtggaaatagatgcagaggttaagtaacttgctcaagctcagatcataagtagtggaggatttaaaaccaggctggctggctcttaaggcctatgctcttaatttaccatgttgaattaatttaccatattgaattacacttatgttcaccaagttaggcattttggcagccattgtttacgtttttattttggaataatttagaaaagttaccagagtaatatgaaagctgttgtgtaatctttaccctcatttttattattttgccacatttttttcattttctctgtacacttatacctgtgagctatttgagtttgttgcacactttgtgcttccttaccccttccttagtacttcggcatatgttccaagtacaagaatatttcatataactagagtaaaattaccaaactcagggaatgttgatactctttatcatccatattcgttttgttgtcccagtatccttggtagcttgttttagatccccccctctagagtacaggatcattgaatttagttgttctcagttgtctttaatgtggaacagttccttagcctttatgtgttccatgacctctatgttttttggagtacagggcaatttttcttgtaaattgttactcattttgcatttgaattgtttattcatgcttaacgcccttctcaagtatactctccatctgctcttcattgatgttacttttgagcgcctggtcaaggtgtcctggttttgccctatgtgtggtacttactactagcaatctctgggaagcaatgtgcaaataccctgttcctttatcaggagctcccttggcgattctttccagactaaaacccaaaccagtctttaactatgatggttacaaaatagtgattttccaaatctaatgctttgtccatttacagcatttgttgtaagagagtgttctatctctgccatttattatctacctaaacactatggcctcatattttttccctccaaatcataatttgcatgcctttattattttgagcatctcctttcatgcataagatactgtaacctttctgtcccagcctcaagccctggagtcagctgtttctccaaggagcccagcttccttttagtgggaaatactagaagtaaacatctgggactcctgtatgctcactgctgctattgctactgtggagtcttctgccctttcacagtggacagatcagcaggcgatctaatgtagggaaaggatttgtctttaactgttaacttgacttaaatttacttaaagctgcatcctttttagtctttagtcatgaaatgttcattaagattccctgacagaaatcaagtaagagtcagctgggtgcagtggttcacacctgtaagtccagtacttggggggccaaggcaggaggattgcttgagcctaggagtttgagacgaggctgggcaacagtgagaccttgtttctacaaaaataaaattaggcgtggtggcacacgcctgtagttccagctactcaggagactgaggtggaagaatgtcttgagcctgggattttgaggctatgggaagctgtgattgtatcactccagcctgagtgacagaagctgtctcagagtgccacagtcaactgaacttggagacttctgagaagtgaacttggtcttttcaatactatagacttggaggtttgagatctgcatggttttattctcggtacaagaaaaggggctagtagcatgctttttttcttccccctctattggaccatttcctgtaacactaacatgcttagcctcaaacttttcttgaggtcttttttaggcatatggctcaatctattttatttttcaatatgggctgtagttcatatattttgaagtttcataatcttaaaaaaaggaaatgcaagtgtagcttggcattttagatctgggaaggacctaagattcgctaaggattggccattgctgtggtctccatgtgtttcccctaaatttgtatgttaaaatcccaacccccaaggtgatattagcaggtgggggtctttgggaagttattagatcacgagggcagaaccctcaagattggagtaagtgcccttacaaaagagaacccaggctgggcacattggctcacacctgtaatcccagcactttggggggccaaggcaggcggatcacctgaggtcacgagttcgagaccagcctggccaacatggtgaaccctgtttctacaaaaaactacaaaaattagctaggtgtgatggcacatgcctatagtcccagctacttgggaggctgaggcaggagaatcacttgaacccagggggcagagattgcagtgagccgagatcgtgctgctgtactccagcctgggcaacagagcgagactccatttcaaaaacgagaacccagagggctcacttgccccttccaccacacagtgagaaggcaccatctatgagccaggaagcgggccctcacctaacaggatctgctgggccttgacccaggactttccagcttctagaaccatgaaaaatttctgttgttcctagcagcccaaacagaattagaaccattaatttctatttctcctttagcttaacactggactttagttttaatcttaactgagagtggtcctgctagtttctttgctttacctgtttttaaaacactttgagctaagaatttttcacccaattatcacacatgattagaaaacaagatgcttaaagtgaaaaaagacacccccacctttaccctacttgatatccaggtccttttcctccaagaatatttctagctgcttctggttttgctagtttatttcaaaaattacaattgtttgagtcaaatctatacttgatattcattgttgggtttctttaggtcattctgctgttctctcagtttcccaggtgttttgtgtgtcttccttgtgctattaattttcctgtggccttgttggtcagatccacagaggtaaatgcaagtgtttttccttgcttcagaacatgtgctgtaatcactatatcttctcctaattttgcaggtgacatgtaccttgaaagaaaatgaatatagttaacagcagataatttttcaaagggaaagttgtgtgcatctcacaacagtgttcctatgtaacttattttactcctaaaaatagttttaacggtagtattggtaagctttctgtactatcaaatgtgaatggctggtcctaaccaggttctattttacccattccttacccacacaagtttcttttcccaaatatgtgagaagaggttttcttgcctccccttttttccctttacatttcccacttcacatttatttggggctggtgaaagatttcctccagctttcatttaatctccttaacttcttagatgaaatatcacttggtgtctgtatattgtcctatccatatttacaatttatttgactctaaaatgacaatataacaactataaggaattgatatgatgtccttacaatcttgatgatggactgtctatatttttaagagatgtacatcctagtcacttgtaatcataagttgtctttaactcagctggctccagctaattaaaaaaaaaattggggagatgaggattgtttaaaacaaatgttaatgttttaaagggaaataatttccttacagtttatttttatgtttctgctttttagaaagaaacctttaaaaaggatatgtatttttgccatattcaaaataagacttcagtatttatggctaggaggtataagaaaggtggatctggccgggcacgatggctcaagcctgtaatcccagcactttgggaggccgaggtgggcagatcacctgagggcaggagttcgagaccagcccggccaacgtggtgaaaccccgtctcaactaaaaatacagaagttagctaggcatggtggtgggcacctgtaatctcagctacttttgaggctgaggcagaagaatggcaggaacccaggaggcagaggttgcagtgagccgagatcgcgccactggactccagcctgggcaacagagcaagattccatctcacaaaaaaaaaaaaaaaaaaaaaaaaaaggtggatcttattgctggaaagaacaggcttgtctttaattcacatacctcaatgtaaagaaatgaaaaatagtatgtttagtagtagtttggccagtttttattatttccctaaattttgtcttagaaatcaagaattttggctaacagccattaacttaaactgagggaagataaggaaccctttgtgctacagatgagtaaacattaagtccggggaatttggagattgacattttgtcagtaatactctaaaatttccccttttgttgttttggaacctcgcttgtttttaacctaagtcacagtctaacaggcatcctcagtctgtataatataggacttgatgtgcaggggtggagtaaatttggtaccatgtcaagtaaatcaaagagtgaatcatgaagtgttaactgactgaaacattattcatttacttttgaaatatctctaacttttgaaagaccatgtcctagtttttgttgaagtgaatcagtttttgaagcgtaggcagctcttgatggccaatgcttttggcaacacatatttgaaaggccaaaactatgtttgacttactgaaaattccttagggttctaaaggcaaaagtaccttagtagatcatgaaatgcagtgctaggtttgaagatctctctgctcttaatagagacttttagggaaaatcaagtcatctactgatctcacctcttaccacatgaaataaggactgctgaatatgcacaccagtaacataagcagagcctttcttttctgtacatcttaatttcaaaaagagcatttggctgcatcttgtaatttgcttattgtaccctcaatttaagttattcccatgaagagggactgaatgtttcttaagtaaacttgataaaatatttagattccttaaaagcctacattggctgggcgcggtggctcacgcctgtaatcccagcactttgggaggccaaggcgggcagatcacaaggtgaggagatcgagaccagcctggctaacacggtgaaaccccatctctactaaaaatacaaacaaattagtcgggcatggtggcaggcgcctgtagtcccagctactcgggaggctgaggcaggagaatggtgtgaacccgggaggcggagcttgcagtgagccgagactgcaccactgcactccagcctgggccacaaagcgagactccgtctcaaaaaaaaaaaaaaaaaaagcctacattatttccattaccctcatatctactcacaatggctctctcaacctgacctctcagttagttacatttttgttgcttaggtggaaaaagcagttgtcttgaaactaaatccctgtgcccagctctttctttattgaatggggctgcagtagtaccagtttatgttggaattgagtttcttacattttggaagtttgaccctgaggggcactgttccctgatcatgtagtttaactcacagaacatgtctgtgtagtcacagggagagatccaggattgctgcccattcttaaaactcaacactttgggaggctgaggtgggtggacactggaggtcaggagttcaagaccagcctggccaacatggtgaaaccccgtctttactaaaaacacaaaaattagcccagcatggtggcgcacacctgtaatcccagctactagggaggctgaggcaggagaattacttgagccccagaggcggaggctgaagtgagccagattgtgccgctgcactccagcctgggtgatggggagactccgtgtccaaaaaaaaaaaaaaaccccagcaatggtgttcagtttgttagagtaagattataatgtgtatatgaactctaactttactttgaattgtatgtactcaatacaatcctcatagtgttataagtggtatttttaaaattaaataatatttattttttgtagagatgggggtcttgaactccaggcttcaagcaatcctcttgcctcggcctcccaaagtgctgggattataggcgtgagccactgcgtctggccctgaatggcacttttaaggactgtatgaaacagttatgagccatcagtttgtgatttttccccctgcatcagtatacacattaaaagctgaatgttgctcttttgaatgtttgggatcattccctttttactattgatacacactgtacttgcaaattaactgctctagttctagattttaaggctggaatattttaggacaaaatctataggtgcagttaaggagataagcagctaattgaatctcatgcgttactaataatataaatgtgtttagtctcagttgtttagacagttatcacacagaagggatttggaatacagtttggatacatacgttatgttcatatcgacactgactccgggtgctcccctttccgtgcatagcagagccattgttgatatgttatctactaacgtggctgtcaaaccgccgtggagagtgcctattgcattggtatgctcttcttctactttcatttcacaaatcactttcccaggagcagcagagacaagagtaatct

SEQ ID NO: 6864 - DNA, 1346 bp, Homo sapiens
ggaaggcctttttcagtctcactcaaaccttttttcagtgtggttaccggttcttgcacccaccctggttgcttaccatattgcagctttgttacttgaatagtatttcagtttttaacacatttgtttttgtgttggttctgtttcctagtatggctgttttttttgttttgttttgagatggtgagatggggtattactctgtcatccaggctggagtgcagtggcatagtcatggctcactgcagccttgaactcccaggcccaagtgatcctcccacctcaacctcatgagtagctgggaccacaggtgtgcaccccatgcccaactaattatttttgtagagataggatctcactgtgttgcccgggctggtctcaaactcctggcctctagtgatcctcccgctttggactcccaaagtgctgggattataggtctgagccaccatgcccagtcagcgtttatcagattacttaccattactactttgtcctggggaaatcctcttaatctttaaaggcgcaatccaaaatcataatgttcccgtgttacttactgttacttttttttttttctcctatagtggtttgatgataagaacccaatttgggccgggcgcggttgctcacgcctgtaatcccaacactttgggaggctaagccagatggatcacctgaggtcgggagtttgagaccatcctgaccaacataaagaagtcctatctctactaaaaacacaaaattagctgggcgtggtggtgcatgcctgtattccagctacttgggaggctgaggcagaagaatcgcttgaacccaggaggcggaggttgcagtgagccgagatcgcgccattgcactccagcctgggcaacaagagcgaaattccgtctcaaaaaaaaaaaaaaaattggagttttacagataaccacatcttattctgggaaaggatttgaagcaagttgggttttatatttggctgtacttgtcctcttcagcagtataataagccccttaaggctgaagtaaccttattcctattgtttagtagctaatagcatgcttttgatatgcttatgatcatactaataatttaatatttgaattgtatggaagtacaattcagtatcattttacatatggtatattgtgatgctgtatcatattttatgttacggtttataagaaaagctcctaggtataaaatgctacatagcaggaacttggtttttcaatgttattatttcctactgtttttgacgtaacggcaataaaatttgtttgaaccaaaatggactaacaattatttgtacaactcagtattgtctaaatatcatattgttaaa

SEQ ID NO: 6865 - DNA, 13236 bp, Homo sapiens
gcggccgcctcttgcgcgcgccccaccgaccaaaatggcggctgccgttggtgcggggtgcggtttgtagtgctgttgccctactcatccctttgcaaaatgtgaaagaagaagcggctggtggaggcgggccatagcaatgagtcggcgaaggaaacatgatgacagccctagcccgaagaaaacgccgcacaaaacagtggcggcggaggaatgcggctcggtggtcgagccagggaggaggcggctgagatcggcccgcggttcgtggccctgcggggctagagaggggcctcccgggccagtgcggcagcgagagcagcctccgaccgccgccctgtgcagtaaaagtaaccccgagggtgagacgtcggcagcgcggcctgccttggcttcggcgccgcatccccacatcccagcttgcaacagggaaatctggggtgggggtggagtctggagcgtgtattctgtctctgggattcacccctcgagagtccaaaaataatcctataccactccccgatgggcttttgtccccgaacttcagcactaccccgttaggtttgaccatccatttgcctccgccacaggaataggtaatgtggtttacctgtttgcgggagggcggctgctttccaggctgctcctccagtcagcagcagtggtggagtgagaagaaacagctgataggcccgctaacctcagtttttgcccggagaagttatttctctttaaaccctttttttccctgtgacctgctttagagaagagttcataggaaaagttaaagtttgtctcaaagcctggtagatgtctcacctcattgtgaataaaccggaagttcctgtgtgtaacatccctccaaataagatactaaggatctctttcgtctcgattagttttaggtgttactttttaaaagacttctagtaaatcttagttggaactgaaactcatacaaaagcctttattctggagcatgttcttgaaatagtgcttttttttttttttttttttttataccttacgtgtcttttttcttttgggaaagaatctcgccctgtcgcccaggctgcagtgcagtagcacaatctcggctcactgcaacctccgcctcccgggttcaagcgattctcctgcctcagcctcccaagtagctgggactacaggcgtgtgccacctcgcccggctaattttttgtatttttggtagagacaggggtttcaccgtgttagccaggatggtctcgatttcctgacctcgtgatccacccgcctcggcctcccaaagtgctgggattacagccaccgcgcccggccaccttacatgtctttaataatactcctataaagcaatttgggaatgaacaaaaatctttataaaaatttgaaagtgattctagacaaaaattcccaagcattggatcactaatggtttttgaagaatggcaattaatgtagattagatagagttggtgaaagggggctaaacatatttaggtttctgttgggttactttggatttttgaatgtacctataaattacagatggttccccaaagcctccaagactcaatggtaataaatagaatgacttaggttatacagtattgtattatgcattcataaagcttctggattatctagaagtgtttgctatttacaatgtgaagtttgcgaagtgccgcgtggatttttatgtgaaacaagcatttctgttacggttcaggtaattatctctgggaaaaaaaattatcttggactataaaagttagtctcagctatttgaccttggggtcttacgaagtaaggtaatgctttaaaatgcaacaattgttattttactcatattttatatagaaaggtatgaaacaccaaagagagcgctgaaaatggactcactgtcatcttccttcagttctcctaatgatccagatggacagaatgatatcttttgggatcagaattctccattgacaaagcagttaggtaattaattattaacattttttatgtgagtaaatatttgataaatgattcagatttaactagaattctagtcagataatagcatcgggaacctctgagaatgttatatgattttatctgtataagtatgtgatgtaaacacataatcctctaagctgcactaaataaaattactttctaagaagtgacagctgttttttaaaatggagggttttttgtttaaaatttatagaaatgtctttgtttctttaggtaaaggaagaaaaaaacagatttacaccacagatagtgatgagatttcacatattgttaatcgtattgctcctcaggtaaatatcactagttttacagtttgttttaaaacagtgaagaatgtgccactaagtttttgtagtttctttaaatgaaaagtattgtctattataattcttttttccaaaaataaggcagcaaagattactgttttgccttttctacttttgaaatacatattttgaaaaaaggaatataatataaaatacaagatattttcttaagtatatatcttgttttaattttttagagtaatttttgactagggcattgtgtttatctgtaatgttgtgcttaacaacatacgacatcatttttcaagttgctaaaataatagaataaggcagtgaaaaaagtttatacttctatgattgttttgtgattggtacttcctgtctgtaacatttccccattgaaactattaatactcatttccttataagattatcaagaaacacttacaaaagtggagagcactgaattcaaatttagtcctcattcaacctcctatgctgtgtgacccagtgcaagttatttaaactcccaccacttcagttcattcagccatgaactagaattattgtgttgctcttgctgtcttcattggatcattatgagaattaaactagataaaaattctttgtaaactatagagtgctataattgtaaggttacgttaaggttgttactgtaatagaaccatctccaaagcttttttttcttttcttggacaggcatggtgactcattcctgtaatctcagcattttgggaggaaggctgaggcaggaagattgcttgaggccaggagtttaagaccctgtctcttaaaaaaaatttttttttgagtgtttcgtttctttttttcatttctgttcttttattgtttgagtgaaatagaaatatgttcaagtcaatcatttgacacaaagcaatccagtaactctaatattataattactaagaagcaaaggctcaatacgtgaaactgttctgaacttctttactttttgttctctttttcttatttaacatttaaatccagagaacatttttgcttagtgtcttctctgaaggaagtatgccatttttccttaacctgcgcttgaatagttactatatgttgaccataaacaatagatggcactggcccaaaacatggtttgaagaattactgtcacccaggtggaagagacagaaaatgaagtttttcttagcagctataaaatatccaaaattacacctagcacagtcaaaacaactctgttgctactagctctacattccatttttagcatgtcatagaaattcattttacttacagttaattagttaaatagcatttatgccataatagtacttactctataagttaacaatagatcttcattaattgtgggtttcacatgaaagaagcataataaaatgtgtttgggtgggccagtctaaatagtgataaaaagatagttgtgaataaattattggactctttacctaagtgggctagaaataatagctcatataaagaaatgacaacagtacgcaagtggtaacttgtataaaagaaaaaaatatagtgaaattagtagctttaaaatgttaccctcttaaactgagtacttttaaagcatataaatctttagcagtttcaaggtctgtttgaaagcttgtcatgttctcagaatgacaaatacttatattgtttatttttaggtgagtcattctcaaatcatttagttttaacattttcagagatagcatttttttaaatatgcgcttttattttggttggacagtcagttcactttttgcagggatacttttatacaatgttgtttatttgaagatggtatgtatcttcatttatacagctttgcacagtatactttttataatgaaatgaagtaatgcatttagataccttatacagcacctggattatggttgaaaatcaataaattatgtaattattcatgaagaaatatgtaataacatgtataaatagtatacaaacatacataggacccatgtatatgtaaagttgggtacataaagtcataatttagttctctgaaaattgaatgaatttaaaattacttttgtaaatggcagagttcataattaagactatgattgtctttaaattcaagattgttgaaataaaagggaaaatatattgagtctgaaagtgaaattactgattttcttgagtatttgcaaagctaaaggcaactaggttcaagttgacattaagaaaacttttttgattcattgaggatttgaagtaccaaactgtagggatcttttcacctaaatcttctagtaaataaatgtatactgacactggtatgcccaatattgtgctggatgctgagttattctaagaagagtccttgcctttgagtagcctataatctagtagtaaaattattttttaaattgtgtgatatttatgttcattctaggtactataaaatagagtgaaaatggttacttgatttgatttgttggtttggtttgcaattaatgcctaaagctcattctgtaatttttttgtgtgatcaagtgactgaaaggtacagcaaaagtatccaggtctaaaatgccttttttctgtatattatctgggctaaacttttctgttttctctatttttttattcttattcctgtctcattcttagcatcagttctaaccttgctcttatctcttaattcattcctgatcttaattctgagtgttcttaatttaggtcaacatggattgtccaactttagataaagattataataaggataaagaaaatttggagaaacagatgatacagaaagaattccatatgtatctcctctcaattctgatgatttctgccacacagtttctgacactaatgtttttataagtatcttaggacaattaaaatgtcaattttcttttgataaaaacatgcttctgttattaaatgtacatttgataaatttaattcttaaaacaatatttttttaaaataagcaatttgtaattctgaatgttttcattctctgaaacataagtggatcaattattgtagcttattattgctatctcccaacttcctattgtttttgagtttggtaagtgttacctcaccagaatttaggaaattaattcaaaatcattagtttttattgtcttttttctttcttttgtttttttggaagacgggggatgctacactggtactttatacctctttttttccctatctgccaaaggatgaaaaaccaacaacaaattctatgctggacatgtggattggtgaaactgctattccttgtactcccagtgtagcaaaaggaaaatcaagagcaaaaatcagctgcacaaagtaagttaagacttttcagcttttctgaaattcagtgaagcaaatattttttgataatactccattttggttttgtgaatatatcaaaatttttgttaataaaatttccacagttttgatctatcaaattttggagttaaaataattataactgttaaaatcttagagctttaacatcaaaatatgttaaataacagttggatataatgtttcagaacatttttagttattttttaatcttgtttaataggttaaaaacacaaagtcaagaagaagaacttatgaaactggctaaacaatttgataaaaatatggaagagctagatgtgattcaagagcaaaacaagaggaattatgattttacccagatgatttcagaaacagagattttaagtaattataaagataatatacagatgtggtcattacataatatagttcccgaaatagataatgctacaaaaaagccaatcaaaggaaacaccaagatatctgtggcaaataatcaaaatagcagtcagaagccatttgaccaaattgctgaagcagcctttaatgctatttttgatggttctactcagaaatgtagcggacagttaagccaagaactgccagaggctttttggagcaccagtaatactacctttgtaaagacaaatgctttgaaagaggagaaaatcattactaatgaaactctggtcattgaaaaactgtcaaataaaaccccacgatcactttcttctcaagtagatacacccataatgacaaaatcatgtgtgacttcctgtactaaggagccagaaacttctaataagtacattgatgcatttactacaagtgattttgaggatgattgggaaaacttactaggtagtgaaccttttgctatgcaaaatatcgacatgcctgaactctttccttctaaaacagcccatgttactgatcaaaaggaaatttgtacctttaatagtaaaactgttaaaaatacgtcaagagcaaatacaagtccagatgccaggttaggagattcaaaagtattacaagatctttcttcaaagacatatgacagagaattaatagatgcagaatatagattttcaccaaattcaaataaatcaaacaaattatccactggaaataaaatgaaatttgagaactcttccaataaaattgttattcaagacgaaattcaaaattgtatagttacatctaatctgacaaaaataaaggaagatattcttactaactctactgaagcttctgaaaggaagtcagctttgaacacaaggtattctaatgaacagaaaaataagtgcattttaaatcagtctattaaagcccctgttaatactgatctttttggctctgcaaatctaggcagtaaaaccagtgttagtaacccaaatcagactagtgcatcaaaagtaggttctttctttgatgattggaatgatccctcatttgccaatgaaattattaaagcatgtcatcaattagataatacctgggaagcagatgatgtagatgatgatttgttgtaccaagcatgtgatgatattgaaagactaactcagcaacaagacattagaaaggacagtaagacatcagaaagtatatgtgagatcaataataattccgaacatggagccaaactaactcagcaacaagacattagaaaggacagtaagacatcagaaagtatatgtgagatcaataataattccgaacatggagccaaaaacatgtttgctatatctaaacaaggaagtaatttggtacaatcaaagcatttgaatccaggcagcatttcagtgcagacatctttgacaaatagctcacaaatagataagccaatgaagatggagaaaggggaaatgtatggaaattctccaagatttttaggtgccacaaatttgactatgtattctaagatctcaaactgtcagataaataatctgcatgtgtcttatactaacactgatgttccaatacaagtgaatagttccaaattggttcttccaggaagttcaagtttgaatgtaacttcagatcatatgaatacagaaattactacttataagaagaaattgagtactaatcagccatgccataagactgtaacagatgaagctcagagcaaccttaacacaacagttggattttcaaagtttacatttacaaggatgaaaaattctcagattctttctcagtttaatcaaaattgtataactggaagtatgtctgataccaaaattacacagggtgtggagaaaaagaaaggtgtcaacccattactggaggaagctgttggacagcaatctttggtgaaactttctgaatctttgaaacaatcttcaaaaggtatgtatgaaatatgaaatagttttctttgaaaagcatcttaaaaagtagtaaaataattatttgttgtttttgagtgtgagtaatgtataaggtaaaactattctatgactagttaattttaagaattaactagaattcttaaaatgatacttggaaataattatacggcattatacagagtagttggtttatttttcaaaatattacattgaattctttcccagcacttaatacaatgactggcatatagtaggtactcagtaaatattttttgaataacttattctttcttggaaaatcatacctttagatatatgtattatagtgttcattaagattgtatttactaaattgttttaaaacttgagtaatctgggaagcagatgatgaagcagtgaggtaaataatatttagaaatttagagcattctaattaaacgtctttactagtgtgatatttgatataaacgtgctagcggtgatggttaaaattatgatttacttatttgataacagctatcatttctgattcttccaatttctcttttccccaagtctccattctatcaataagtttcattctttcaaaaaccgtatccccagactccatttttctttctacaacaagttaacatttcttgatgagactactgcagttcttttatctatctcctttcaattcttatctccaaacagtggaatagccttttaaaattggatgggcaaaaatggcgtttctatgcttaaaacaaccttcaatggctgcccgtcatatttcaaataaaatccaaactgtatactgtgaccaacaaagctgtggattatctctctttaacctgcgtctcctcttttttccttacctactaagcttcagctataccagctatcttttagtttttcaaacagtgtatgtttttcttccttgtccaggaacttagaccgtgctcttccctttgactaaaactacttcttttcaacatgtgaccccttccccactcttttgttggtgctttcttacatctcagtataagtactactttctcacagaggccttccttgaagagtctataaatagatctccttgtttattttttatttcctaattgctttcatcacaagttgaaattaaatatttagtgactcttctctgtcttgttggcattactgttccaactttcctatctaagtgactttttttaaaaatttacaatagtaatatgctagttatttaaaaagaaaagtaaaacagtatagaataatttaaaggaaaaagttaagtcttctgtttctcctttctgataaccatcccttacggaaaaccactattaatagttggtatgatgtagcattttctatgaatataaaaagatatgtgtgtgtgtatgtacgtatatatgtgtatgcatatatatatacctatagatctatttaaatattaataaatctgtatacccactatttggcaacttgcttttgccttaatatattatagctgtcttttcctattagtacatataaatttattttagtcctgttaatgactatgtgatatatatggtggatgtatcataatttaactgtttctctgtgatggaagtttgggttggttgcagtcttttgcaattacaaacaatactccagtaaatatccttctgcataaatttccgcatgcttgtataattgtatctgttaattcctaaaaaattgctacaagaggaagttttaaaatttgatggataccaccaaatttctatccgaagcagttataccaatttatcttatcaaaacttacagtaaataattctctacacccaagggtgtccaatcttttggcttccctgggccacattggaagaattatcttggatcacacataagatacactgacactaacaacagctgatgaactaaaaaaaaaaaaaaaaaaaatcacaaaagaatctcataatgttgtaaaaaagtttatgaatttgtgttgggctgcattcaaagccatcctgggctgcgggtagcttgcgggctgcgggttggacaagcttgctttacatgatagcccaaactagatattttgaaatattaaaaattgttctcaatctataataattttaagtatttaaatttgtattaaagtgagcatattgtaactaaatcaagcatgttcctagcatgactttatttacagatagagttgacccttgaacagtgtgggggttagaggcgctgatctgatttgcagtcgaaagtctgtgtataacttttgatcccctaaaaacttaactgctaatagcctgctgttgaccagaaacctttccgataacataattaattaatacatattttgtatgctcttatatgtattatatactgtattcttacaataagctggaaaagtgttattaagaaaataaggaagagaaaataatatttactattcattaagtgaaagtggatcatcataaaggtcttcatcctcatgatcttcatgtctagtaggccgagaaggaagaagagtaggagttggtcttgctgtctcaggggtgtcagatgcagaaaacaacctacaaatgagtggacttgccagttcaagcccatgttgttcaagggtcaactatagttataattctataaaagactaaacctcctggagtatttgagttttcccaaaactcctatctaccaatctatctgcattttttatggataatctgcgttttagcttaccttatcaatattttctttaaacttattgatagtactgaatctcttaattactattaactttgttgatgttttctattgtttctacttccttttactttggtatgtagcaagctgctctccagggaagtatctctgaaacaaaactcacttaactcccacatttatttcaggcaggagttggcaaactatgatctgtccaaatccagcctgcagcttgtttatgtatagccagcacactaaaaatgatttttacattttaaatggttggaaaaaaattaaaaggagaataatatttcatgacatttgaaaattatatgaaatccagatttcattgtccataaacaggttttatttgaatacagctcatcagttatttatacattatccataactatttttgctacagtggtacaggtgagcagttgcaacaagatactcaaaggttaacattcttgctttctgactctttctttacaggaaaaaaaaaaattactgacccttgcactgtaagatcaagattaagaagagcagcttttgcttagtactttacaatattttaagacttcattgtgtatttttattatagattgagttaaaggaaagactgatgggaaaaatggatgagtccctaaatcaaattttcatggtgtgacctgattatcatttgaaattattttctataatattgccaagcaaattgtaagaccaactttaggaagttatgttttctgctgttacagattattaacctgttttctttccacacagtcaaattcagtgtaaagtctttggatgtgtagtctgagtttgttgtgtttctcagctttgagactaaaagtattagataattagtcaagctaattagaaagtatcttctggtgtctctctttaggaaaaaatatctacagtctgttaggtaaatagcttaggaaataaaagccatcaaaatcatctgggaaacttatttaaaatatgtatttcttagcctgaataccccctcccatttctgattataccaagaaaggaaagggaggcagattatatattttgaaaatgcctctgttagttaacaagagaaatgtctcataaattgtgtatctttttctaaatgtcagaataaatgatatacttaaatatgtattagggtgatagtcttaaacttaaaatatcatttaaatgagaaagtgatttctaatacaaagcctcaacttactaagttaattgagattattttaaagtttctccaaaatgcatcctccaaataaaaatataatttctgacagtgaatcacaggtaaccagtttgacatgacagatttcattttatcactctaaaatatatttcctcagtggatgaaatgaaaattttatagctctatagggaaaagtagatgtgaatattaatataacatcttatgtaaatatacactgtttgagattgataactaatttaattccttatattttgactattttccaattaaagtttacataacattttaaatcccaatgtatcctttttaaagatatatttattcgtgggtcatataaattagatgtcattgtccacaagaattatttggtgggtagtcagttttctatcaaactgaattttatcacactgtgaaaagaatgtatcaaatagagacagatccatcagtgcttgattttcttttgaactggagcattatatctgtattatgtacttagaattttatattcagtagtttagtttgatttaatagccaactaatatggcaaatctgggtgattaaaaaaagcaaaaattaaagcacatattgaatgactttataggctataaaagtaaaactcatcttttgttgaatttttagaggaagaagagaaaaatagaaagtgttctcctgaagaaattcagagaaaaagacaagaagcactggttcggagaatggctaaagcacgagcctcatctgtaaatgcagctcccacttcatttctttaatgaaatattagttggaagacttcacgaagactgctgataactatctgtgattgataggaaattttttttcttgatttctctgtgagaaatgtaatgctgacttttataaagcctggacttctactttatttaataaatcaatgtttgcaatggtaaatgaaacatttccttggacatgtatttgaaagtcattaaatacaaaagttttggaaattcaggaaagttagcaattatgtacggatattatacagaggaaagtagttatatttttaaatgctattattgcagaggatcatcaaaaaagaggtaatctacgttatttcctattctaatgtcttttcctaataaaaaacttcaactttctaagttagtagagactgtttttgtagttttactttcattaactgttgcttaaggtttttatacacttccagattttaattaatactttcatatttctaggaacatggttgatatgaaataaaggactttttatttgtaaggaaa

SEQ ID NO: 6866 - DNA, 11754 bp, Homo sapiens
gggctaaacatatttaggtttctgttgggttactttggatttttgaatgtacctataaattacagatggttccccaaagcctccaagactcaatggtaataaatagaatgacttaggttatacagtattgtattatgcattcataaagcttctggattatctagaagtgtttgctatttacaatgtgaagtttgcgaagtgccgcgtggatttttatgtgaaacaagcatttctgttacggttcaggtaattatctctgggaaaaaaaattatcttggactataaaagttagtctcagctatttgaccttggggtcttacgaagtaaggtaatgctttaaaatgcaacaattgttattttactcatattttatatagaaaggtatgaaacaccaaagagagcgctgaaaatggactcactgtcatcttccttcagttctcctaatgatccagatggacagaatgatatcttttgggatcagaattctccattgacaaagcagttaggtaattaattattaacattttttatgtgagtaaatatttgataaatgattcagatttaactagaattctagtcagataatagcatcgggaacctctgagaatgttatatgattttatctgtataagtatgtgatgtaaacacataatcctctaagctgcactaaataaaattactttctaagaagtgacagctgttttttaaaatggagggttttttgtttaaaatttatagaaatgtctttgtttctttaggtaaaggaagaaaaaaacagatttacaccacagatagtgatgagatttcacatattgttaatcgtattgctcctcaggtaaatatcactagttttacagtttgttttaaaacagtgaagaatgtgccactaagtttttgtagtttctttaaatgaaaagtattgtctattataattcttttttccaaaaataaggcagcaaagattactgttttgccttttctacttttgaaatacatattttgaaaaaaggaatataatataaaatacaagatattttcttaagtatatatcttgttttaattttttagagtaatttttgactagggcattgtgtttatctgtaatgttgtgcttaacaacatacgacatcatttttcaagttgctaaaataatagaataaggcagtgaaaaaagtttatacttctatgattgttttgtgattggtacttcctgtctgtaacatttccccattgaaactattaatactcatttccttataagattatcaagaaacacttacaaaagtggagagcactgaattcaaatttagtcctcattcaacctcctatgctgtgtgacccagtgcaagttatttaaactcccaccacttcagttcattcagccatgaactagaattattgtgttgctcttgctgtcttcattggatcattatgagaattaaactagataaaaattctttgtaaactatagagtgctataattgtaaggttacgttaaggttgttactgtaatagaaccatctccaaagcttttttttcttttcttggacaggcatggtgactcattcctgtaatctcagcattttgggaggaaggctgaggcaggaagattgcttgaggccaggagtttaagaccctgtctcttaaaaaaaatttttttttgagtgtttcgtttctttttttcatttctgttcttttattgtttgagtgaaatagaaatatgttcaagtcaatcatttgacacaaagcaatccagtaactctaatattataattactaagaagcaaaggctcaatacgtgaaactgttctgaacttctttactttttgttctctttttcttatttaacatttaaatccagagaacatttttgcttagtgtcttctctgaaggaagtatgccatttttccttaacctgcgcttgaatagttactatatgttgaccataaacaatagatggcactggcccaaaacatggtttgaagaattactgtcacccaggtggaagagacagaaaatgaagtttttcttagcagctataaaatatccaaaattacacctagcacagtcaaaacaactctgttgctactagctctacattccatttttagcatgtcatagaaattcattttacttacagttaattagttaaatagcatttatgccataatagtacttactctataagttaacaatagatcttcattaattgtgggtttcacatgaaagaagcataataaaatgtgtttgggtgggccagtctaaatagtgataaaaagatagttgtgaataaattattggactctttacctaagtgggctagaaataatagctcatataaagaaatgacaacagtacgcaagtggtaacttgtataaaagaaaaaaatatagtgaaattagtagctttaaaatgttaccctcttaaactgagtacttttaaagcatataaatctttagcagtttcaaggtctgtttgaaagcttgtcatgttctcagaatgacaaatacttatattgtttatttttaggtgagtcattctcaaatcatttagttttaacattttcagagatagcatttttttaaatatgcgcttttattttggttggacagtcagttcactttttgcagggatacttttatacaatgttgtttatttgaagatggtatgtatcttcatttatacagctttgcacagtatactttttataatgaaatgaagtaatgcatttagataccttatacagcacctggattatggttgaaaatcaataaattatgtaattattcatgaagaaatatgtaataacatgtataaatagtatacaaacatacataggacccatgtatatgtaaagttgggtacataaagtcataatttagttctctgaaaattgaatgaatttaaaattacttttgtaaatggcagagttcataattaagactatgattgtctttaaattcaagattgttgaaataaaagggaaaatatattgagtctgaaagtgaaattactgattttcttgagtatttgcaaagctaaaggcaactaggttcaagttgacattaagaaaacttttttgattcattgaggatttgaagtaccaaactgtagggatcttttcacctaaatcttctagtaaataaatgtatactgacactggtatgcccaatattgtgctggatgctgagttattctaagaagagtccttgcctttgagtagcctataatctagtagtaaaattattttttaaattgtgtgatatttatgttcattctaggtactataaaatagagtgaaaatggttacttgatttgatttgttggtttggtttgcaattaatgcctaaagctcattctgtaatttttttgtgtgatcaagtgactgaaaggtacagcaaaagtatccaggtctaaaatgccttttttctgtatattatctgggctaaacttttctgttttctctatttttttattcttattcctgtctcattcttagcatcagttctaaccttgctcttatctcttaattcattcctgatcttaattctgagtgttcttaatttaggtcaacatggattgtccaactttagataaagattataataaggataaagaaaatttggagaaacagatgatacagaaagaattccatatgtatctcctctcaattctgatgatttctgccacacagtttctgacactaatgtttttataagtatcttaggacaattaaaatgtcaattttcttttgataaaaacatgcttctgttattaaatgtacatttgataaatttaattcttaaaacaatatttttttaaaataagcaatttgtaattctgaatgttttcattctctgaaacataagtggatcaattattgtagcttattattgctatctcccaacttcctattgtttttgagtttggtaagtgttacctcaccagaatttaggaaattaattcaaaatcattagtttttattgtcttttttctttcttttgtttttttggaagacgggggatgctacactggtactttatacctctttttttccctatctgccaaaggatgaaaaaccaacaacaaattctatgctggacatgtggattggtgaaactgctattccttgtactcccagtgtagcaaaaggaaaatcaagagcaaaaatcagctgcacaaagtaagttaagacttttcagcttttctgaaattcagtgaagcaaatattttttgataatactccattttggttttgtgaatatatcaaaatttttgttaataaaatttccacagttttgatctatcaaattttggagttaaaataattataactgttaaaatcttagagctttaacatcaaaatatgttaaataacagttggatataatgtttcagaacatttttagttattttttaatcttgtttaataggttaaaaacacaaagtcaagaagaagaacttatgaaactggctaaacaatttgataaaaatatggaagagctagatgtgattcaagagcaaaacaagaggaattatgattttacccagatgatttcagaaacagagattttaagtaattataaagataatatacagatgtggtcattacataatatagttcccgaaatagataatgctacaaaaaagccaatcaaaggaaacaccaagatatctgtggcaaataatcaaaatagcagtcagaagccatttgaccaaattgctgaagcagcctttaatgctatttttgatggttctactcagaaatgtagcggacagttaagccaagaactgccagaggctttttggagcaccagtaatactacctttgtaaagacaaatgctttgaaagaggagaaaatcattactaatgaaactctggtcattgaaaaactgtcaaataaaaccccacgatcactttcttctcaagtagatacacccataatgacaaaatcatgtgtgacttcctgtactaaggagccagaaacttctaataagtacattgatgcatttactacaagtgattttgaggatgattgggaaaacttactaggtagtgaaccttttgctatgcaaaatatcgacatgcctgaactctttccttctaaaacagcccatgttactgatcaaaaggaaatttgtacctttaatagtaaaactgttaaaaatacgtcaagagcaaatacaagtccagatgccaggttaggagattcaaaagtattacaagatctttcttcaaagacatatgacagagaattaatagatgcagaatatagattttcaccaaattcaaataaatcaaacaaattatccactggaaataaaatgaaatttgagaactcttccaataaaattgttattcaagacgaaattcaaaattgtatagttacatctaatctgacaaaaataaaggaagatattcttactaactctactgaagcttctgaaaggaagtcagctttgaacacaaggtattctaatgaacagaaaaataagtgcattttaaatcagtctattaaagcccctgttaatactgatctttttggctctgcaaatctaggcagtaaaaccagtgttagtaacccaaatcagactagtgcatcaaaagtaggttctttctttgatgattggaatgatccctcatttgccaatgaaattattaaagcatgtcatcaattagataatacctgggaagcagatgatgtagatgatgatttgttgtaccaagcatgtgatgatattgaaagactaactcagcaacaagacattagaaaggacagtaagacatcagaaagtatatgtgagatcaataataattccgaacatggagccaaactaactcagcaacaagacattagaaaggacagtaagacatcagaaagtatatgtgagatcaataataattccgaacatggagccaaaaacatgtttgctatatctaaacaaggaagtaatttggtacaatcaaagcatttgaatccaggcagcatttcagtgcagacatctttgacaaatagctcacaaatagataagccaatgaagatggagaaaggggaaatgtatggaaattctccaagatttttaggtgccacaaatttgactatgtattctaagatctcaaactgtcagataaataatctgcatgtgtcttatactaacactgatgttccaatacaagtgaatagttccaaattggttcttccaggaagttcaagtttgaatgtaacttcagatcatatgaatacagaaattactacttataagaagaaattgagtactaatcagccatgccataagactgtaacagatgaagctcagagcaaccttaacacaacagttggattttcaaagtttacatttacaaggatgaaaaattctcagattctttctcagtttaatcaaaattgtataactggaagtatgtctgataccaaaattacacagggtgtggagaaaaagaaaggtgtcaacccattactggaggaagctgttggacagcaatctttggtgaaactttctgaatctttgaaacaatcttcaaaaggtatgtatgaaatatgaaatagttttctttgaaaagcatcttaaaaagtagtaaaataattatttgttgtttttgagtgtgagtaatgtataaggtaaaactattctatgactagttaattttaagaattaactagaattcttaaaatgatacttggaaataattatacggcattatacagagtagttggtttatttttcaaaatattacattgaattctttcccagcacttaatacaatgactggcatatagtaggtactcagtaaatattttttgaataacttattctttcttggaaaatcatacctttagatatatgtattatagtgttcattaagattgtatttactaaattgttttaaaacttgagtaatctgggaagcagatgatgaagcagtgaggtaaataatatttagaaatttagagcattctaattaaacgtctttactagtgtgatatttgatataaacgtgctagcggtgatggttaaaattatgatttacttatttgataacagctatcatttctgattcttccaatttctcttttccccaagtctccattctatcaataagtttcattctttcaaaaaccgtatccccagactccatttttctttctacaacaagttaacatttcttgatgagactactgcagttcttttatctatctcctttcaattcttatctccaaacagtggaatagccttttaaaattggatgggcaaaaatggcgtttctatgcttaaaacaaccttcaatggctgcccgtcatatttcaaataaaatccaaactgtatactgtgaccaacaaagctgtggattatctctctttaacctgcgtctcctcttttttccttacctactaagcttcagctataccagctatcttttagtttttcaaacagtgtatgtttttcttccttgtccaggaacttagaccgtgctcttccctttgactaaaactacttcttttcaacatgtgaccccttccccactcttttgttggtgctttcttacatctcagtataagtactactttctcacagaggccttccttgaagagtctataaatagatctccttgtttattttttatttcctaattgctttcatcacaagttgaaattaaatatttagtgactcttctctgtcttgttggcattactgttccaactttcctatctaagtgactttttttaaaaatttacaatagtaatatgctagttatttaaaaagaaaagtaaaacagtatagaataatttaaaggaaaaagttaagtcttctgtttctcctttctgataaccatcccttacggaaaaccactattaatagttggtatgatgtagcattttctatgaatataaaaagatatgtgtgtgtgtatgtacgtatatatgtgtatgcatatatatatacctatagatctatttaaatattaataaatctgtatacccactatttggcaacttgcttttgccttaatatattatagctgtcttttcctattagtacatataaatttattttagtcctgttaatgactatgtgatatatatggtggatgtatcataatttaactgtttctctgtgatggaagtttgggttggttgcagtcttttgcaattacaaacaatactccagtaaatatccttctgcataaatttccgcatgcttgtataattgtatctgttaattcctaaaaaattgctacaagaggaagttttaaaatttgatggataccaccaaatttctatccgaagcagttataccaatttatcttatcaaaacttacagtaaataattctctacacccaagggtgtccaatcttttggcttccctgggccacattggaagaattatcttggatcacacataagatacactgacactaacaacagctgatgaactaaaaaaaaaaaaaaaaaaaatcacaaaagaatctcataatgttgtaaaaaagtttatgaatttgtgttgggctgcattcaaagccatcctgggctgcgggtagcttgcgggctgcgggttggacaagcttgctttacatgatagcccaaactagatattttgaaatattaaaaattgttctcaatctataataattttaagtatttaaatttgtattaaagtgagcatattgtaactaaatcaagcatgttcctagcatgactttatttacagatagagttgacccttgaacagtgtgggggttagaggcgctgatctgatttgcagtcgaaagtctgtgtataacttttgatcccctaaaaacttaactgctaatagcctgctgttgaccagaaacctttccgataacataattaattaatacatattttgtatgctcttatatgtattatatactgtattcttacaataagctggaaaagtgttattaagaaaataaggaagagaaaataatatttactattcattaagtgaaagtggatcatcataaaggtcttcatcctcatgatcttcatgtctagtaggccgagaaggaagaagagtaggagttggtcttgctgtctcaggggtgtcagatgcagaaaacaacctacaaatgagtggacttgccagttcaagcccatgttgttcaagggtcaactatagttataattctataaaagactaaacctcctggagtatttgagttttcccaaaactcctatctaccaatctatctgcattttttatggataatctgcgttttagcttaccttatcaatattttctttaaacttattgatagtactgaatctcttaattactattaactttgttgatgttttctattgtttctacttccttttactttggtatgtagcaagctgctctccagggaagtatctctgaaacaaaactcacttaactcccacatttatttcaggcaggagttggcaaactatgatctgtccaaatccagcctgcagcttgtttatgtatagccagcacactaaaaatgatttttacattttaaatggttggaaaaaaattaaaaggagaataatatttcatgacatttgaaaattatatgaaatccagatttcattgtccataaacaggttttatttgaatacagctcatcagttatttatacattatccataactatttttgctacagtggtacaggtgagcagttgcaacaagatactcaaaggttaacattcttgctttctgactctttctttacaggaaaaaaaaaaattactgacccttgcactgtaagatcaagattaagaagagcagcttttgcttagtactttacaatattttaagacttcattgtgtatttttattatagattgagttaaaggaaagactgatgggaaaaatggatgagtccctaaatcaaattttcatggtgtgacctgattatcatttgaaattattttctataatattgccaagcaaattgtaagaccaactttaggaagttatgttttctgctgttacagattattaacctgttttctttccacacagtcaaattcagtgtaaagtctttggatgtgtagtctgagtttgttgtgtttctcagctttgagactaaaagtattagataattagtcaagctaattagaaagtatcttctggtgtctctctttaggaaaaaatatctacagtctgttaggtaaatagcttaggaaataaaagccatcaaaatcatctgggaaacttatttaaaatatgtatttcttagcctgaataccccctcccatttctgattataccaagaaaggaaagggaggcagattatatattttgaaaatgcctctgttagttaacaagagaaatgtctcataaattgtgtatctttttctaaatgtcagaataaatgatatacttaaatatgtattagggtgatagtcttaaacttaaaatatcatttaaatgagaaagtgatttctaatacaaagcctcaacttactaagttaattgagattattttaaagtttctccaaaatgcatcctccaaataaaaatataatttctgacagtgaatcacaggtaaccagtttgacatgacagatttcattttatcactctaaaatatatttcctcagtggatgaaatgaaaattttatagctctatagggaaaagtagatgtgaatattaatataacatcttatgtaaatatacactgtttgagattgataactaatttaattccttatattttgactattttccaattaaagtttacataacattttaaatcccaatgtatcctttttaaagatatatttattcgtgggtcatataaattagatgtcattgtccacaagaattatttggtgggtagtcagttttctatcaaactgaattttatcacactgtgaaaagaatgtatcaaatagagacagatccatcagtgcttgattttcttttgaactggagcattatatctgtattatgtacttagaattttatattcagtagtttagtttgatttaatagccaactaatatggcaaatctgggtgattaaaaaaagcaaaaattaaagcacatattgaatgactttataggctataaaagtaaaactcatcttttgttgaatttttagaggaagaagagaaaaatagaaagtgttctcctgaagaaattcagagaaaaagacaagaagcactggttcggagaatggctaaagcacgagcctcatctgtaaatgcagctcccacttcatttctttaatgaaatattagttggaagacttcacgaagactgctgataactatctgtgattgataggaaattttttttcttgatttctctgtgagaaatgtaatgctgacttttataaagcctggacttctactttatttaataaatcaatgtttgcaatggtaaatgaaacatttccttggacatgtatttgaaagtcattaaatacaaaagttttggaaattcaggaaagttagcaattatgtacggatattatacagaggaaagtagttatatttttaaatgctattattgcagaggatcatcaaaaaagaggtaatctacgttatttcctattctaatgtcttttcctaataaaaaacttcaactttctaagttagtagagactgtttttgtagttttactttcattaactgttgcttaaggtttttatacacttccagattttaattaatactttcatatttctaggaacatggttgatatgaaataaaggactttttatttgtaaggaaa

SEQ ID NO: 6867 - DNA, 181 bp, Homo sapiens
tcaagcgattctcctgcctcagcctcccaagtagctgggactacaggcgtgtgccacctcgcccggctaattttttgtatttttggtagagacaggggtttcaccgtgttagccaggatggtctcgatttcctgacctcgtgatccacccgcctcggcctcccaaagtgctgggattacag

SEQ ID NO: 6868 - DNA, 13165 bp, Homo sapiens
agagaaaattaatattttataaaattctattagtttgaggttaaaaagaaaaatcaacggcaaatttaccaactttttcttaaaagcacagtgaatccaaaacagataaaagactacaaaccctataaaatgaatttagattcattttctactgcagaaacattaaaagtaatttggatgatttcctaaatcttaaatggtgcaaaaggcggtttgcttaattatgattgctggcgatgtggatgagtcctcctgtctgctatgaaaaatgttcttgctcagggtcccttttatgaagattcctgggaaaaatcattttccagtcctagtgtcaagaacagttatactattggttaaaaattcatttacttttggcattggctattagagaatttctggcagtgagtttaaacagaatacttgactgcaaacaagttataacagttacccaactgtgtccttcctttgctgctaagtcaggttgcctttactttgaaaaaggtaaaaaggacaaaacatatctacttaggcacgtggaatctttttgtttaaagtgtttttctattcgttgctacaggtacagagtaaaaaaataataatcacaaaggttctgagaactggaaggagctatggttctcatctcacttctagaattaactatgaatcatgtctttttcatcacccattcctgggggccctccattcagtgttgcatggtgagaagaatgctgaagagccaggagaggaaggctcctgtttcagccccactactaattggcatctggctctgtgactttcttgctttgggtcacagtaccctcagcttaaaatgaggatgctggtctggacaatctctaaggttcttctagaatggaccttgtcttcattatagaatgatagtttaggaacagtgggaacacatttccactccagcctctgattgaggccagaagtgaatactctactccactatggtccctgtgcccaaagctccagccctctaaggatcttgttgcatagctatcagcattctccatgaactcctttgtgaccagctcctgagcacaagattctttaacatttcctgtccataagtgaccatcacaccctgcaggcagccaggctttaggcagtggagagacgcggggttccaggaaccctgcttaagcacggcatgctcaggagagactttcttaccaaacagctcaatgtagacctcttgaagcgtgtgcacactgcagaactggttcagttcgtggtggatcttgttgaagatgagggccttgtcatagtcagcagtatagttcttcactatatcatacactgagaggaagggagagggcttggcataagaaaaggcaggactcaaaatcccatcagacacggcaggtgtcatttaccaaggtgctacaacagacacgggagtggcatgctggggaaagtgagctggtggtgtgaataaactgttaagacgtacctgcgttcgggaccaggaagttcaccacttcaattctgtcaaagtagatcatcacaccaccactattggagggagaatggacaagaagtcactgggaagccttagaatatggtgcagtcccccagggtgatggcgtaagatgtggggcttggcagaaaaggagtagaagagttcacgggaagttggaaggcagcttggatctccaagtgggaggttctgcagggctcatggcaacaacatactctcctgagaaatcacactgcctaggaacatctctacaaagacatgaatgagacttttggggaccagtacgaaagagtaactcatatctttggaatcagcaatgccttttgattaatcagttgcacggaaaagactaaggagggtcaaggtgaagttttcagaacttagaaggttactgtggaatgttatgatcaatgtttcttaaactgtcttcactattactttggtgtcacactccctttgccctcaaatatttattataaaaagatttcaaacatagagaagccgaaagagtagtataactaacatccatatccagatacctgaattcaacactgataacattttaccttatttattgaccttttttttttctgaacatttcaaagtaagctgcagttaggatactttactcctttactttggtgagcactgtcttaagaataatcattctcctacacactcatggtatcattccaagcctaagaaaattagcaataattctgtaatatcacctaatacccagtccttattcagatttccccaacagtttgtgttatggactgacctgtgtatgcctcgcccccagattcatatgttgaagccctaacccccaatgtgactgtatttggagattagacctttaagaaggtaattaaggttaaacaggtcataagggtgggctgtaatccaaaaggtctggtatccaccaaagacctttttctctcttcttgcacatacagaggaaaggccttgtgaggatgtgacaaaaaggtggtcacctgcaagccagaaagagaggtctcaccaaaactacccctgctgttacccggatcttggactttgggccttcagaatggtgagaaaatatctattattttagtcccttggtgtgtagtcctctgtcatggcagcctgagtggactcatatagtttctgtcgtatctgttatagctgttaattttgaaccaggttctaatcaatgctcacccttgcttctgtttatgtttcttgtaagtctctgtccaatccagcatccctctaaatacaaccactttgtgaagagatcaggcctgcgatcttgtgggatgttccaattccggatttgtcagagtgtttctttgtggtattctttgtcactctatcccagtttaaactgtctttgctttccagtgggaccgctgtagcagtgttctcttcggatctctttgccctgaaggtctcccctacctttatgacattctctttagttatgcaagttatcttcttgtatcaggtcatttatctgctaaaaacctttgtgcatcctcacttctttttttgtttttaacgttaaaattttattttattttccattgtttaaattcagaggtacatgtgcaggatgtgcaggtttgttacataggtaaacgtgtgccatggtggtttgctgctcagatcatcccatcacccaagtattaagctcagcatctattagctattcttcctgatgctctccctctccccaccccctatccactgacaggccccagtgtgtgttgttcccctccatgtgtccatgtgttctcatcattcagttcccacttataagtgagaacatgtggtgtttggttttctgttcctgcattagtttgctagggataatggcttccagctccatccatgtccctgcaaaggacatgatcttgttcctttttatggctgcatagtattccatagtatatatgtatcacattttctttatcctgtctatcgttgatgggcatttgggttgattccatgtctttgttattgtgactagtgatcctcacttcttttggtctttttttttaaagacggagtctcactctgtcgccaggctggagtgcaattgtgtgatcttggctcactgcaatctctgcctcccaggttcaagtcattcccctgcctcagcctcccgagtagctgggactacatgcatgcaccaccacacccagctaatttttgtattttagtagagacggggtttcaccatgttggccaggatggtctcgatatcctgacctcatgatccacctgcctcagcctcccaaagtgctggattcaaggtttgactcaccgggcccagcctgatcctaattgataatagagtaagtgcaaactccttatcacatacagcattctagcccctcctgaaccttctatgatttcctctactgcactccatcacctggtcaaatcaatatagggagctacgagacagggaattaaccaagaaagggtgcctcccttttcactgtctcttcctgcaaccagccagacagccttttctctgacttatttgggcttaaaagctttattctgggtaccttacctagtcccacaaggtacattcttcgcctcatctgtctggagtgtggtctggaaacagaggaaacataaagtgctagaagaaggacagtgacaaagtaacttacttttcagaatcctaaatgcctttgtcctggaataactgtttgggttgagcatggcgttcattaaacatgattaccccacctaatcctccttcctcacagggttgctaagccaagtaaaggcccgtgccccagcctcactataagtgaaccaccacatcaacaagctgagtaataatggtttagtgaagatgacactggattgggcatcttaagacttgtgcttgcttctacctcttctatttatgttaggcaccgctttatgttcgaaggcccccagtggatgcttgaaaccggggagagtaccaaaccctataacacatacctatgataaagtttaatttataaattaggtacagtaagtgatcaacaataataaaatagaacaattataacaatatactgtcataaaagttatttgaaggtggtctctctctctctctctcaaaatatcttattgtactgtagtcacctgtttcaaccatggtttattgtgggtaactgagcctgtggaaagtgaaatagtggataagggggagggctgttgtactagttttgaaacagcagattacctatttaacctgtctcagaccctagcacatgctcagcccattctcaggattactacaaractcaaatgagacaatgtacctgaatgcagtttgaaagccacaaagcctggtaaacagcacatgaaacttacagggaaaatgcctagcaggtatcccaagacattctcctgggtcagtgtaaagtgtaaaatcttgttattcttcttagctggacatacttcaagagaatggcaagtccaacttagccaggctttagatttgccacaactaacctcactcctattttagatgtcacctcccctcacttagtttaactcctccccactcactgcaaaaattatgtttgtatttctgaattcaaataagaatcagcaaaattactatgttttctttccatttaacatggtagcctgtgatttaaaacatacacacataaaccctgacttttctttccatatactcagaacaggttcttctctggctttatcttgaaggaataatccccagcctcattttatatatatatagtgtatgtgtgtatatatatatatattatatatatataatatgtatatattatccttatatcattctctagaatggcattttactcatccaatggctaaataatttcaaatcatgcactagttaacagcccaagtttgcagtcgtccagccataccacagaggccaagcatacctgcacagacttatatgatgtgatgaaagggagcatgagatggaaaccagggccgctggtcgaagtcagcagggcaccgcctctgcagaggagggggaagagagaggcagcttcagtttggcaagaaggctctgttagatcaatatcatgagggtcaactttcccttcagccctataaacatataatagagagtgacatgtgctgcagccatggctacagatccctttcttcctctcagctagatcctaatattctaggaagcctgatggtaaaacataaaactattgttcatgcttttgcaaggagaaaaataggcacataggctaaatggaataaagacagcagaacccactagtgcagtcccagcgctttgcggggctgaggtgagaggattgcatgaactcaggagtttgagaccaacctgtctcaaatagtgagaccctgtctctacaaaaaaagaaaaggaaaaaaattagctgagtgtggtggttgtatgcctatagtcccagctacttgggaggctgagatgtaagaattgcttgagcctgggaggttgaggatgtagtgagacataattttgccactgcactccagcttgggcaacaaagtgagactctgtctaaaaaaaaaaaagaaaaagacagcagaatccatgggtatacttagataagagaaagtctggccaggcgcggtggctcacgcctgtgatctttgggaggctgaggtgagtggattattaggtcaggagttcaagaccagcctggccaacatggtgaaacctcgtctctactaaaaatacaaaaattagccaggcgtggtggcaggcacctgtaatcccagctacttaggaggctgaggcagagaattgcttgaacctgggaggcggaggttgcagtgaaccaagatctcaccactgcactccagcctgggcaacacagcgagactgtctcaaaaaaaaaaaagataagaagtctgttttactttgtcatatctgttgggcttgtggcaatccattagggcagttaagtccagtaatatggttatcaactacctgcactaatgctggagtccaatgacatgaccaaccaaaagaataatttgaagtactttataaataattgaaatatatgttttggcaatagagttacctttctaatcaagttatatgtaaatgatgaagttaaaagcctttttggggaacatgtaagcagatgatggggagaaagaattaaaggagagaggaattccaatcagagttttagaacttgctgttagcaatccagaaacaagcatcacaacagcacatataagaagagttcataaagacataaaggcaaaacacttggtcatggaggttactaaaaagaaagcaacccaagacttataagtgcttctttgctttatattaggcaaagaattaaaaaaaaaaccaataaaataaacagtgacataatgggttcctttattgtaggaaccactatcctaaggcttgctttgattgacgtaagtcaacctgcaggctctttcattttccttgaaatgttaatattattttatttttagaaacagggtcttgctctgtcacccaggctggagtgcagtggtgtgatcatagctcactgcagcctcaaacttctgggctcaagtgatcctcccacctcagccccccaaataactgggattacaggcacgtgctgccatgctcggctaattttttactttttgtaaaaatgggctctcactatgttgctcaggctggtctcaatctcctgggctcaggtgatcctcccatctaagcctcctgagtagctaggactacgtgtgtgtgacaccacagccggccaattaaaattttattttttattttatttttttagagatagggtctcactatgtgacccaggctggctgaaatgttaattttaaaagagcatcccaaattagcagagtaggctaccttctcaagttgccatcaagaactggtactcagctggcttttgtaaaggtaacctagcagtgtaaagctaagactgccagagggatgtaaagctaagactgccagagggatgtaaagctaagactgccagaggaatgtaggagaaaacagtattttagggatgatcaatgaggagcaccagtttcctttagattttgtctctaaatctatatacacatttattaatcaccacccatggcatcatcttggactactaagtgaagttctaaatttacatatatatgtgtgtgtgtgtatcctctttcccgtggttactgacataaaaagctccatctgaaaaggctcccctattcaaggaaatataaatagagatgttcagcagaatctgctaggaaagcaatgaccaggaaagggagctatttaacaggaagttgccggcttctccctgtctctgccttacctgtaatataccccaatatgtccctcttctatcttgtgcacagctgagaagagagatgcacaaaagaaactggaagccacagccacaactgctcccaactgagccatcagtgagcctttatcctagggaaaagacacgggaaaatgtgtgtggtccaacgtgcaggagaaaaggccacaacagcgagaggacctcaccaagctgagctccctgcgagtgactcatatccagcctggtgtcgtgtgaacacaaggctagatctacaactcgcttcctcctcgttctcagtcaacgttcccctttctttaactgtaaaattagagcccccaccgcactgaggaagcactggctccggatacagccgttgctcaagggagaacccgtgccagctgggtagggttcagaacacagccttgtcttcctgtgaacacgaatgtgctgtcactgaacctttcctaccagtagtagggaagagaggcagctgcagtactttggcccaaattacagaggatgccaaatgacaggcagttgtggctatgtaattctggtcagagtctcccactcctaattgcctgcagtttcaaaggaaaccattatttactcctttcagatgctggagtggcagagccagcaggcgagcagagtttcaaggtaggattcgttggcctcgcatccaccttcccagttattcctttggccctaaacaggacagggctctgaacaagcctgaagccacactcccccccatatactttggcactttgcacctgacagatccccaagcccgtggtcagagagaaaggcaatgtcccaaactgcgagcctctaggctcctaggtccaaccgcgttcaggcaccaggacgcggaggagtgggatcctgaacgctgaatgatctggaactatggtgactgactgcaaagttcagctgtgcgtgcgtgggcccgtgagcgcagggcgtggattctgcctcccaggtctaacgtaaccggggcgcggacatctgcgaggcgcttattttaccgtggcggcctccggctaccgatctgcagttgcgtcctttcctgccagtgcccttccctccccgaggtcactcgcgccccttccccgccccgttccgagagagggtcaagcgccctggtctggggctgcggctccaatagcctccgctcggtccccctgcggctcgcaaggagaggacgcgacagaaaagggtttctgtctctctccaggagcgggccggctgagggagagaagctgctgggactgaggttcccgaaagtgacgggtcagccccgaccctgagcggcagctaggcccagcgcgcgcacgaaggggcgggggccgcgtaccaggctgtccctgcaggcgctccgtactcgtccgagcccacgagcaagaaaaccgtcacacccctcagcacgcgacttccttccgggccgtcgcttcgatgacgccatcaattcacgcgagaagaccacacccccgccccgcgctcgtctggcccccgcccctcgcgctcccagcggtcaatggccgtagtggccgccagggatcgcccgcgacttggtcggtgcggtcctggacctcggtcttgggtatccgtcctggggctggggatgagggcggtgttggtgggagctccccgagagcgagcggcaggacgcgcatgccccggagtactgagacccagggcgaacctttccaaggcgttgactttggggattgctccggatttccttttgcattaggccgaacctggttcgttttggtttttttagagacaaggtctcgctcttttgcccaggctgggagtgcagtggcacgatcatagctcactacagcctcgaactcctgggcttaagcgatcctccccacctcaccctgctgagtagctgggaccacaggcgcacgccacgacacttgacaattttatttttagtaaagacagggtcttggtatttctggtctcaaactctggcttcaagcaatcctcctgcctcggcctcccaaactgctgggattacaggcatgagccaccatgcgcggcctttttttttttctctccttgataaggtactggcgagttgcaactgtttgctttcctatagcacagctgaaatgaaacagtcttttcaatgtacagattagcatcattacctcaccaatcaaaaatccctaccttgagttgttctttatatttttttgggagctttggcccttgggatcctgcaacgccacaaagtatattaacaaggaattattattctaattttaatgaacggaatctaagaagttcagcgaggttcaagggtaaaagccaaggaaagtttcctttgtgtttccttaatatcttgagttcactgctttttaaactcctgccacagtgcacaggggctagtgcacttcgtctttctagataaactgtacgttcccgggagagcagagactgactttccttccgcacccccggggcttaggtgcccagtaaaaacagactgaaggcaacgtgggaccaggcccggaatccagagtttgtgtctcctagtctaagggcctcacgttgtcctccacctgccctattcaccagcatcacattggggcatttctaattcagccactgaggttattaatattttgtttgcaggagagaaagagtccacttaattatagccttcagtaaaagaaaaacttttacaccgggaagatggcaagctggtggtgttagacagatttaagactcaggaaaagggaagtgtggttttttccaggcatgcctgcttgggattggcccgtttacctttcctgcgtttgctctgggtgttgggatgtttcagcattacatggtgaaacccatacgagggttacatggtgctgtctgggagctctgtgcccatctccataaatgaaggcctttcatctccctactctgtccctgcatcccccaccccaaacagacacagctggccaatctctcgatcaatcctatcagaacttgagttttttctctccctgttcagtgatataacctcagctgggcatgcttatttaatagtttatttaataattgagtaagaaaaatggaaatattagggttcatcaacccatgaaatgggggctagcctgcagcatcaagtatttaaattacttgtaatttaagaatttcctttaaccaacctctggcaacccgtctcccctccccttcccacaaatatgtatattattatgtgtcaattaaaaataataaaaacacaaaaatttcctcacattaaactttggagtgaattgtgggtagaagttttgggattttgttcttaggagtcattttaccagacctgagttatttagttgtggacgtgcctaaagcagggggatggacttcgtgatgtgctagtacatgatgatctagtacttctgaaaatctctttcttaagagacctgtgatttttatgttacccagcagatacatttgtgatgatttgtttaacaaaaatgtttacaatttctttttctccttccttccttccttccttccttccttccttccttccttccttcctgtctcgctctgtcacccaggctggactgcagtggcgcgatctcagctctgcaacctttgcctcccttcaagcgattctcctgcctcagcctcccgagtagctggggctacagacgcatgccaccacgactggctaattttgtatttttagtagagatgggtttcaccacgttggtcaggctggtattgaactcctgacctcaagtgatccacgtgccttgggctcccaaagtgctgggattacaggcgtgagccactgcgcccggctaaaattttattttttaaaaaacctcacagtatagagtagtgatttagctcagatacttcacagtcaggctgccttgtttaaatcctggagcctgcctcttattctgtaacattggaaaaatgatctatccctgcctcagtttcttcatctataaaattaaagtaataatggtatgaaacttataggactgttgtgaaaagcatatacaacatttggtacattttaagtgttcaccaagtgttagctgttgctgttttaaatagcaaattcccttaatgtattcttgcatgtttgtgggttatcattgcagattattaatgtgacacagggcgagagaatgataaactttaagttgtatggtattaaataataaccaaatgaaggcttatcagaagaagagataaaggcttctgaaattatacctcaatggatatttacaatacagatttcataaagctttattgaatactgtctatgtatcagccccagtaccttacattttctcattttatgtaaactttaggtcagccctttgagttcaactccattttagaggagaaagtggaagcttagagaaattaagagattgtctaagatcacgaagatgataaattgcaaaggcagagttcaaatgatcccgtctatttcttttttatagtgaatgagttagaaaatgattcaatttcagacacaaacacacacacacaccccacatttatttcacatgtaacctttcagtaatgtagatcagtggtcagaaactgaaatttttctaattaaattgggccagttcattttgcagttgtagattgaagcaggttaaaaaatactctcacctagcaatccatagttttctatttctattgctgtttgttgggtcctcttaccaagaaaattgttagtgagagtgccatgccaaagaaagagaccccttctttcacaattaggaatttttaagtcaatttcacaattagactttttaagccaataagcaggtccaaaggattcaggcaactcttaaaatcttctgcttcagttcagttcagtatcacaagagtggaagttgctggaaaaagtttccgtttgatttaaagtttatctttttcactttaggccctaaaacagggaatagaaataatcttttagaacatttgattccagtaagattttggtgagcttatgggaagaggagtgaactgtatccttagttattaagggggctcagaaatttttcctcttttctttttttttcagttgcaaaaaccaggattggtgccttccaagaacaaaagcatatttgcttggggctaatgatgtttcttcaaggcattgggtaaagagatcaaagagccatcaggaaaaaaattgagttgaaagtcagctagaaggcacctaaaggtccttttgtgattacacatttttacagctttattgagatataattgacatgtaataaactgttcataaagtctacaa

SEQ ID NO: 6869 - DNA, 588 bp, Homo sapiens
tctgttgtgtatcttttaccttacatttgctatttacagaggagtgttgtatacataggtattattttatgtcacactgcttcagtgataactatatccatgtgtttgtatccatgtttttatccattcaactgtattaaaaggtgttgggacaggaaaaaaagttgtattactaagtacacacaaagaggttcttcaggtaaacttcaaagtattagataatactttaataacatgggcaaagaggatgcggcagagtaagaagtgatgaaaattatgcagcttcatgttttaagtctgggctataagagtcctgagagaaggaaagtatagaagaaccttctgagttgaagggccaggactagagacatgagctcctcctttatggatatgacagattctaagccaagtagtgcttgctagcaagactgagatgtaaaaataaaaaagtttcaaagcaaatatatttccccagctcctccatacaagcagctgtacttcactaagctaccaagtttagctgtaagaaagtaagaagtttgctaatgaaaaacaactttgtattttaatttcctcttcagggacatt

SEQ ID NO: 6870 - DNA, 102 bp, Homo sapiens
aggctggagtgcaatggcgcaatcttggctcactgcaacctctgcctcctgggttcaagtgattctcctgcctcggtctcccgagtagctgggattacaggt

SEQ ID NO: 6871 - DNA, 2013 bp, Homo sapiens
ggttcggagcgaccttggccgttggcctgaccatctttgtgctgtctgtcgtcactatcatcatctgcttcacctgctcctgctgctgcctttacaagacgtgccgccgaccacgtcgtaagcgtgcccaccctgccccactgtgaccccctggggtggtaagggaagctgaccaggccctgctttggctaagctggagggatgggtggcaagcctggctctcaagacctggggagatggaggagggtcctgactggaattctctttgcagcggttgtcaccaccaccacatccaccactgtggtgcatgccccttatcctcagcctccaagtgtgccgcccagctaccctggaccaagctaccagggctaccacaccatgccgcctcagccagggatgccagcagcaccctacccaatgcagtacccaccaccttacccagcccagcccatgggcccaccggcctaccacgagaccctggctggtgagtgcccctgccaactctagccctgcccgacttcccgagtctctgccagcatccctcgggcacccatcccaaactacatcactcaacaggcctctgcccctttctgcttgcctgccactcacacggcagcccaccatgctcacagccaaccagggtcctctctgctttcaggaggagcagccgcgccctaccccgccagccagcctccttacaacccggcctacatggatgccccgaaggcggccctctgagcattccctggcctctctggctgccacttggttatgttgtgtgtgtgcgtgagtggtgtgcaggcgcggttccttacgccccatgtgtgctgtgtgtgtccaggcacggttccttacgccccatgtgtgctgtgtgtgtcctgcctgtatatgtggcttcctctgatgctgacaaggtggggaacaatccttgccagagtgggctgggaccagactttgttctcttcctcacctgaaattatgcttcctaaaatctcaagccaaactcaaagaatggggtggtggggggcaccctgtgaggtggcccctgagaggtgggggcctctccagggcacatctggagttcttctccagcttaccctagggtgaccaagtagggcctgtcacaccagggtggcgcagctttctgtgtgatgcagatgtgtcctggtttcggcagcgtagccagctgctgcttgaggccatggctcgtccccggagttgggggtacccgttgcagagccagggacatgatgcaggcgaagcttgggatctggccaagttggactttgatcctttgggcagatgtcccattgctccctggagcctgtcatgcctgttggggatcaggcagcctcctgatgccagaacacctcaggcagagccctactcagctgtacctgtctgcctggactgtcccctgtccccgcatctcccctgggaccagctggagggccacatgcacacacagcctagctgcccccagggagctctgctgcccttgctggccctgcccttcccacaggtgagcagggctcctgtccaccagcacactcagttctcttccctgcagtgttttcattttattttagccaaacattttgcctgttttctgtttcaaacatgatagttgatatgagactgaaacccctgggttgtggagggaaattggctcagagatggacaacctggcaactgtgagtccctgcttcccgacaccagcctcatggaatatgcaacaactcctgtaccccagtccacggtgttctggcagcagggacacctgggccaatgggccatctggaccaaaggtggggtgtggggccctggatggcagctctggcccagacatgaatacctcgtgttcctcctccctctattactgtttcaccagagctgtcttagctcaaatctgttgtgtttctgagtctagggtctgtacacttgtttataataaatgcaatcgtttggagctgctgccccctttcttcctggcctcggctgctggaattggaa

SEQ ID NO: 6872 - DNA, 1901 bp, Homo sapiens
agggaaagtgagggacaaacactgtgccctcctccccaggtccctgggtgtgggcagaggtctgtgctgccaagaagggtaggagccaattgaccactcagtgctatggggcagcgggggtctttattcgtcagattttccttcttggcctactccccaggtgtggccagggatagtccatacagtgtggctactgccaaggtcaggatggccagcagacccagtggggccagcagcccctccctggatagggctccagggtccttcactggaggaagatccttggtacccctgctctctccaaggctgggactagtgttcctggttgtggccaggtgtgcagtggttgtgacagcagatggtcttggcttggtcctagcagaggctgtgaccccatacatgggcctgatggtgccgaaaggcctggcgtgagcatccacccaccgcagcagggcctgtggtctccactgacagatgctgagcagggccaggacatcaccctcagccgtgtgcgagtctggaggggactgcccatacaggcgagtgtagatgctgcctaggctgtagctcttccttgggccgtgttctgaggggctgcttgctcgctccagggccttcagcgcagtgatgctatccacacagaaggcaccatccagagcactggtgaggcccagcatagccagctctgcttggagcagggggaagtcgtagcggtcaccattgtgtgccaccaggcaccagggctgtggctggcgccgcaggaaggctaggagcaggttggccaggttgtcatcaaaacattgacgcccatgcgctgccagcacagctgtgctcagacctgtgatctcgctggctgcagggctgcaggccttccccggagccacacacagggagagcttgtctaccacacgcggtggtggaggaactgtgggaggtggcccctgagaggtgggggggctctccagggcacatctgtggacagccagcaggcacagctccgtgaccttgggctgggagaagggcaagccagtggcctccatgtcgaaaaagatgagggtctgcatgggccccgggggcagggcctgcgagcccatggttgggtacgtacctgctgctgagcctggagaggagcatggggtgggtgtgtgagtgcccagtgttaagatccgaaggggagggagtggggtagggggtgggcagaagcacatctcaggccttccctgcacaatcctgccctgtctgcgagctccagggcccattttcaggcaggaagttggagagggtgaggtggtttccttagtgggaccagcacattcgactgtctgagagggtctccctcttcacatgactcggcccctcccctagtgcccccttagtctggggtgggggaacccatggccctcctgccctgcgccatcccattgtgggggccacactcaccgtagcaggcaggcaggcaggcagtagtgactcggctgcacactctcccgcggctctcgctggcagcagtggcggtaagtgaaacttggcgtgggcccgcctacaggcccacgtgagccaggcccgccctgctcgtcagcctgcctggtctgtccctctcaccaccatccgttcccccccacacccactcccctgctcccgggggaccccagaggccttccaagatccacagctgtggcctgctggtggcacaatgcaccggggccatcataccagtgacaggcagctggaaggaccagggcagtggtgccagaccagctcccggtcttacacactgctgggagcccctgctgcggccctttcatgcccacctgtgggtcccagtttcccaggctttcctggtttaggcctgggccaagagccacctccttccctgccacacaatggtttcttcccatggc

SEQ ID NO: 6873 - DNA, 41123 bp, Homo sapiens
gcggccgcagtggtggccgaggaggacacggagctgcgggacctgctggtgcagacgctggagaacagcggggtcctgaaccgcatcaaggtgaggccggaggctggggccgggcctggcggatccgcagggcttgcgtggacagcgggcgtcacaacggtcgcggcgaggaggccgcctccctggcgagggaccggggccggcgggcactgggggcgcgcccggcatggcctccgtcctgcccgccccacagagggggtcggctcgttcgttcgtgtggtcccggagggcaccgcggactgggggtgcctggcccgtcccctgcctcattccgtgggggcgggaccgcggggcttgggggccacacgggcggcccgcagctgggccctggagtgcggccccagcgtctcttcctcaggctcgggcatgatccgcggcgggaaagcagcgcgtccagccgaagcctgggggtcggagagcttgtgtgactgagaacgtttcggaaggcgtttctgacctttgcacctgccctcccagctcgttggcttgctcgtgtttgttgctggataaatgtgagcttgttgtgaaaattgtcttgaaattataatttcctgtttcttaacttttttttaaggctgaactccgagcagctgtgtttttagcactagaggagcaagaaaaagtagaggtatgaagtttccagattttaacatggctgtattcgttaatacttaatttcttattcattaaaaaccgtcttaaaaatagtttatagtaacatatagctagggataattttgaactgttaaggattacattactattgagagagagccaaaattattcttttttcgtgtagcttttgaatttgggggtaatcttaaggtaccacagtaactctgatactaatgcttaatctgaaacaaatggtcataggagtttcttgaagaaatggtgccattgtcaatgtgttaagtgcaggttcactcagatcctttagtaagctaatatgttattaatccctatgaaacggggtatatagtatgcaacttttcccaaaattatctgaccactcaattattttgacaatgaaaaagacagcgattattttaaaagtgcagccactactctatatttaagtgggtaatttaactttttcggagtcccaccaaccatcctgagtaaatattctggaatttgtcaacaagaatagaaccatcatcaaagccttaaactcttgctgtatgacaaatcagtctactgtcctctcacttctttagacctgtatacctaatctctaatttcatcaaaatcttcagttctttgccctttccatgtctgtgcaggcatcagtcttctcttggcagcattttgctctggaccctatgggtctggacccctaattaccttgccttaacggtcatacgtggtctggaagaaatctcagtggtcatttaacccagcaaactaactcttcccactttgcacatatgtgctcttggagaagagtcagtcaatcctgtggattgctgatgttgcaaattggcaggtaccaacctggttaggtcctgagcaggcccagcagctctcttcttcaccctagctgtgcagtagccttctatgtcacccctgcttccttctctctgaacacatggtcttgttgcttcctccacagggaaggtagaagccattagatcctaactttatgtcctcctctcctgtccctcaatctattgctcacctgtgaaaatgcttacctgtgtctatatttatctgtacctctttccttactgctttagaagaagaggctctgtcctgtccaagaataatcactctgtcttgtgtatactttcaagtctttaattatttactgtatctttgaccccttccttttctgatggcttttcttttgagcttgaaaacatgtttaaataactattaggagtaaactgttttcctttactcacattctgcttttaataccgctgtggtttttttccttcacaacctggttttgaccactccttggtttctttagcatgatctttttcctgtacacctgactgagacttatccacagttgtcattctgtactgtctcacagactgaccttattcatccagtaactccagccctgtaactttcatgcatgtttctttcccgagcttcagacctgtatgttaaactgcccactgtattatgcccttaatgggaccatcatttatctggcaagaaatctaagcgtttcttaggccttgctcttctttccacctgctcagccatcacctggctctgtgtctgtcaggtgtgtatctgaagtgtccccaagggagtgctctgctgcctcctttgtgcttgtttcttcttttccagattgccttatccccttcctacttgccagtctccgtttccgtggtgtccctcaccatctccctgaagtcctttttccacattgctcctagattggctgtttatagtacacatctgatctgtccctccattctcttaaaatatttcagttgactccctatcttagaattccctgaaccagcctaccaactaccttgaggatctctcctctccttgtcttttattttaacaactttattgaggtaaaattgacctatagtaaagctaaagtatttaatatgtacaatttgatttttaatagttaatttatgcagctgtgaaatgatcatcacaatcaaggtactgcgcatatccttcaaacttttgaccttcaaaagttttccttgtgccccttatgtaaccctctcccccaccccaaacctttttaagaattatataaatggaatcgtatagtaggtactctttttttttggtctgtttcttcaacataatgcatttgaaattcattcatgttgtggtatgtattaataaatcatttcattaatacattgtacagatatgacagtttagccattacctgctgacagacatttaggctgtttccagtttttgagtattacaaataaggtttctgtgaacagtcacatacaagtctttgcttggatctgtgatttctcttgagaaaatatgtagaggtgaagtgactaggtcacatgctaggaatatttgtgacttttaagaaacactaccaaattgctgtccaaactcgttatgccattttgcattcccatcagcagtgtatgaggctgccactgtagcagcaattaatgtggtcttaaggaagcttaccatgtgctacctactgtagcctcttctcagcaacaatcacaggcttgatggtctagaagtattttttccatacttattcaaataaatgtataattacaaaaataagttggcctatgggccgcataagatcatctcacatttcatggataaactgggaattacaagtgtataattaaattcctgttcatagtaagtatgctataaatggtagatacctgagatgacaaaacttttatcaaacttcatgtatttgaaataataaacagttgttgacatttaattgtatttcacacaggtatttgaaaatatctagcttcaaaagcagtttataaaacatttaaaaattaaaaatacaaatcttcatatatggttttgttatattaactttgagaaattactaaatagcacaaagtaagtcctgtagtaattaacagttgtagaatggattttgtaaaaccataattttatcaatgaaaacgttaaactttatattttgtagttgtttttagggtaaacacatgacacttaaatttttttttttttaacagaacaaaactcctttagttaatgagagcctgaaaaagtttttaaataccaaagacggtaagatgttcagtttgttcttgtttatctatctctgaatttttgaatcttgataccatttgggagaaatcaggaatttcagggctttttttttgtcttcaattgttataggtcctcattttaaaataatattttattgtacaacaatcgtgttgctattacatatttttggatttgggatgttgttgcttaaagccagttttactacaaaaagccaatattaaccattaaaaagcgaaacactgaaatctatgagatgattgtcttacagttagttacagactgatgatcccagtgaaaaaatcaggagattgagattttcattacttaatcatattattcaaagaggaaatttgtaacttaaaaaatttagaaacctttcttccattaatttagtgtatctatttcataatgttaatttaaaaaattcagtttttgaagatttgcttacttacctttttcttgatctttataggtcgtttagtggctagtcttgttgcagaatttcttcagttttttaaccttgactttactttggctgtttttcaacctgaaactagcacagtaagaataatgatttttacatctatcttttgaaacctttgatacaaatgagttaatattaagctgaaagttaatagaatttgacaactgatagttttttacatttagattatttttggtagttgattatctgtttttcttaaaagccatatgagctttcagatagctggcaccagtgttgctgctttgtgttacttgaaagcttgctaataaaagtgttactatagagttaattttgatacgatgttagagtgcacctgttaatggaaacgttgaaggtagaggctctgtaaaagaaataggcataattttttaaaatagacatttcattcattagtaagacagtctctttgagtttaaagatgtctttaaactctgaaaatatcttctttactccttgagaataacttctgctatttttttgtgcacttgtattttaacttcttttctagctgcaaggtctcgaaggtcgagagaatttagcccgagatttaggtataattgaagcagaaggtactgtgggtggacccttattattagaagtgatcaggcgctgtcaacagaaagaaaaagggccaaccactggggaagtaagtagaattctgtgttatctttttctattttaattattggctgcttagtttagccatgcagattagtgcatatatagtaaattaaggttttcatactagaagatattccttaaaaacaaaatgagatgcattcagattgtatcaatgcaaattttaatgaaaattaggaatgtgctgactgtgattctgtggcatatctgttctggtttttgatcctccattcattccatactgtgtatgaagtgggctctaccaggccctaccttggtgttctgaggcttctctgcataagccaacagaagcactcaacttgctattatttttattaaaacatcttatttaaatataaaagggctgatttataggatagttaataaatttttggacttaaaggcctctttaggcttaaaactaagctgttgattttgctttacgctgtttagaaacagttcaaacttacacttttttgatcagtagtacttttcatactcttaacctttttttagaaattgtgctaatgagattaatgatataattttattttcatacattaattttacatgaagatactctgttttatagatacaggtaacatctgtaactgttccagatatttgattaaatgtgagcttttagtcagaaatttataggtaagaatgtggagggctgtataggtttccagttattttctttggtgagtctcagaggatgttttctattagaatttttgaaaattgataaagcttgcctgagtactaattatgtgtaaggcatggtaaatagactttgtgggtactataagataaaatataagaaacttctgtgtctctgaatagcgcagagctatttaagataaaatgtgctcaaataaggaaattaacatttaaataacagtttaagattatggaggaattgtcatttaacacattatttccaaccatattatgaatagtttagaggaggaagcgattgtcacatgccaaaattttattgaagtcaattttaaagtgagagtaggatgtcagttgtggggcgaggattgggaagggctttccgagaagttggaacggtgccagccaagcgtgggagcaggagagcatagccagatcccaggctggctgggagtgaggcggctcacccagagcgcaggttgtcacttcagcttgtgcatataatttcattccttcatttatcaatatccagcaagcttttattgtgcgcttatttgatagatactgtgctgggtactgggcaatcaaaaacaaactaaagaacccagtctcctggggccagcagtctgtaggtcatgatgacctctctttattggctttcccctctcggcttctgtggccctgaagaactctcttctctttctaactgccctttcattttcttttctgtttagtagttgtgctttggctcacctcattgcagtggtgtttatgcatatttttctgtctagattgatctttcttccttaacataccactagcatggactctggaaccaggttacttgggtgaaaccccagctctgctacattctagctctgtgagcctgcagtcactcagcctccgtgtgcccaggttccttatctgcaacatggagatcacagaagtatcgcgcctacaggtctggagggggtctgaggaagcaagatgtgtgaagctttgagcacagtgcttggcacggaggactctgtgtgttactgtagtaggcatcagtggattcaattaactgcgaattgaaaatattcggataggctgagcgcggtagctcatgcctgtaatcccagcactttgggaggccgaggtgggcgaatcatgaagtcaagagatggagaccatcctggccaacatggtgaaaccccatctctactaaaaatagaaaaattagctgggcgcggtggtgtgtgcctgtagtcccagctacttgggaggctgaggcagaatcacttgaacccagtaggtggcggtggcagtgaggcgaggtcgtgccaccgcactccagcctggcgacagagcgagactccatctcaaaaaaaagaaaaaaagaaaatatttggataaaatacaacaaaagaatgcaaatatagtagaaaactatttatatagcatttacattgtattagatataagttagacacgatttgaagtacataagttatatgcaaatatgtcatttcacataagagacttgagcatccttggattttggtgtccacaggagagtcctacaaccagtcccctgtggatactgagggacgactgtgttagtattactgtttcttgttattgtatggatgactctttaagttcagtgtagtctgcctaagctcagctcagtcctttatcctagctccagactagaatttccagctcttcacaaaacatacctccctggataacccaatagtatattcgaatcctgtgtggaaaaacttactttcttctctttacctctaaaaagtaaaaacataaagacaaaagcaaatcccaccttactccccgcaaataaccctcttcaagttcttcttgctcacttctgtgttttgattgattctattcctgtgactccttggtttcatcccaaggagccacctcttcacatgtgctctggattcagttcttctgtcaggaaggattcactctccaccttgcaccccgtagctttggtaacaggctgtggaagaaagaataattgctggagggctttctgttctctgctagataggagtgtacctcaaaatgagacccagtagcatgcctgtgtagtgggtgtgatgtgaaaatggacacagaatcactgttcttcagtacttcattctgactcgtggatttgaggcctcccctgaagtttgccctgactttttcatagctgtgattctgtcaaatagagccaggataggaattctgtatcctcaaaaggtagttgttttactcccccaagttgctgaaccagtaagttgggcatctcatctccattttttgctagttttcccttcctaatatctggatatttaattttaatagtttgtgcatatgtatataaacaaatagataaaatatttaaaatagagacctcaaagatgtatgttttggcccttcattatttattagtgttttctattactttggaagaaaacctgttgtttataatgaaataaaaaattagagcttttattagcttttgactttgactgtagaaaactagctataggttaagctcactgaactaaattactgatgctttttaccaaaactgcattttaaccacctcaagaatcaggttgctgtgccccacccgctttaacctgacttttgtttggttttattggatgctcccaagccgtagataattaaagccctttcttgttttctgagcccctcaatggatcattttcatctccttcagcacctctaccatgtaggtccttatatctgtccaggatcatttcttcctaaaggttctcatgctttcagtctgtcattcactgttgcagaattatttttaaacttcagcccttcctctgttcctttcttctgtacgattgtagtgactgcactgccgactcaggagtcccagattcttcagcccttatgaaatgttctgtgtgatgtggccttaacctgtctttctagccttatgtgttttttttttttttaatgtggaaccttgtacttaagtcagattgaactttggacttactacttgaaagtggcttgtgttttttcgccttctcttatttcgttattctatcctccacttggaattatactctttccccttccccagctgtggaattttgtcagtcaggttttctcctcagctgcaactcttgttcttcctctctccttactggaaactgcatgtaacttagtgcctccttctgtcaaagttgtagtagtgatctgcactggttacacatggaaatttactgaggacaagggctttatcttcatatctcttacacagtctaaggcattgtgatttttttttgtttttttttgagacggagtcttgctctgttgcccaggctggagtgcagcggcaagatctcaactcactgctgcaagctccacctcccaggttcacgacattcttctgcctcagcctcccgagtagctgggactacaggcagccaccaccacacccggctaattttttttatttttttatttttagtagagacggggtttcaccgtgttagccaggatggtctcaatctctgacctcgtgatccacccgccttggcctcccaaattgctgggattacaggtgtgaaccaccgtgcccagctggcatagtgatttttaacatactgttcacagtcagtggaagcctttgaaaatttgaagaggaatacccatttagaagatttgtggaggttagattggtaaaatatggagaagttagcagactagaaagaagtgaaacacataagaaggcaaatctagacaagaatggtagcagtaagaatagaaataagtggacatacaggctagacatggtggctcacacctgtaattccagcactttgggaggccgaggcaggcggatcacttgaggccaggagtttgagaccagcctggccaacctagtgaaaccccgtctctattaaaaatataaaaattaatgttggaatcccagcgctttgggaggccaaggcgggtggatcacctgaggtcaggagtacgagaccagcctggccaacatggtggaactccatctctaccaaaatacaaaaaattggccaggtgcggtggctcaaacctgtaatcccacattgggaggctgaggcgggcggatcatttgagaccagcctggccaccatagtgaaaccctctgtctactaaaaccacaaaaattagctgggcatggtggtgtgcacctgtagtcccagctactcgggagggcgaggcaggagaattgcttgaacccgggaggtggaggttgtggtgagccaagattgcgcctctgcactccacagagcgagactctgtctcaaaaaaaaaaaaaaaaaaaaaaaaaatccaaggaattagctgggcgtggtactcgggaggttgaggcaagagaatcgcttgaacccggcagtcggaggttgcagtaagccaagatctcgccattgcactctaacctggacaacaagaatgaaactccgtctcaaaaaaaaaaaaaaaaaaaagttagttgggtgcggtggtgcattcctataatcccagctacttgagaggctgaggtgggaggatcacttgaatctgggaggcggagattgcagtgagccgagatcgcaccactgcactccagcctgggtaacagagtgagaccctgtttcaaaaaaaagaaaaataaaagaaagaaagaaatgaatagataaagatgaccttttgagaatcaacaagacttggtaaactaatattttggcatggggcaaggtcacagaaggcaataagagaaaagaaaagctctcaaaggccagtttaaggattttagcctagaagataatatcaccaacagaaatagtgggactgaagagggagaactgaagttatgaagaacagcacattttcgtatttaaaaagttacagtcagtcataaagggatttttgtaacaaacagccagtatttactatgtacagtgtcctagagcttgtgctggtagtggatgaattgtaggaagtgattttcatttaagaaacattttaaaaacctcctccttggcattaaccacagtgctcagaaccctgtggtgacagggcactgggcagcagacacagatgactcctgtggaagttgggctagaacaggtacttaccattttggaaaaaaaatgtgtgaaagtagaaaactgggagagtgaactactatttgaaggggtaaagtatttttaatgaaagttgttatttggtattttttcttgagataaaatgaagtagggaaacaaattcaaggagggcaaaaagtagatcttagagaattacaggatattatttgtctggagagtagggagaagggaagtgaggaagtaaatcctggaatggtagacctgggacagatttcagtggagaaagacagtatcctgttcaaagtgaataaatgaaatattttgcaggtaattagaatctagggatgtgtagaaggtttttgagggggtaaaattagaggaaaatctaaaaaggatggttactttaataagaaataaaataccaacattgtatagtgtttttaaatgctaaaattctattggagtgtaattggtatatttgtgttttatttttaaatgtattttaattttaaactaaaatattttagggtgcacttgatctatctgatgtacattctccaccaaagtcaccagagggaaaaacaagtgcacagacaacaccaagtaaggtgagttagctgtggaacacggaagtcatgtctggacttaactccagagtgctctgcttttctctctctagtctttcttgttacaagttgtattgttttatataaacacatgggctctttagtttcttgaaggtgctttttttccattaagtatacattaaaaaaaaagttttgctttgttggtagttgtttgacatttgtattgtagaaaggaatgtgctggtaagtaacagaatcatagaatatttggatttatttggtacttcggacattttctcctattaacaaggagatttacttacttttcatttataaattcctagcttgagaatattaagctagaaatatgtattataggatataatattgaatgaatattttagacttctagatgggtgatgagattcagaattgtaaatcatgatggtttttaatatacctgggctgttttgatacaatttctaagaaaatgtatgtactttggttacatttgtgtgtgtatgcatgtgtgcgtctgtttgtgtgtttatgagttgttaaaggtaagacttgatttcagagattaagcataatgggaaaaaaaatgagctctacactttgaatttaagatccaggatatgtaggaatggatagaaagatgattgtcaggaaatttgttttctcaagagcacagcatgaattggtagtcccaggcggtcttaccaaaggataggttggggtctgtcttagtctgttcaggctgccaagtaccatagattgggcagcttacaaacaacacatttttcctcacagttctggaggctggaagtccaagatcacggcatcactgtggttaggtctggtgaggtccctcttctaggttgcagagagctgccttctcattgtgtcctcacgtggtggaaagagggtgagagagctctctggggtcagggccctaatcccattcacaaagccttcacccgcatgatctgctcaccccgcaaaggctccaccttctgataccatcacattgagggttaggatttcaacataggagctgggggtttgtggactacacaaacctgcagtccatgacaggtcgggtttgtattctttgactgtccctttgattttcatcccataggaatagagtgatgctgtggagtccattccaaaagatgaggtcccatgtgggtttatggtggtggatcgactctcagatacagttgcatctttttaaatagatgaacttccaggacgtagtgattatactacacgatacctttcttttttaaatgtctaggcacagaacattgctgaacgattgctgttattttttgcttgttctttgatgttgttgctcctttttattgtttaagtttggaaaactaaggaattttatacttcatttctaaccaaagaaacaactattgtattgtttatagttgctccttctgagatttctagttggtgtagggaaggcctttttttaaaattttttttttcctaaatactcataggaggctataaccccagtgatagagtaaggtcatgagtaaatttttaaaatttctttaaattaattgcaaataaaacagcctatgtaagtaagctttacttttcatgaaaatacctggctttagaaaaattaaaattaatgaatattccaaaatacttatcagtacctatagcatttgactatttggaagctctttttagcaaattattactgtttttaaagcaaattagcaatcctaacctatatataatgtatgtcttcagggtaaaatattaaagtctattttacgtactcttattctccctacatacattttaagatctaagaattataatgagaatctcaatgttttaagtcagtcaggaaatgatgctgtgagtttttccagagaaggggggactgtcctgaggctgctttagagaatagcgtttgtcctaacagctgtctctgccgtcatcccgttattctagtttagtctccgtttctcagttggcctcataaacccacttcagaaataccctagatagtccttgtgtagggttgcatctgttctaaaataaacccttattttggcacttaaaatgcaatttctctagtactaaaggacctggatttgggatccagtactttccctaccgtcttcttgctagctacctcctaccaaatcagccttgagggcccacggagaatgctagaaactctccaagagtagggtccacccaacctttaggaaccagctttgtgtgctcctgagaaaggtcagatgaggtcaggacaagtcttcaaggaagttgcctaggaactcaagtgaggcttatttagaatgctgctaaaatgtagcatgaaagagctgattctccacccagtagaagctgagcaggtggaggctaaggtatctgtgtttgacctagtaactattggaaacagtaaacatgaggtagatcactctaggaatagttaagaaaggaccaaaaaaagcaggcctcacagaacatattaactagatgttccacttctgagacatttttcagtaggtatctttgtttggtaatgagttagtttattttttaaagatttctattttgtggtaaaatctcattttattctcatgctcagataccaaggtataaaggacaaggtaagaagaagacaagcgggcagaaggctggtgacaaggtaacatgcatgagggcagaggagaaaagcagcctgtgggcatcaggtctcgactctggggcctcctggagcgctgggctcctgtcagattgggttctcagttttcttatgaaatgtcacttgaggctgggctaggtggctcacgcctgtaatcccagcactttgggagtccaaggcgggcggatcacttgaggtcaggagttcgagaccatcctggccaacatggtgaaaccccgcctctactaaaatacaaaaattagccggccgtggtggtgtgcgcctgtaatcccagctacttgggaggctgaggcaggagaatcgctttaacccgggaagcggaggttgcagtgagctgaaatcgtgccattgcactccagcatgggtgacagagtgagactctgtctaaaaaaacaaaaaagtaacgatggcatgaaataaaaagtaaatttcactgtcacgtttttatccaggtgaaaatcatactgttgaatcttaaaaccatgctctcagttttactttgaaaattcctgttgtgttggcaattagagttgaaaatacgtatttttcttttgaatggatgattatatacatattagtaacattgtgatttttatttgaggaaaatagaacatcaaactatttttttgaatacgtacctattgataaattaaaaattaaacgtatttcctccaagatgtttttgtgttctgtcatttttcagacaattgcacatttgtgatcctttattcagtgcccctgctcacagtagactgctgggggccagtgctgcatactaccaaggccttggctgctttttcatcctctcctaaagatcacaaaaattgactaatccagtagattagctgcttatgaaatttaaatattagaagttttagaaacattatcagtacagtttttacatgtacttaggataagacaaaatatttaattttcagttctgtgagattcattagtcctatgctgaactttggttatgtatagattttttcactaggttgaaaatcttcaaacttaaagctttttaaaaattccacctgttgtgttagatggctttagttctaggagtttcaaaggtaaattcctattactgtattctctttctgttcacactgttctttatgcgttattaaacaagaagttgctttaaaataatgatttagtaagttttttttaacatttacatagtgaaagttattgtgtgttaatgctttgggcaacacatttaacacagttctcacttaaggagtttatagtttaattggagagatgagacataccttaagtaagatataaaacttcttaatagattttaaaaatcagtttcttgggcttttctaaaatttaaaagcatattttatagtattaagcttttataatcttactgctattgtgggtttcaaacaacttaaacattttcaagaagtttatacatagagccaaggcatcctaagagatgtggttttcactttgtgtgatgtgaaataactgtgatgggcccagactttagctttcgcggtactttgggcagagtgtagtgtgtgccctgacttgagaggggattgaagaatctaggtgggcccatatcccaggatttagtccataatttgggtctcttctatttcattgttgtgttcctgaggccaggatgcttcctcaattacttggaaacctttttccctgtacatttctgatcttgtttctgaactgccttgtgagaagtctgtattgtaccccatgtggcctattgccagccttacttatatgggtaagcccttagctctttgttcccctgcctttctgctttgccttgtgcatgcagtgagttcccaacagccttaacattctcaacatcttcatcatccagatgctatgttgcatgtggtggttgaggttgtacacagcaagactccagatggagccatccgcatggtaggtgagtggcatctcccaaggtatgcaaagccatcatgggagccctgcctgtcctgcagacgtgaactgggcatgcgatgcaggagggcctagggtaccgctgctcccggagctctggagcactgatcaggagtgtcgcatgtgtccggttgctttcgaatgcaggaggcgacaagtactagtggctcactcagagacccttggcactttcttcagggaagctatattcatattataaataaacttaaaaaaacattcatatgtatagttagaattgatttgtagggtttttgaactgatgtaacttgggcaaaactgaagttcttatttttgttgttgctaagagacaataaagataaaaataaaataaagattaaagataaaagatttggtatacaaggagtataaatatgaaatgagagggcattttaaaaatgaattaataattttgaaatatatattaatacttgctgacttccaaagtatcatctgtgataatttatctcattgtattccatttcgttgtaccaaacatcctaattgtttggaaaaaaaaaaaagtatcagaaaattataacagacttttgataggccctactagcttaggtttttaccatttagttggaaatgttgagtaagatctatatttttttgtttttaatatttagaattagttgctctttatcattatattaaatgtaatatgaaagatcatcctttcttcttacaaatagttttcaggtgtctgtttctttttagagacaaggtctcactctgtcacctaggctggagtgcagtggtgtgatcatggctcacaccacttgtcctcctggggtcaagtgcccacttcagcctcttgggtagctaggacaacaggtgcatgccagcacagctggctaattttttaaaaaatgttttcatgtagaggcaggggtctcactatggttgtccattctgatcctcaactgtggggctcaagtgatcctcctgcctcggcctcccaaagtgctgggattacaggcatgagccaccgtgcctggcccagttttcaggtattttaaaactaacatgtattgagatgctttttcacattacgtgtaggttttggggcatatgtttttgtatctttggcagtcacctgaggattttccaaaccaggcgttaccattccctgtcacactctcacaccatcctgaatgaatggatacatggatgcatgaatgttcccacacttagccctgtagtaaaattacttctctaaataattcattagtaagtcatggatcagaaactgtcgttggcagggagagaggtggggggcagaggcatgggtgaagagaattttaaatacagtcagcctcatatctggaggtttcatatgcattgctttcacacctgcagattcagtcgtatgtaaatggaaaaatggttataaaaaataataatacaaattttatttattatttatttatttatttttttttttatttttttgagatggagtctctctctgtcgcccaggctggagtgcagtggcacgatctcggctcactgcaagctccgcctcccgggttcacgggaggctcctgcctcagcctcctgagtagctgggattacaggcgcccaccaccaagcccggctaattttttgtatttttagtagagacggggtttcactgtgttagctaggatggtcttgatctcctgacctcgtgatccacctgccttgggctcccaaagtgctgggattacaggtgtgagccaccgcgcctggccaataatgatacaaattttaaaataatggtatacaactgtctacatagcattacatttattaggtattacaagtaatctagagatgattcaaagcatatgggaggatgtgtgtaggctatgtgcaaatactacagcattttatacgagggacttgagcatcctcggactttggtgtctgcaggtgtcctgggtactgagggacaactgtattgcatgaattttttgaatacttttgcaaaacaatagtatttctttgatatttttcctacatgaacagtttggaaaaaaattcttttttttttttttcaggttcttaagtcagtctgatacaattcagtttttgactactgaaaaattaaggtttctcattgtgaaacttctctagtgctgactttttgttaatctagaaatgattggcttctttattatatgagtgtactattggataatttaaatatatactaaagctttcttatggctgcactataatttcccatagagcttattattagtcttgagctccagccaagagaacttaatgaccgttgtagtgctgtgcaataggtccctcacttttatgaaaagacaaaacttgttttagttttttgttataaatgacttgatttgtttcctagggctaatgtaatataagtaccaatattgggtggcttaaaacaacacatgtgttgtgtcacagttctagaggcttaaaaatgtgaaatcaaggttcgcggagggctgtggctcctgttctagcttctggtggctgctagacccagatgctgtttggcttgtagatggattactccagtctttgcctccatcttcacatggacttctccctgtgtttctctgtgtctcttccccccagcaaggataccactcattaggttaggacccaggcccaccctactctttgaatggactcatcttaactaaatacatctgcagtggacactgtttccaaataaggtcacactctgaagtactgggagttaggggtttcaacatatttcatttgtgggatacagtttgacccataacttttgtgcttgtccagagaatgaattctaaggcattgccatggtatgtgtgtgtgtgtgtatttttttttgagacggattctcgctctgtcaccaggctggagtgcagtggcggcgattacagctcactgcaacctccaacttcctggttcaagcgattctcctgccccagcctcctgagtagctgggattacaggcacgtgccaccacacccagctaatttttgtatttttagtagagacggggttccactatgttggccaggatggtttcggatctcctgacctcatgatccgcctgcctcggcctcccaaagtgctgggattacaggtgtgagccactgtgcctggccttatattttttaaatcttatttgttagtttttaaacaatacttaaccttagttatttagcttcattttgaatcttcaacttagccaaatccaggtgatacaaaacccaagtaactgaagtttatgtacgtaacataagttcgtcttaactcatgataagggtttttaaagcagattcccgggtatacatacgtatacagatggtccccaatgttacaacagtttgatttatgcttttttgactttatgatggtacaaaagtgatatagattaagtagatagcatacgttgagttttgatcttttcccaggacagtaatcggtggtacgattctctctcggggccaggcagtgacgttgagccacggcttccagtcagccacatggtcacgaggcactctgatgccaggggactgaatagccagcattttttggatattgtgtttttgcacctcatgtttatgaagtgcccgttttccactttgtgatattttcacttgacggttgatgaggtgaagcgctgttgtgggttgagcatctgtgcacatgcatacacctgctgtgcacacgcatacacctgctgtgcacacacatacacctgctgtgcacacgcgtacacctgctgtgcacacgggtacacctgctgtgtacatggaggagccactgaaactgctctcagcgttttcagtgctttggttttaatctgcaaaatgtgttgatgacaaatctttctcctcttcctgtagatttttttaatagtgaagtttatttggaattaagtttagtgaattcattaataacctagttggtaatggtcttttggcaaaaatgagccatagttataaagtagtaacatgttactgtgtggtttagaactagattttgagagcagttccaaagcagattgtttcagaatttatttttactccctggattaagagaactatatttttaaaataattctgttatgtttacaagtatgtgttgtgtaatatagtaatgcccttctccgtaaaacttgtcttcctaaaactggtctttctgtctatagcgggaatattggtcaaacctgtcaaataatcatggatacctactagttgctcagctttgatactagatagttcattatgtggatttaagttacattggcagtgtgaattcttggggaaatcagaataattattgtttctcataatattgctttacatttacatttttcagtttctgtcatgccagttattctttggcactttctcatgagtgtttagaaggagagaatctgtcgtggccacaggctgtgtcattgtacatatgtttaaatatcacatcagggtatttatttccaaatgcatattcttttaaaaagacataaatccattattaaaacagtgtaaaaatcagaaattacaactgctgtgaattacataatatttttctatatttgataataccaggaaaatgtcaagaaagttgttaggaaatttttgaaagtttccatccctttgaaaatatgttgtctaaaattataacttgctatttattttttcagacatctctttataatcattaatttatattaataacatggaatgtgtagctctctagaaggcaataaaatttgcacagcatatatcttgcctactgtcaactagtcaagacctctacctggtgtaaagatgtaaacgtatatcataagacatgcataatgcattctgtctgtacccatatgaaaagtgaaaccatccttcaggagcgtcttgttcggtaatgtctaacccagactttggtcaccatgcttcagtagttactactctttaattctttctcagccatccatcccttcctagatataatttgatctgaaaaatatgaatctagttcaattcttgaggaaactcatgcctaggaaattaatttacttaagattacacgggccatgtatggtggctcacggctcacgcctgtaatcccagcactttgggaggccgaggcgggtggatcacttgaggtcagaagttcgagaccagtgtggccaacatgttgaaaccctgtttctactaaaaatacaaaaattagccaagcgtggtggcacgcgcctgaaatcccagctactcaggaggctgaggcaggagaatcgcttgaatctgggaggcggaggttgcagttagcccagattgccccactgcactccagcctgagtgacagagcgagactctgtctcaaaaaaaaaaaaaaaaaaaaaaagattatacgactgggtgtagtttgtgcttgtaatcccataaacccagctacttgggagactgaggcaaggaggactgcttgagcccaggagttttaagaccagcctggatgacatagtgagagcctgtttcttaaaaaagaaaaaaaaaaaaagaaaaaaaaatggagttaataattttggactacattccagattccttgtttcagttgagtgctttttctattattccacgggtattttacacaatactgctctctttagtatgcaaggctgaattttgggaaattgccatttttaacccataaagcccacaaattcattataatttagcttaatagcataaatattgagttaacctctggaagcaggctttgactttgatattgacctgaccacttaactctctggagactttgacaagtgacatcaatgtctgtctctgtgtttcctgatttatatccacagatagaaagccatctccagatcctagggccattttcaagattcagtgagataaggtgaagcatttgaatgttctccataaatgtcagctgcttttattattactagcattattttttgttttcattattattattaacatagacccgtctaagggcagaaagaaatctgaccaagaatggagtgaaagtcggctgtgaagcttaggactccctgaaaacaaaaaagaaaagtggtaacatcactctgtatccaagggcatggataaggatgattcagaatttttttataacattgatgttaatatacatagagaaatacacacacacacacacgtatatatgtccatggacatcaaaatgaggtataggttaggaagttaccctggaagttagaattgagataattactttgattagcaaaggtttatgttagaaatatgagtggttgaaggcagcgcctttcaccttgatgcctgttgtgtttagcactggatagaaaattgctatttttactgatgactactttaatgcttggttcattcatatgaaataatctttcttttctcctttaataataatgatctctcctgatttcaagttgaaaatgtattaatttaagataacttatgaagcaatgacatatggaagaggagatgggaaattgtttctcaatgggaaagtgtttataaatgggataggtatactaaaggtatttccatttagggaaagaggaaaggaatggtattaatatatttctctaatatttttccccctttgaaagtttgccatgttaggaatcctggggatggagtgatgaattgtggcattgctctgcagttcacgctgctgagagctgccccaacacacacacacacacacacacacacacacacacacacaaaggttgcacacacacaggtttgattatgctcatgagacttcttttattattgaaaatatcttaaagttttatctcaccaaggaggccttttctctttccctctctttctagaaggccaatgatgaggccaatcagagtgatacaagtgtctccttgtcagaacccaagagcaaaagcagccttcacttactgtcccatgaaacaaaaattggatcttttctaagcaacagaactttagatggcaaagacaaagctggcctttgtccagatgaagatgatatggaaggagattctttctttgatgatcccattcctaagccagagaaaacttacggtttgtgagtaaatggtttttgagctatgagactaggggtttaaaaataagataaatgttttcattttatagttaaaaaataatgaactatggaaggtttataattattggatccataaatctgactatgcgttgttaatgcctttcatgttgtaaaacaatcccagattttagaaaaacctagacatgatttattccaacaagtaagtgtagattgagtgtcagccacttgccagggctgttccagggtggggtgcagcaatgatagaagagggaagactcctgccctcaggaagctcatgctctggtgacagagtcaggcaatgagggttatgctgcagtgtgtggggtgatgagagcagagcagtgatgggagcccgagtgtgtggtcagggcaggtgcatgtcagctgtccaaattggagggggcctcacttggaggtgcccagtgagcaaagagctagaggaggtaagggagttgccgtgggttgatggagctttggggagaggaaacagacagcagggaggcgagttgggggtagcagagagagcaagatggggatcggatgaggtggactcagagatgaggagctggacggcttttctttgagactggaagccctgaggatcttgatctggcgtacattacagaaggatcctgaggttgctggggaaggttggtcttagagtttccagttaggaggccgttaatgatggaaaaggatttgccagtaagtgctagagaaaagtaatatacagagtggcatcatggtttttagcctgcaaaactagaaggttggaaacacgttagatgaagagtggcaagagcaagagtggattacacagacaggtggcatgacagcctggaggcccctgttgctgtgctaagttagagaagattgctagtggaaatccaaagtaggctattgagtgtatgcgttgggattgatggagaggtctgagctggagatgtaaattaggagtcatcagtttgtagataatgtggggtgtgggagactacagaggatcaccaaggaagcaggtcctgcgcaccttgaggccagagcagggagctagaagcagcagaggagatggaaccaggagagtggtgtctgtggaggtggcggtagggaggagtagctgtatgatgccgttggatttagccatctggaggtcagtgatgaccttgacacagttttgttggaatgggggtgcgaggcaggttagagaattagagtgcattcaagacagacaggaaaggattgtagatgaaaaatagttttctgatgagttgtaaaagtgtgcagaggagcagggtggtggctggaggggcaggatttagggctgaaaaacgtgtttaggtgggagaaataacagcatgtatgctgacgagagctgttcagctttaaagatggaagaattaatgatgtaagggagtgagaggagaactggagggctgcgcagcagtggaatcccatgcaggggcttgtgtttgctggaaaagtggagagcgtgtgggtctcattgtaggcagggggtggatatgatggtggcacctgtgcaagctgtcacctgagttcatagttgagtgaggatggaggacggaggttggagataagaggagagtggagaaagcatgaaatctttctataagaaagtaaggcgagaaggcactgtggaaacccggagggttgttgggcaattttaaaggtccccttgaggttagtggtcatgactttaaggggagttcatcagcatggctgttagtggcttctgtaagcaatattaaatctgagaggtggcacttatttgctagtaaactcctgtattgtcccttggctgcatgtctgggtaatggaaaagggcttccgaaaaaaatcacagtgaagaggtcaatttagtttatatcaaacagaattctaaagagaggtgagctgatttcttacgccctggctgtgccgattgtggttgatctgtagtttgcactcccttggtgtactttatggttttgaatctttaaagtgtatattcttgatttccagccaccacacgtataaaatatctttaagttgcttttgtttctgtggcagaataaaagtgtttagtggcagaacataagagcaccgattaactgtccttgtttcttgttaggaggaaggaacctaggaagcaagcaggaagtctggcctcgctctcggatgcaccccccttaaaaagtggactcagctccctggcgggagccccttctttaaaagactctgagagtaagtgcccaaagatgtggacttcaatactcgggatattttttctctaattaaatactatgtgattattgttgattttttttcccaggaaaatcactaaaataacctatcattttatcactcagagatatttcctgttaatattttgttgtgttttgttacttctaaggtggtcctattttatatgttgttttgtattctggcccttcctatacctatataccatcggaatacttttgggaagttgactttttagctgatttttattatctatagaaataaaatttttaaatcatctctccttttttggacatttacaatgacttgagttggatttgctttcaattaatttttaaaaatttggtgataccacagtaagtatcataaaatgttaaataaaaaattattctgcagatcattttcaagaacagtgacctgacatgtcatcgtaaatgcagcagagctaaagagcactggttacacatggaatagtctagctctggcaccagttactttcccacctctccccacacacagtgataggaatttaaaaagcatagccctgaacatgtaggatgggcagaggtcctttggaaaccgtatcatagtaaatgttgtatttaattagcgtagtgtttcagagcacgtgtacctcttttgagaaagtttcctaaagtagattcactaagaatttgcagtatgcgttttgcataattgtccagtatttccgaatctttttgtattgcttgatatactgtgggacttcctagggcacataagagagccggcctgttgcttctcttaaaccagccatgtatttataatgtccgcatcccttcccatttgcttctttcccgtggttactgccacctttaagaaaggaatccaggacatcatgaacatgtcattctgacattgattagagaatgatcatttagagaggacgttgagaacaaaggactaaaaaaccagtgaggatgtcactttagtaagtgaaatagcagttgcactgaagaaaaatttagaaattcaaaggaaaaataagactcatgaaaataattaacagtctatgaattcatacctaacagggctgtttatggaaagtgatgtcttataatgaggcaaaaaatggtttttggtggttgtgttccaataaagtagtattgtttatggtttaaaaagggatgtagctgggtgcagtggctcacgcctgtaataccagcactttgggaggccgaggtgggtggatcacgaggtcaggagttcgagaccagcctatccaacatagggaaaccctgtctctactaaaaatacaaaaattagctgggtgtggtagcacatgcctgtagtcccagctactcgggaggctgaggcgggagaatcgcttgaacccagaaggcagaggttgcagtgagctgagaccgcgccattgcactccagcctgagtgacagtgatgagactccgtctcaaaaaaagggttgtgatgcatagcttaagcgttcattaatcacagtttattttttccttagttttaggttattatgctcctgtcataaagaagccccatattgaacaacgacaaaaattgatgtggtttagagactgttatattctaagtcactctaatgttaatattttctcctgttcacaggtaaaaggggaaatacagttttgaaagatctgaaattgatcagtgataaaattggatcacttggattaggtaattagatttctagtttttgtgctgatcgttttaaagtgattatttttagggtaaggctgtaaaagaagtgactccgtctgcctacgctgagcaccttcctgctgctgctcattcagcaggtgtttgaatggcttttatgtgttcaggattacacgctatgcgagagatggctacagcaacagccatcatgttctcgtgaacctctgtcttcatggagtttaaattctggtcaggaatatgaacattaaacgggcatctacagatattttgactgtaaaagggtcagtatatatgggtatagaaatggctagtaggttacctttgtccagtcttggcattcagggaagacttcttataagaagtgacttctgtgcagaagcttcatggttaagtacatgtataagagagaagggaagatatttcagttcagactgagaaaaatttgggcagaggcagagccatttgctagatgctggtagtacatggtccaggcctcagagaattcagtctagtggggaaacagacttattgaaagaaaaattgtgagatgtgttcagttctgttctatggagcagaagttggtaagcctgccatgtaagtacattcattcctatggaagtaagagtgtcgatgtgaacattaccgagccctgggccatatgttgagagcacatttctcattcagtgttctgttctgtgcaagactgtagcagtgtgacaggcatactttaggcaaactcatttatgtaaaggcaaacttggtgacctgaaggaaacggtgcagccaggttctcaatggccacttcctatgctctctgtggatgtgatgggatcccttcctggtctgtaatcactcacatggaagcattggaagagcttcacaggcaggttagggagaaagaaaggtgtgtccccatttgcttttaaaacccagccctgtccaaggggcagctccgagaatgcccttccctcttctggagagacattctggatagtgcaaagaacttgggcttggagttggatagaagtgacatctcagatgtggcactgattgatgggtagcgtagggagataaactaaactgctatttcctcatctgttaagtggaactaataacatctgccttgttttaaagagtaaataggatttaaatatctcttcatatgtaaattaaagtacagtggctggcatggtaggtgcctagtaaatgttagttttctttttacgttacttttccccccatttgcagaagaataaatgttccctgagctgcccggattcttgttccgcacagtgccctggagtcctggtaactgagttgctggttgtgctgccatctgctctttgtgcgtcctggttgctggctggccagctaggtgggcctgcctcctttccctcccttgtgcttttcctgtcagctgtggtcatggttgccattagatgttcttttccactaaatctcagtggctaactgccaccagagactttactcctgacctctgcaccgtgatggccgccttgtcccctttgtgttctgtttttttcacttttgtggtgtttcactctgttgccaaaccttttagcttttttctctgactgctctattctcttaccaaagcgagggttttccctcctgtttctgagtggggagctgccgagaattgtcatcctcaggagggaatgtcgttgctggggctgcagagttgctgggtacaggcaggagggtggtgtgctccttcacttcactttgtcttgggacttaggcatatctcgggttggaattggggtagttatgcaggtgagaactaccagttcactagctggatgtttgtcatttagctaggcattaggattcagtagaaataaagttttatttcgttttgcaacaatgttgttttctgtttgggttgtttacattttaaatatacagtactctaggtattttgagtaatatgtagacagatgttagtggaccagcctaggagaataatgatgttagtggtaagtgcctggcactgtaccaaggaattattttatttaattcatatcctatgaggtaggttttattactatctccatttttacagatgaagaatctaggttaagtaacttgcccaaggtcatgctgcttttagagtcctgatgcatcacacagagccctcaccactgtgttttactgcctgtatgttatttagacatattgaaataatcatttcaatgggaacataaattctgagttccaaataaataatctacaaataaagctttagagcaccatctattttagtttggcagacaaatattaattaaaggtgcccaaaaggagtgtttatagataggtactttgcatatttaaagcaagagttgctaagctttttccgtaaagggccaaatagtctatattttagggtttgtggatggcatgtactgtctctcacatagtctttgtgtgtttttttgtttttttgttttttaacaatctttaaaaatgtaaaagccattcttagttcacaggctgaacaaaagcaggtcatcagccagaggcaagaatgaaagtaaggaaagcagaaggctgtcaggaagtccgggccaaagatgactggggtaagggcagataagacagagggtatgggatggggaggagagactgtcaaaaaatgaagaaaacaagaatccttggcctgagggccaaaatttgctgacccttaaagtaatgtagtacaggttgagtatcccttaatgcaaatgcttgggaccagaagtatttcagagtctggatttttttggattttgaaatgtttgcatttttcttaccagatgagcatcccaaatctgaaaatctgaaagtccgaaatgctccaatgagcagtttctctgagcattacgtccccactcagaaagttctggattttattcaagtttggttttcaaatttttgaatttgggatgcttaacctgtatgtattctgttaatcattttgacactggcttaaattattgtaatactaaacaatacataaccaagaagtcagaatctgatgtgttatagcacattattcagtaaatatctttgtctcatgtgtctgtctgaagagaccaccaaacagtctttgtgtgagcaacatggctgtttatttcacctgggtgcaggcaggctgagtccgaaaagagagtcagcaaagggttgtggattatcattagttcttacaggttttgggataggtggtggagttaagagcaatgttttgagggaaggggttggatcttacaaagtacattctcaagggtggggagaactacaaagaaccttcttaagcatgggggagattataaagaaccttcttaagggtgggggagattacaaagtacattgatcagttagggtagggcagaaacaaatcacaatggtggaatgtcatcagttaaggctattttcacttcttttgtggatcttcaattgcttcaggccatctggatgtacacgtgcaggacactggggatatgatggcttagcttgggctcagaggcctgacaatcttgtgttttgaattggctacaaatgctgccaggtggggaatccagttagctttctttaaatccacattgcagccacagccgtcctcgctgtctcagctcagtgtccacctctgctctcctcactggccttcacacataggaacactacaatgggtccttggaggctgacattttagtagctgccactcctggttttacttagcgcttgcaaaccagccacatatgtagtttgtttaatcagatttccacttctccttctcggccctgacagtgcctggtttctggcaagcacttgcagccctttaacctttgaggctacagtggagacgagctcttgattctcaagaggagaggaagctcctgacatgtccctcctgactgcttatgatcagggatttccagttcattactgggcaaggtttggatgtagcaggaacaaggactcatgttttcttcgtttgctgatattcttcccaccccatatcatctacccgtctgtcttatctgtgggacacctgccttgacccaagccttttacccctgttctctttggcctggactttctgacagccttctgctttccttactttcattgttgcctcctgtacacatatttcttctggcggtggtacgattatctctgggaaaacagaagtgaggtagtgctaccctgcactttttcactcctgtcttcccccaccccaccccatccctttgtacaaagcttccctttgtattcaggctaagatccttattgcaaccaaccaagccctaatgatccggcttctgccaacccttctgatcgccactccttttttcttcctccacccattctgtcccccaaattcattgttttatggttgtatggcttccttactggtggtttttacattttttttgagacagtattttaaaaattaaaatttaaaaaataaaataaatttttaatttttgagggggtcttgcaatgttgcccaggctggtctcaaactcctgggtgcaagtgatcctcctgccttggcctcccaagtagctggattacagatgtgcgtcactgctctgggctgcactggtggtttttcaaaccaccgcaccctcccccacctcagggcctttcacatgtttcctcttggaacacactgtccccagtaatttgtacctctgcaacctaggtttccactcagttgctaccttggagttcttcccaattgcactagcagtatttggtttgttccactgttcctcttcactagagtgtttgctccctgagatcagagataccatcttagtcattgctatacctctaggggacctagtcatcactcagctggttgataaattaatcatatgatttggctgtaagagaattacattgtctaactgtctggacagagcttgaatcccctcagcagtctgaccgatttagagacagtccagccttatctgagggaagatcgaggacaaggcccgcagggtctttgaacggctctctgtcatgccaggtcttctttttgtgatctgcatcttctgcatgtggctgtacatgcttcctgggtctttcataggccatccattcacattttaagttggctctcatgtgcctccaagtctgctttgaggctgacaactctttttcctcatctagccctcagaagtcctgggagggaagggctgctgatttgcaaatttgtcctttatagccttaagttgatctgaaggtgccccctctgtcagaggcttgtggtgcactttgagaaactggtaacactgcctcactattcaccatcccaccttcattcagttgccttttattaagatcttactgtggaccaaggtctctgttaagcacatcatgtacctgaatccttatgttaactctgattggtgtggctttggctgtacgtcagagcagaggacatggccaagaaagggcacctcacattcccaggtcacagagctgttgagtggcaggtctgaggcctgagcctggctctgtctgactgaaggtgcccttatttgctgtgcttcatggcctcttcacacctcatgagtgttttttaacttttataacaaaacaattagcatgttgaaaacgctcagtagttcatctagtacctagaggggattgatgatgacttgctattgctatacgccattaagtcaagggaccttattaatggtgagtgtgccccatgttaattgccttagagtacccggagtaaagatgaggtgttaaccacattttatagtcacttgtaacagtttattatttcttaggtatttcatttgtcatttgtcttcatattatatatgcttaaaatgttatttctagtctgggactttttaaatgatgcaatataattaattttttttaaggaaatgtgtgtttaatggtaggtaaattgtgacgcacattagatataacatatcttttcttaaacttatcaggaactggagaagatgatgactatgttgatgattttaataggtaagaaaaactattgggcaaatatataaatatatacgttatttgtaaacaatttccgaacacagacaagacaaaattacatttggtgcttattttaatgtatttgattctgttgttcatattgattgaagatgaagaaaagatagttaatccaaaattaaatatttgattttagagcatgtttttgattttacattagaatatagacagtcacattatgttcaggaaacttggtaagaagaagagaaacaattgaagaattaactgagaagtcatttagaagcagttcagttgccgtgtcataagtgctgattttctcttccttccatacctttttgtggcgggaattgtctcaaaattgacctaaaataattatgctctcaaattagttttttgattcagatcacatttcctaatatgtggatatgtggtctgccctaataagattgccattctctttttttttttttttttttttttttttgagacagagtctcactctgttgcccacgctggagtgcagtggtgcgatctgggctcactgcaacctccttctcccgggttcaagccattctcctgcctcagcttcccatgtagctgggattataggtgcgtgccactacgcctggctaatttttgtatttttggtagagacagggttttgtcgtgttggccaggctggtctcgaactcctgacctcgtgatccacccacctgggcctcccaaagtgctgggattacagacgagaaccaccatgccctgtcgattcctttcttatacacagaaagataatatgtaatgtagaagtaatatttgttgtggatatgattcgaaattttaaattagatgcctgagaattttatttaattgacaggttatctttccaattggaagtctgtatttttttttataatttattatacagtttttgagaaagagcatgatgtagtagatgaaattgtaaaaatctgggtttgtttctttcttgctattgtgaccaaagtcactgctttgaacctttgtctcctcatctgttacattgacttgactgctgctgcccttgctacattattttaagggtcaagcaagacaatatgtatgaaattaattatagttaatattatattttacttaaaggattaaaagaaatatctgaatgtttaaagaatagtaatctctttaaatgtttattttcagagttcttatttttttttccccttctgaaattagtaccagccatcgctcagagaaaagtgagataagtattggtgaagagatagaagaagacctttctgtggaaatagatgacatcaataccagtgataaggtatggtgttctgcatttcccatagagtgctttttttttttaacctatttgtcgatttactgtaaagcttcaaaattcatactaattagtagaaaaacagttgaaaattatgaaaagtcatgacagagacctggctcgagtttataaagaatgtctttgatgaatgtgtaagattggttttggttgtcacttcctttggtatgcaagtctcgctgctgaaatgcctgaggattattcctggggcactgggattgctgtggattaagagggatcagggtgggtcaggcttagtgagaattgaccacctggtgccataggtggaagtcagtatagggtactgtgatcacaggaggaagctgagcctggagtgcagagagtgtggtcatcttggccagttgtgacatctgaacaggcaagccagactgggctaaaatccacaggagacaagacagtaggccataaagttagagtccgtatttgagatccaaactttacctttttatgtgggtggagaacagaagatccttcgatggtgagctgtagcattgcagggtcacctgtcagtacccacttcaagctgtccccagctcagaggagtctaccagtcaggttggaggttgccatggctgggtggggacttgctttccagaacatggtgggattctccaagcgctgtgattgtcacacagggagaaggcctttgagagaggtagcgtttacaatgcaaccacacaatctaagtcagcagcatccgtgtttgcattcttattctttcatatattttcttatttaagctttaacctttgactctcagtttctttacttgtaagatggaagtattaatacctatgtgataggattattttgaaggttaaatgataatatataaagcacttctctaattcctgatgtattatatacccttataattataaatttagctttctcttttcaccctgcatcatcctaaagaggcctgaagaatgttgctttaaagttataccaaagaaactatgaaggattctttaaatatgagggagaggactcgaagaaatgactgttaaactaggatttgtgaaatgacgtgggttgaagaggaggtgtggcatccctttgccattgggggccttggatggcgtccaggagtctgggctttgttagactgcttctcactgggtcctactcactgggtttggcacatcaatgttcctaggagttttcacttaaaagcttaaatttagataattttgccatttacatagattggactttgacagtcactgtacttcatcaggaagcattttctaaagccttctgtgtagagaattgctactgggcacctggggaacacaaaagcatttgtattctttgcagtaagaatacagcagacaatctggtcacctttcagccaaggtgaccaaaaccagtgtccattaagcacctactatttagagagcacagggctggggatgtgggggtgtgaggaaggagatagcccagtggaatgggcaagttctgtaagttcatcacatctgggtttgagttctggagctgctacttaccactcacaaatttggccaagttatttaacttttttttgttttttttttttttagacagagtcttgctctgttgcccaggctggagtgcagtggcgctatctcagctcactgcaagctccgcctcccgggttcatgccattctgctgcctcagcctcccgcgtagctgggactacaggcgcctgccaccacgcccagctgattttttgtatttttttatagagacaggacttcaccatgttagccaggatgatcttgatctcctgacctcgtgctctgcctgcctcggcctcccaaagtgctgggattacaggcgtgagccaccgcgcccagcaagttatttaacttttggggccttgggtctcacatctattttgcaagagagatggtggtagtgaaaattagagataagcgtgtaaagcatatagctcagtgcttagcagaacaggcattcaataaatggtatctaatactattattcattgtagtcacaatagacatttctgtcgtaggcacagatatagacttcttccctcaaatttatgcaggatcagagagagaaaagccatgtacacaaacataggaaaatcaagataaaaagtgacaggtgccataaaatgccagtcattcatgggccatgaaaattcagaagcaggaactaatatttgaccgggattttgaaagatgactctgacttggttctgcgagggctgaggaggaacatggtaagctccatgagaacagaagggagatcccgggacatgtcagtgctgccctgattccagagcttcactggagggtgctgtgtgaagagacagaatgttgggaggagcagggttgttagaaggtgactttgaaccagaaatgacagaggatgaactaggagcagaggccctggggagggtagtctctgcacgggagccagcacgagcaaagacataggtagatgttggaggaagagggccacacgttcctaagggacagaacataagtgtgcatcccaggtttctgttaatgcatagcaatctaattcagcaaacgtgaacatttacacttcataaaacttttcaaaatcttacaagttcccgtcgatttgtatgaagcttgctatcacagggatcctttgtttccctttcaagactcaaaatgtatgttttagatatttttattttgtgatgtaaaatctatttttatagttttgaactaagttggtcactttgagttcttattctaaaactaaggaggcatgaaagccgcctttattagttttgtttttgtttttgtttttgtttttgagacagagtctcactctgttgcctaggctggagtgcaatggctggatcttggctcattgcagcctctgcctcctgggatcaagcaattctaccttagccttctgagtagctaggaccacaggcatgtaccaccatgcccggctagtttttgtattttgagtagagatggggtttcacctatgttagccaggctggtctcaaactcctggcctcttgtgatccccccgccttggcctctcaaagtgctgagattacaggcgtgagtcactgtacccggcggaaaggctttattaaatagccatttatttctagttagcttttgttcattcagttttctttcttggtaactactttaaatgaaactgttcttcttggaagtttctggttattattgtggtcttttctttgccttaaagcaaaactaaattaatgatctccaataactgaattatctagattaagatcgttttcagtccacgatttttcctgtattcactcttgtctgtagtttagcatttgtattaatataacactcaattactttgtaaacgagatggaataccttactgatttcactctgtaataatgatgggaagagaaaattacagttccaaggtatcagtttgttttacagtctgtctgcaagcttttctgacttttcagtttttgtgtaaattggatttgaattgaatgcataagaactgtaattaagattcctaataattttctttgtgagatagttttacagcaggactatgtttggaccaagagaaagggcaaggacttatttgttgaaaaggattttacttacaacttaaatttctgaatatccgaagaataacaaaatgagaggatatgtggggggcagatgaacagacaaataaaagcatctcacagtatctcgggatgaaactgttgcatctctacaagatgttcctattcttgtgcgttattacctggcccaggtgttggcacacttgttctctaaaaggccatatagtgaatattttaggctttgcaggccataactactccaccttgccattgcatggagaagacagccatagacgatgcctaagagtgtgtgtgtgggtgtggctgtgactgtcccctggtctgttgccacaacaatgagtctaggtgggactgggaaggttgggttctgtccttgttcagctgtcagtgggacctgcccagctgtatgttctatattctggagcctgtatattcacccgtggttttttccttagttaagaaatgttttcccagcctgcattatgcttacatatctattaatatttcctttctccattatcatgagttgtttatacaaatgaatagatataagttggttaataggttaactttctagtttacaagtagtttaaacagaagtagaaatgagtcgtttcttacaacactttgtgaacccggggctgggagtctgagactccatgggctgtcctgtctgcccttctgttttcacttcatgatctggcttcaggtggcacagtgttaaagtgtgtcacaccatgtcgagtttgatgttagaaacttaacgttctataccgtcatatgaaaacataagaagggatcgtttccaaattatacattttaatgaattttcgtgaaatttaacgtgggtaaattatggttttagagttagcaattcatagagtgatacttcctgtgaacagaatcatacattgggactatgctcaggtaaagaagtttaatacagtttttcactaatttgtttcttagattaaattggaataatggctaagatgtgttttattttaaattttcacttgaaatatttgagaataatcataaaacattgggctctaaagattgtactaacttagtagacatgattttaggcaaatcgcttctcaacacagctttaaatatgagttggtttatgaagtataaagtaatactttacagcaacagtttttttaatttttagttttttatttcttatttccataggttttgggggaacaggtggtgtttggttgcatgaatgagttctttagtggtgatttgtgagattttggtgcacccatcaccctagcagtacacaccgggcccaatttgagccttttatccctcaccctcctctcattctttctctggagtccccaaagtccattgtatcattcttatgccattgcatcctcataacttagctcctgcttattaatgggaagatgtgatgtttggttttccattcctgagttacttcacttagaataatggtctccagttccatccaggttgctgcaaattccattattttgttactttttttttttgagtcggagtctcgctctgtcacccaagctggagtgcagtggtgcaatttcggctcactccaacctctgcctcctgggttcaagcgattctcccgcctcagcctcccaagtagctgggactacaggcacccgctatattgtctggctaatttttgtatttttgtagagacagggtttcaccatgttggccaggctggtcttgaactcctgacctcaggtgatccgcctgcctcagcttcccaaagggttgggattgcaggcatgagccactgcgcctggcctatttgttcctttttatggctgagtagtattccatggtatgtatataccacaatgtctttatccagttgttgattgatgggcatttgggctgggtttcatgtttttgcaattcggaattgtgctgctgtaaacatgcgtgtgcaagtatctttttcatataatgacttcttttcctctgggtagatacccagtagtgggattggtggatcaaacagtagttctacttttagttctttaaggaatctccacgctgttttccatagtggttgtactagtttacattcccaccaacagtgtaaaagtgttcccttttcaccacatcttcaccgacatttatattattttttgattttttgattatggccattcttgcaggagtaaggtggtatctcattgtggctttgattttttaaaataacttaagactactcacattctgacacttaattattttctttcttttgaacaacaaagcttgatgacctcacacaagatctgactgtatcccagctcagtgatgttgcggattatctggaagatgttgcatagacacgaagaaggaagtattctaattaacaaggacagaggactgaccggttccatttttttttttttccagacaatcactcagctggaatgtctgctctctattggtgccttgcatttcaaaaacactgcagatattttttaaaagtaattttcattttactaaacaaaatacttcctatttgagcccatgtgtggaagatttaatattcttaatttaactgtacatttctttatggaaattgattatctacactcagtttcattacagggaaggaacccatgaaaacatcagtgttaagagcatgatgaaaggtgtcaataaagccgtaggatcgcgcaaccctttgtgtgtgtggctgctggtacgtgtgatctttgaaaaccttggctttagccctctggaatcagagcttacccaccatagtatattttgatattaggtggttctacacatagttggcaaaatgacttggtaaatttgtaatgctgaagtatattagtataagttaaatttgatgtgtcaactttattttgtatttccttccatttggaaggtttgttagaccattaaggttatattaaagtactcttgtgtgtgctatttagttttgcttgttttaaagaaatctagcagtggttatgagttttaattcatagaattgtc

SEQ ID NO: 6874 - DNA, 455 bp, Homo sapiens
gggggcctcagaacgttatttccgggtgacaacctgcagggccttccgcccctcgcgacctctcgggagtcccttccccggcgcccccccggggctgcaggggctgcaggttcggtctcggggcctccttaccgcagtccgcccggctttaggctagtgggctttaactacgtcgataatatgactccggcgatcttgtgcggcgatgggatgcggccgtgggcggtggagtccaggcggagtccgctctccacacgcgagggcgcctcctcctcaccgctcgccggcttcaaagctcgcgcctcaggcgacggcagccaacgggttgccggctggaggccccgccgacgccccgccccttgcgtgcccacccgcgccccgcagccccgcccccagcgccgaccctaagtttcggcgctcagtggtccggcgctccccaaggctcggtgtccagc

SEQ ID NO: 6875 - DNA, 577 bp, Homo sapiens
ctgttatccatgtaagcagctttagtcgtaggttctcttcattataatttattatctgtaaagattccttgaaacttaaatgcatctgaaaccattaagcagtgcttttatttcagatctgtaagttaattgtattaaaatccaaattggaatgaaatagtagtaatggcctaagaccatgttcagtttgacaagctttatatactgtacataatttcattgtaacccttaaaaatagagccaataatagaatttccacagtctcatttatacggttaaagcattattgctattatgtaggtcacggatgtttataatactaaagtattttaaaatgtgcaagtagaaaaaacagtagaaagtgatgcatgcatatttatatataagtaaagcaggattgtgctgtttttgcactttataatttcaattaagttgcggctttttactacaagttaactttattagtaaaaggagcaaattagacctaattcattgatctcggttaagtgagcagactgcatgacttgtgtaatgccagtttctcatttcatattagcctaaatattacagaaattac

SEQ ID NO: 6876 - DNA, 22798 bp, Homo sapiens
atgcgccgagcggaactggctggtttgaaaaccatggcgtgggtaccagcggagtccgcagtggaagagttgatgcctcggctattgccggtagagccttgcgacttgacggaaggtttcgatccctcggtacccccgaggacgcctcaggaatacctgaggcgggtccagtgagtgattcggccctgggcgggtgggctggtcttctgccctgcccctgggtacagccctcggtgctctattcccgttccagtctgttgcgagttcaggtctattcaggattctggattacatcctaacgtgggcgagtttctgttgaacgtgattgcacgtatcaagatgtgtgctcttagatttgttttcaatccagataatttcagaaatacattgtttagtacctcaattggaagtctgaatttttttctgatttcacaatgaactgtggaagtggatcgcttgttttactacacctgagcaaagcacaacagaaatttaatttatcgcgtttattacttatttgtaggatcgaagcagctcaatgtccagatgttgtggtagctcaaattgacccaaagaagttgaaaaggaagcaaagtgtgaatatttctgtgagttttattaaccgtctggagattacccccaaccccccaattaaaagactaacgctcttcctatagtatctgacagcatcaattatgacgtaagatttgactactccgtgcaaagttagacattcgcttgtactttttccttcagaaagacaattggcatttactgcctctaaagaggctttctgtaactctagcctttgtggagtgttgcccatcttacttcaggacattatccagtcctttcaaaggagtctttaaatgggttacttatgttatcttttattttttgcttgtttgtttgtttatagagagggagtctctgttgccagctggtctggaactcctggcctcaagtgatcctccctcctctgccacccaaagcgttgggatcacaggcgtgagccacctcacctggcccctttattttttaaggaactttttccagttattggattggtgtttaatcttagtgtgctttgcatgttctgaatttgaccaagtttcactttttttaagaatagaaacccagatgtcttacactttttttttttttttttttgagacagtttcactcttgttgcccaggctgcagtgcagtggtgcgatctcagctcactgcaacctctgccttccggtttcaagcgattaccgtgcctcagcctcccgagtagctgggattacaggcgcccaccaccacacccggctaatttttgtatttttagtagagacggggtttcaccatgttgtccagtctggtcttgaactcctgacctcgtgatgcgcccacctctgcctcccaaactgctgggattacaggtgtgagccaccatacccggccttacacttttatagctacttgcacactctggacattttcatttatttatttatccagcacatctttaattaagcaactaggttgtgccgggcattgggaattcaacagagggtaagacaaaaaaggttcctacccttgtagagtttacataccctcctgaggaagacagagagtaaacaagcaaacaaataattacatattgtgattattgctatgaagaaaataagcatgtataataatcaataaatgacagaactactgtagaggaatcatagaagggctctctttttcccccttttttttttgcgtctcaatttttcgcccaggctggagtgcagtggcacaatctcagctcatcacaacctctgcctctcaggttcaagagcttctcttgcctcagccccctgagtagctaggattacaggcgtgtgccaccacacctgactaatttttgtatttttagtagagacgtggttttaccatgttggccaggctggtctcaaactcctgacctgaagtgatctgcctgcctctgcctcctaaagtgctgggattacagatgtgagccaccacgcctggccagcaaaggtctctctaaggaggtgctatttaacctaagctcaaaggagggtggcattttattttatttctttttcttttttttttttttttgagatggagtctcagagtctcgctctgtcgcccaggctggagtgcagtggcgcgatctcggctcactgcaacctctgcctcccgggttcacaccattctcctgcctcagcctcccgagtagctgggactacaggcgcctgggagagtggcattttaaatagttgatagtaatttccttttcatgctcaaagtagtttctctgatacttgtaatcaggaaattttaattcagacactgtaatttttcctataattcctcttcagggttttttagttgatggacatttaatggaacagaatgtcttaatatacctaatttgatggattgattgattgattgattgagacagggtctcgctttgttgcacaggccagagtacagtgccacgatcatagctcactgcagcctcgagttcttgggctcaagccatcctcccacctcagtctccccagtagctgagatgacaagcatgtgccaccgtgcccagctaattgtattttttgtagcgacggggtcttgatatgttgctcaggctgtatgtgctcttttagaaaacagaagtatggctgggcttagtggctcacacctgtaatcccagcactttgggaggccaagtcaggcggatcacctgaggtggggagttcaagaccagcccgaccaacatggagaaaccccatctctactaaaaatacaaaattagccgggtgtggtggcacatgcctgtaatcccagctactcgggaggctgaggcaggagaattgcttgaacccgggagacggagattgcagtgagctgagatggccattgcactccagcctgagcaacaggagcgaaactccgtctcaaaaaaaaaaaaaaagaaaacagaagtagacaatttaaagttaagcgtctttaagtacattttgcccataccaaagttcttatttttaattttattgatacataataatcataatttcatgctttatcacgcaggcacaataataattgtacatatttatggagtatatgtgatattttgatacatgcatacaatgtataataatcagtaattaggatagccatcacctcatttatcatttctttcttttgggaacattcaaatcttctagctgttttgaaatatacaataaattattgttaactgtagtcactctactgtgctattgaatgctagaactcattccttctaactgtatttcataccagaattctttatttgtggtatatctctctttttgtttctgttttgctattctagaaaggcaggtagggctagatcatattctccaggctcatgtcatttagatttcatagaaactccaactataaacctttccagatttctctgattaaggtgactaaggctctttccctaatatttttaactgagatataaataataaagtgaaatgcctacttttttacatctgcaaaaatattttattttcttgtataatctttattttattatacactttatcttggttttacttttgctttgcagaggcatgagattctagttttgacactaatgttgatcctaatatttgtgaacttgatctctagctttcaggatgccaacccgcccctgaaggttattccccaacacttcaatggcaacagcaacaagtggcacagttttcaactgttcgacaggtaagtgtcatatttaatctaattaagcccctgttggatttatttctgttcttagactgtagctggaaaaataaaatttatgatcctaaagtatacagaatattcatgaattaattaccaaattatttttataatcattagacatgatacagtttgaaatattttctaagttttgtttatttttatttgtttgtttatttatttcaatagttttggggaacaggtggtttttggttacatggataagttctttagtggtgatttctgagattttggtgcacttgtcacccaagtagtgtactctgtacccaatacatggtcttttacatctcaccccctcccacctttcccatttttcaagttttagatggttacaattttgtgcagaaactgatttcagttatccattttttgaagagtaccatctaatgtctaagttttcttcctttagaatgtgaacaaacatagaagtcactggaaatcacaacagttggatagtaatgtgacaatggtatgtaagtttctcagttttaagatgtacaatgtatacctgattgaaagagtctatatttacttccagtcgttaaagattcacttgcctagtcagtgttactttcattctcttcaatataccattaatagtaacaattcattacattagtagcctggaaagtatagattttcatgacaaattttttttttttttttttttgagacagggtcttgctctgtctcccaggctagagtgcagtcatggctcactgcagccttgacctcctgggctcaagtgatcctcccaccaccgccttccaagtagctcgaacttaaggcatataccaccatgcccagctaattgttaaaattttttgtagagacaaggtctccctgtgttacccaggctggtctcttactcctgggctcaagtgatcctcctgccctagcctccccgagtgctggattacaggcatgagctactgtacccagcctttcatgtcaattttaattcacaatatcttgggggactttggataggtgactgtgaaacttccacaagtttttaaggattcttctagacatttactttctaggaaataaatacattttcaatatttacaaaaaaaattgaataaagccttaatggattttcctgatgaggtgatggtgccatgcagtaaactcacatgtttacagaacttgtgaatggattctgcttctgcttaatgtgatgagtctgtgtcacaattccagtgacatataagtgaaacctgtcatgtatattgtcatgcatatgtcctatattttatcagtttagatataactttaagccctttagtagatatatcaggactaccaaatgaaaaaaggagttggaaagatgatacattgtctcaggacagtagtttttaaccttttaggggacttcatattctttcgtagaatctaatgaaagctatttatcttcagagggaaaaaaaatgcacctatgcacaacattttagtttcaggtagttcatagattttagattttagaagcttcctttaggcagtgcttcctgatatcttttacatggtgacacattagaataaatgactgcttgcatattcttcctgaaaccagccgaaagctgagagattcagtatatggcatctctgtatgcttctgcataccatttggaagctctgctccaggaaaagcgtgaagggaagtaacttatcacttgccaatggtcatttaacttgtaaaaggtatagctagtccttctatcaaagaagcatgcgcacataaacacacaaaaggtatgcttaaggttcaaacccaagttggtctgtctctaaagcctgtgtgcctttgactatgcaatggtgccttcctagtaccaaggatgtatgtatgtagtagggacagggctaggtaggtaaatatattttttttcttacttagcggaaggccttttgggtgcatgcccactaactaaaaaagaagccacatcagtaacattatgacttgataaaattttgtcaaaaatggaaatgacctaacataattgattcaataaactatggtccatcagaacagtggaatattatgtagcaattttaagtgtttgtcatggcaaatgcaaacatcatataagtaataaaatgaaaatgttttaaagtacactctgagccaggcacagtggctcatgcctataatcccagcactttgggaggctgaggtgggcagatcacctgagctcaggagttcgagaccagcctgggcaacatggcaaaaccctgtctctatttaaattatttaaaaaataaagtacactgtgatggcaactgtgtgaaaacataaacatttgtttattaattgatccaataatttaagcatgtgctatatttaataatcaggatattcagtactaactgaaacagaaacagcttctgacctaatagagtgttaggaaaaggtagataaccttattccaagacaatagggtttaactttgtagtggtctcatgttcatcgtgaggttttattttattttattttattttatttatttttttgagatggagttttgctcttgttgcccagtctggagtgcagtggcacaatcttggctcactgcaacctctgtctcttggattcaagcaattctcctgcctcagcctcccaagtagctgggattacaggtgcctgccaccacacccagctaatttttgtatttttagtagagacggggtttcaccatatttccaggctagtctcgaactcctgacctcaggtgattcatcctaaggatttaatgaaagctacttatccctagggggaaaatgcacctatgcaaagtaatatacaaggtgatatgtacaaacaaaggttattttgttaaggaggttatattgagctgaatgcttctcccaaatagtcctgcgtcctgctttttctgtctggcagcatgagtagatctgtttcttctttgactggacaacccttcaaatatgtgaaatatgtaatcatgtctctttacatgggataaatatccttcattctattaagtgttcttggtgcattttttcccccatacttatttctgtctttatcatcctcttttggacacaccattgtctgtcagtgtccactaaagtcttgtccaaactaaacacatcttggctgggcacagtggctcacacttgtaatcccagcactttgggaagccaaagcagaagaattgcttgaggccaggagtttgagaccagcctgggcaacatagtgagacaactatctctacaaaaaaaatttaaaaattatcaggcatggtggcacatgcctgtagtcccagctactcaagaggctgaggtggcagaattatttgagcccgagattcaggctgcaatgaactgtaatcacacctctgcactccaacttgggcgacagagcaagaccctgtctcaaaaaatgtaataataaggaaaaacaacatgtcccacatattgtgtagccacttaggcactatgtttgtcagggctgccataacagactaggtggattaaacaacagaaatgtatttattttctcagtcttgaaggctgaaagtcaaagaacaaggtggcagcaaggttggtctctttttgtttgtttgtttgttttttgaggcagagtttcgctcttgttgcccaggctagagtgcaatgacgcaatctctgctcactgcagcctccgcctcccaggctcgagtgattctcctgcctcagcctctgggtagctgggattacaggtgtgcaccaccacatccggctaattttttttttttttgtatttttagtagaggtggggttttgccatgttggccaggctggtcttgaactcctgacttcatgtgatcgcctgcctcggcctcccaaagtgctgggattacaggcgtgaaccaccgcacccggcctaaggttggtctcttctgaggcttttctccttggcttgcatagggccaccttctccctgttttctcacgtggtctttcctctgtgtgtgggagtccctggtgtctctttgtgaatccaaatttcctcttataaggacactagtaagattggattacggctcaccctaatggcctcaatttaaattaatcacttctttaaaggccctgtctccaaatacagtcacattctgaggtactggagtttaaggttttaacatacaaatttgggggcagagattctccccataactggctccgtatctttgggttgcggtaatgggaatatggaaggacttaacttctttttttttactgttcagtgtaaaaattaatacacaggaataaatcagtttttttttttttcttttagccaaaatctgaagatgaagaaggctggaagaaattttgtctgggtgaaaagttatgtgctgacggggctgttggaccagccacaaatgaaagtcctggaatagattatgtacaagtaagggctgtgtggataaacagaacaaaaagcattttaattttggtgcaccacttaatataaggggtcagcaaactctaccctgggccaagtccagttcatggccttttttatatccatgagctaaggattgtttttaggttttgaaagagtaaaaaagaaacaaataatatgtggctgagactttatgtggcctgcaaagcctaaaatatttgctgtctgactcttgatagaaaatgtttgccaacccagacttagtttattagctcttcaacctaacaaaacagcttagtttctgaaacaatttactgtgactttttttagtttggcttcatatcccttatgtttggcttggtaatcattttatgagttggataagattcatagtttttttaaatgatgaggcatcaggcaaacagtgttatgagtagccagggaaaaaatggaaatcgacacaattagatgctttaaaatgcataatcacatctatcacttcatgggcctgtaaaaaataaatcacatattctaaagatgaaatgttgaggatatctttaaaattcatgtggctgtaatcataagttatgtagacaactccttgtccttcaggatttacctgcccccaagtttgcaggtgttccttgagaatccagtgcatgcctctgcattagcgcttactccctatagcatgtagttcttttcagttcaacaggtatttattatttgctatatggtgccacattgtgtttttcacatttaaaactaatttttcctaaaaatgtaaaaagccccaagaatcaataaaaagaccaagaatcacccctcccctgcccaagaaaaaatagccaaaggatatagatacctcacagaaaggaaataaaattattcttatatgacaagatgccaaaaatcacttgtaatagaagtataacataactatgccaaggtgctatttttcaggtaacatattggccaagaaagtttgatacaccatattgacaagagctggggaaacaagcactcttagacgtggtacaggagtataaatagactcaaatcttagggaagttaatttggtactctttctatataaccaattgatcttttggatgatatccttaacatatgctacatttcaaaaatagctatatatatatatatatatatattttttttttttttttttttttttttttttgagacagggtcttcttccgtcatccaggctggagtgcagtagtgcactcatagctcattacagcttcaacctcctgggctcaagcaatcctcccacgtcagccttcaacataccaggggcagcaggcacccaccaccacacccagctaatttttaaattttttgtagcgataagttttttaattttttaaaaaaatttttttgtagagagaagttttcaccatgttgcaaggttggcctgaaactcctgggctcaggcaatcctcctgctgggattataggcatgagctatcatggctagccaaaaatggtttttaatttataaagaattaaaacttacttatttagcttattttcagagaatacatacaagtaaaatacaccatgttaaaaaaaacccttaaggaagtaagcgtttaatgtatatcctcttaagtttctcacaaatcagtggtattttcataattagcaatcacagcctcagactccaaagtagacttttaaaaattgaatcaaattaggttttaaaaatgtcattctaattcaagtgtccttaattcttgaaaatattagctttagctgaagattttgaaatggtgtatacaacatattaatgtcatcttatcaatgttacagttttattggatatacttaataagttagttttttcaagtactatcatgtaaaaaatttttagtctttaacattttacttactaaaatcatactttatttaaaaatttacaaattcagaccaggtgaggtggctcatgcctgtaatcacagcactttgggaggctctggcaggtagatcacttgagctcaggagttccagaccaacctgggcaacatggcaaaacctcatctctaccaaaaatacaaaaaaattagctgggcgtgttgacatgcacctgtggtcctagctactcgtgaggctgaggtgggagcatcacctgagcccaggaagcagaggttgcagtgagccaagatcgcgccactacactccagcctgggtgacagagtgagaccccatctaaaaaaaaaattacatattcaaaatttaaggcgttattttcttccgcattacaaacatagtagtttccggaatgtctcattgttatggacaatgaaagaattttcttttatttgttctttgtttctaaacaacagtgtggcaagaaattcaccagtttgaaaaaaaaaaatgaagcttataataccatttagtaaaattcagtctcattttttctttcagattggttttcctcccttgcttagtattgttagcagaatgaatcaggtaaaattaataatagagatatatgcattcttttgtttgcattgtgtgtgaaagtatttgaattgttaatacatatactgaattcttacagtatgcaagactttgtcctaagctctttaatggttcttatttaatccttactacaaccctctatggagagttattattgataactactttttatagatgaggaaacagcatttgaggttaagtaacttgcaggtggtttttcagcaagtaaatggcagtactgagattcagtgccaggtagatctaactccagagctcatgctctgtcttaatcatggtgctagagtattcatttctgtagctttcagttataagtcttagattctggggtttgaattaaatacaaggtccctgacttacaatggttcagtttaggattccttttttcccaccatgcctggctaatttttgtattttcagtagagagaggattttgtcatgttggccacgttggtctcgaactcctggcctcaactgatccacccaccttggcctcccaaagtgctggaattacaggcatgagccaccatgcccagccattttaggaattttcaactttacaatgtgtttatcagcacataaccccattgcaagttcaggggcatctgtactaaggttagattgctatttctagttctagatgtcctatacattctattaagattgaaatatgggccgggcgcggtggcttatgcctgtaatcccggcactttgggaggtcaaggcaggtggatcacaaggtcaggagttcgagaccagcctggccaacatggtaaaaccccatctctactaaaaatacaaaaattagctggatgtggaggtgtgcacttgtaatcccagctatttgggaggctgaggcaggagaatcgcttgaacctgggaggcagaggttgcagtgagccgagatcgtgccattgcactccagcctgggcgacagggcgagactctgtctcaaaaaaaaaaaaaagaaagattgaaatatatgatttcttggatcaaaagggaagaattatggagtttggttcttcagttttttaggagtaaggactcttattcatttaaaaagcaaataaaaatttaattttatcttcacatagcattgggtacctttggaagcctttttttttttttttggcagggtctcattctcttgcccatgctggagtacagtgatgtgatcttggctcactgcagtcttgtactttggggctcaggcaatcctcccacctcagcctcctggtagctgggaccacaggcatgtgctaccatgcctggctaattttgtttatttttggtagagacaaggtctcactgtgttgtccaggctggtctggaactcctgagctcaagcgatcctcccacctcagcctcccaaagtgctgggaatacaggtgtgaaccactgggcccagccaacaattttttttgtgggtgatattctcttggaaataatacacaagctgacagtgttacttaatcatttgcattaagatattgtagcagtcatactaaattccatcagtgtcatttttgttgtaaccatcaactgtatttgaataaaccagagattattttcaagagtttgataaatccatctgtatagtttaagaacagatttttctccacctaaatttttattcagatttgtactttgatttaatttgaatttagaaataaactgatggtttttttgttttgttttgttttgttttgttttttgagagggagtctcgctctgtcgccaggctggagtgcagtggcacaatcttggctcactgcaacctccacctcccaggttcaagcaattcccctgcctcagcctccctagtagctaggactacaggcgcacaccatcacacccagctaattttttgtattttagcagggatggggtttaccgtgttggccaggatggtctttgtctcccgaccttgtgatccacccgcctcagcctcccaaagtgctgggattataggcatgagcccaccgcgcctggccaactgatggtatttttacaaatacatctttttttttttttttttttgagacagagtttcgccttttgcccaggctgtactgaagcggcaggatctcagctcactgcaacctctgcctcctgggttcaagcagttctcctgtctcagcctcccgagtagctaggattacagaccccgccaccatgcctggctaatttttgtatttttagtagagacggggttttgccgtgttggccaggctggtctcaaactcctgacctcaggtgtgccattgttttttttttttttttttttttttgagacagagtctcactctgttgcccaggctggagtgcagtggcaaaatcctggctcactgcaacctctgcctcccaggttcaagggattccccggcctcagcctccctagtagctgggactgcattcactcaccaccatgcccggctaatttttgtatttttagtagagatggggtttcaccatgttggcctggctggtctcaaactgacatcaagtgatccacctgcctcggcctcccaaagtgctgagattactggcaagagccactgagcctggccacaaatacattttcttttaaccttgtgaagtctttcaagtagttacaaactaaattattaatagttacaaactaaatcctaggatttaaaccaaggtgttagttgatatttgaaagtgtgaaaatatttgttttaaaagcctcactggggctaggcgcggtgcctcacacctgtgatcgcagcactttgggaggccgaggagggcggatcacctgaggtcgagagttcgaccagcctgaccaacatgcagaaaccctgtctctactaaaaatacaaaaattagccggacgtggtggtgcacgcatgtaatctcagctactcagggggctgaggcaggagaattgcttgaacccgggaggcggaggttgcagtgagccaagatcgcaccagtgcgctccagcctgggcaacagagtgagactctatctcaaaaaaaaaaaaaaaaaaaaaaaaaagcctcattggataagccgcctaatcaaactaattagagtcaaacaaattagctttctttgaaagtttaaagaatgaggccatttttaacatcagagttgctttctaaataaacttaatgaaactcatgttgaattcatgttttattattaatacaactcttctccaccccctctttttttttttaggcaacagtaactagtgtcttggaatatctgagtaattggtttggagaaagagactttactccagaattggtagtattgcatgtttttcttttcataatgtaggcaaaaattagacgttttgggtcaactgtgggccacatatacaatggtgctcctataggattataatactgtatttttactgcacattttctttttttcttttctttttttttttttttttttttttgagacaaggtctcgctctgttacccaggctggggtgcagtattacaatcatagctcactgcaaccttgatctccccagctcaagcaatcctcctgcctcaatctcctgagtagctgggactacaggcgcatgcagccacgcccagttttttttgttttttgttttttgttttttttattagagacaaggtctcactgtgttgtccaggctggtcttgaactgagtccaaatgatcctgcctcctcaccctcccaaaatgctgggaattacaggcatgagccaccatgtgtgcggccttttgtgttttttaaatagagacgaggtctcaccatgttccccaggctgatctcagactcctaggctcaagtgttcttcccaccttggcctcccaaactgtttggattacaagcatgagccactgagcccggctcctttccagtatttaaatatgtttagatctggccaggcacagtggctcatgcctgtaatcccaactactagggagggctgaggcaggaggatcacctaaggccagggaggttgaggctgcagtgagccatgattgtgccactgcactgcactctagcctgagtgacagagtgagaccctatcttaagaaataaatatatggtttttttggatgcacaaatgtttaccattatgttacagttgcctacagtattcagtatagtaatgtgctatataggtttgtagcctaggagcaattggctatgcaatatagtctaggtatagtagactataccatctaggtttgtgtaagtatactctatgatgttcatccagggtcaaaaatcacctaacaatgcatttctcagaatatatctcccttcattaagtgatgcatgactgtacttgatgtgatgctacggtatttatttattttttatttatttgtttgttttgacatggaatctccctctgttgcccaggctggagtgcagtagcgcgatctcggctcactgcagcctccacctcctggtttcaagtgattctcctgcctcagcctcccaagtagctgggattacaggcacctgccaccacacccagctaatttttgtatttttgtagagacaggctttctccatgttggccagactggtcttgaactcatgacctcaggtgatctgcccgcctccacctctcaaagtgttggaattacaggcgtgagccactgcacccagccagtatttatatttatatttatatttgtatatgtgtgtgtgtgtgtatatacatatgtataatctgaactatacttgtttgtagtcaaataagaaacactagaatgtaaatcaacatactacttccttcattgagaaagtcttggagaaaaaaagtcaatgaaagagttgatgtatatcctggtacaaggtacaaactccttatctcattgcagacaagtttgttttttttttttttttttttttttgagatggagtctcactctgtcacccaggctgcagtgcagtggtgccatctcggctcactgcaacctctgcctcccaagttcaagcaatcctcctgcctcagcctcctgagtagctgggacaagtgtagagaatatttaatttaaattaaatatttaatttaaatgctagctttacatagtaaatgtatcccttaaaatttgagtcaagttgaaacatataatttttttttatagaaaaagaattccacaatttgtaaaagaaacctggatttgaatctttttctgtaagaaaaagtcttaactattgatttgagtttgcctgaggaacccatttagtgtgttgtataaattgctatttaaattttgtcctaatattttttaggtttccccgaagtgatatgttgcttagaataaacaaagttgtatatactactggtggaaatacaaatttggtataacctttccaggatacaatctggtgatcatatctgaaaaaccttgatgaatatacataccctttgtcaccattttacttgcaatacttaataaactttccccatgttgttaaatgagattaaacaagggaatgttattaaatactctaaacaagacacttaacattcccttgttaatcccatttaactacaagggatggctgagtggggtggctcactcctgtaatcccagcacttagggaggccgaggtgggcggatcacttgaggtcaggagttcgacaccagcctggccaacatggtgaaacccccatctctactaaaaatacaaaaattagctgagcatggtggcgggcgcctgttgtcccagctactcaggaggctgaggcaggaggattgcttgaacctgggaggcagaggttgcagtgagccgagatggcaccactgcactccagcctggatgacagaacgagactccatctcgaaaaaaaaaagaaaaaggacaaaaacaacatggtaaacattttattatgtattataaataaaaaagatggctacaagatgatattacaactgatgaaattgtattgaaaaaaggttgtacagccgggcatggtggctcacgcctgtaatctcaccactttgggaggctaaggcaggcagatcacttgaggtcaggagttcgagaccagcctgaacaacatggtgaaacccggtctctattaaaaatacaaaattagccgggtgtggtggtacatgcctgtaattccaggtactcaggatgctgagacaggagaattgcttgaacccgggaggcagaggttgcagtgagccgagatcgcgccattgcactccagcctgggcaacaagagtgaaactctgtctcaaaaaaaaagaaagttgtacatacgaataggaaaaacaagaacatttttaaagtgaatcaaagtttgatctggaatgttgggactgcaggttttttcttgtgcttgtggtattcttcacagtttttctgcatcaaatatgtattcattttgtagctgaaaaccccattttaaaagggagtggggatacattgagcctgtcaaagtatttataaaagtgtcaaaagattatttcatctgtagtatagtttctttgtatgtccccagaggacaaaattatacaattataaaatgatttctatatctgtccatacagaacaaagaaaaaaatgtatcttaattttttccagtatttatattcatcttaatgtagtgttctgcttacaaatgagaacttcctatcataagaatatctgaaacaaactctttggagatcagggaatattttgaggtatccaatgtcctgtgtctgtaattataggatacaagagataacacctggctctccaaatgaggctttcttgtctatacccaaacataatatagttaaatgttctatgaatttattcatagcagataatcaggcataacattggacatttaaaaaataaacttctggttcagtatttgtctaaatattaattttttgaatttttttttagggaagatggctttatgctttattggcttgtcttgaaaagcctttgttacctgaggctcattcactgattcggcagcttgcaagaaggtgctctgaagtgaggctcttagtggtaagttgcaacttactgtttaaaattaaaagcacccaccaatttatatggtggtaaagaaggagttcagtgaaataggaaaacacatggaatattttattggtggcaattagatttgtaaagcccaaaataatagtagcttaaataatatggaaatgttttctgagataaagaagtctgagccgggcgtggtggctcacacctataatcccagcactttgggaggctgaggcgggtggctcacctgaggtcaggagtttgagaccaacctggcccacatggtgaaaccccgtctctactaaaaatacaaaatttagctgggtgtggtggtgggtgcttgtcatcccagctactcaggaggctgaggcaggagaatcgttcgaacccaggaggcggaggttgcagtgagctgagattgcaccactgcactcctgcctgggcaacagagcaagactctgtctcaaaaaagaagtaggtaaaaaaattagatttttactaagatggcagtaacccacccacacctttgagttttgtcatatgtggctttcatcctcatgctcatcttatgatccaagatggctgctgtagcttcagccttttttttttttttttttttttcttttattgtgagatggagtctcgctctgtcaccgaggctggagtgcaatggtgcggtctcggctcactgcaacctccgcttcccaggttcaagcaattctcctgccttagcctccagagtagctgagattacaggtgcccgccaccatgcctggctaatttttgtatttttagtagagacagggtttcaccatgttggccagactggtctcaaactgctgacttcaagtgatccacctgcctcagcctcccaaagtgctgggattacaggcatgagctactgcacctggtgtgtgtgtgtgtgtgtgtgtgtgtatatatatgtgtgtgtgtgtgtgtgtatatatatatatctttatatatatatctttatataattcagtaatgaatatatataagaacagtaagaatcctgtgtcttgactgtacagtgattaatatatattatatatattcatatatattctatatatatcctcacatatattgtatgcattatatagaggaacaataagaatcctgtgtcttgactacagtgataaatatatttattcatatatgtatattaatatatatttattatatatgaatacatattcactacagttaagacacatatataatatatatgaatatatatatatatattcatcactgtacagttaagacacaggattcttattgttcctttagtaggaaccagggaaaaatttcccccaagttatcccccttagatccctctttatttttttttccctattcagaatctttatttaaaagatagtcttagatgtttctcaaggaatcattaactctacagttctctgctttttctttgagggctcctatttccacatgatgattactgtcatataataaagttttcatgtttcgtgttttacatcttaatagaaaatttatttcaaaagtaataggaacagacaatatttaaatttttctttttttttttttaggatagcaaagatgatgagagggttcctgctttgaatttattaatctgcttggttagcaggtatagttaatccttggcttctttattatttatcagtgaggtcagtgaggttagatcgtatttattacatttggtttttgtttggttggtttttttttgagtctcactctgttgctatagttagggtgcagtggcgcaatcacagctcactagagctttaacttcctgggctccagcaatcctcccacctcagcctcctgagtagctaggaccacaaccaagcaccaccacacctggctaattaaaaaaaattgttcgtagagacagggtctcactatgttgcccaggctggtctcaaaactcctgggctcaagcgatcctcccacctaagcctccgaaagtgcagggattacaggtgtaaagccactgcattcagcctgcatttttgtttaattgcctgtgtcctgcgttcattttcagttgtggcatatttttatttagtatctgttttatttcatttcttacatagaaattcttcttggaatttatttgaaaactttttttgttgttttgttttgagacagagtctcgctctgttgcccaggctggagtgcaatggcaccatctcggctcactacaaccttcacctcctgggttcaagcaattctcccccctcagcctcccaagtagctgggcttacaggcacctgccatcatgcccggctaatttttgtaattttgtggagacggagtttcaccattattggccaggcagtaaaacacacatatttattttaggtctcctcctggacatatttttgttccatagatcagtgtttttatttcattgccagtacctttttaaagctttataatatacttaaatattgggaaggcaagtaatcttgtttccatattttcacatattcaatatctagtttcttgatctacaataattatgctgctgatgataattaacatttactgggcaatttgtgccaagcatttttcttagtgaggaacccatttaatccttctaaggtgggtactgttaacagtttacagatgaggaaaccatggcagagagaggttaaataatattactaccatcacaaagctagtaagtgttagagtaatgatccaaacccaggcaactttgactccggagctaaacttttaactatgctgatcaaaaattaagctaatacctacctcatctgttggtagtagcagttaaatgagatgatatagcattgccctacttactttatgtatagtatctctactctttacaatagatcagagttgtgtttttgtttttgtttttgttttaataaattttttcctttcagctctgttggacttgatttttttccttttacagataatgacacagattcagaaaggttaagtaattggtagctcagcaaaccagtaattaatgaaacctcagacaagtatagtttctgactgcctcagttgagattttacagtattatgcaattatgaaagcaaaaacattcaagtgtattttttgccctcaaaaagttagataaaaatggaaaaagttctagactacaaaaggttctgaagctaacagctttacaatagaagacacaaagatttgaaagtttaggaaaaaaaggaccgggcatggtggctcatacctgtaatcccaccactttgggaggccaaggcgggtggatcaccttaagtcaggagttcaagactagcctggccaacatggtgaaacctcgcctctactaaaaataggaaaattagccgggcacggtggttcacgcctgtaatcccagctactcgggatggtgaggcaggagaatcacttgaacctgggaggtggaggttgcagtgagctgagatcgtgccattgcactccagcctgggcaacaagaacgaaactccatctcaaaaaaaaaagaaaaaagaaaaaaaaaaggaaagctgggcacagtgactcacacctgtaagcccagtgctttgggaggtcaaggtgggaggattgcttgagtccaggggttcaagaatgcagtgagccatgacaaaatctgattagtgattttcctttttatttaatcttataattacataaaatagttaccttgccaaagttaaaattataattcaaggtacatttggagtattttagcatccatctttatcctcattatcctcttttttcctttctcctctagttaaccattgtattactaatttttgtttcatcttttcattcattgtttctttttaaaagtataagtaggccgcatgtggtggctcaagcctgtaattccagcacttcgagagactgaggctggagaattgtttgagcccaggagttcaagaccagtctgggaaatgagccatgatcatgccactgcactccagcctgggtgacagagtgagaccttgtctcaaaaaggaaaagaaaaatataaacaaacacgtatattggcagtcctacacatactcacataaggtagcatacagaacaatctgttctgtacttcgttttttttcacttaataaatcctggaaatcatactttagcagtataaatacgttcctcatactttagcagtataaatatttccctcatttctctttttatggcttcataattttccactatgtagacatactatagcttatttaaccagtttcttattgatggacgtttgggttgcttatggtctttggctattaaaaatagtgctacagttaatatctttatacataaattttttgttttttttttactaggtattttgaccaacgtgatttagctgatgagccatcttgatgtagctgatctctcagggatagaagatatttctcatgaaggcagcctaactctgaggaaaacaatgccaattcaagtacagatttcaacacatcttcaacactatgtgaagggttcacatcttaacctgtgcaattcagattgatactcagaatatgggttgatttgaatatctgaaatatcaatggaaaatcccactcagtttttgatgaacagtttgaacagttttctgtaatcaagcagcttgcatagaaattgtatgatgaaattttacataggttcttggtgctgttttgttctttttttgttttttgttgttttgttatttacttatatacatataaaattttattgaaaatatgttttggttactaaaattttgtttgactcctaacaaaagacaatggatggccttagcatcagaattaaaataatctggattaaatggcaatgtgttcatagtcagcaataaaattaaacatttttccctttaagctcagcactttttttttttttttttttttttctttgagatggagtctcgctctgtcatccaggctggagtgcagtggcaggatctcagctcactgcaacctctgcctcccaggttcaagtgattctcct

SEQ ID NO: 6877 - DNA, 502 bp, Homo sapiens
gtcacttataacttacctatttctgtatcaggtaggaatgttttctgctttaagtaacacaaaagatccaagtggcaatggttcttcaaataggggtttttctcagataacaagaagtctaaaggagctggccactggcattggtttagtgactcagtgatatcaggggctcagattcctttagcctttctgtcatggaaacaagatggccattgcagttcaagccaatgtgtctgtattcaagacaaaaagaaggggaagcagggccttccacatctgatccttttctcataaatgtaaaatcttttctagaaatttagatcagacttgtgttcatctgctagccataaatgtacaacatgatcaccccttgttcccaggaaagtgggaaaatgaagctgtacgcctttccagtctcactaatggaaggtgggaaaggaaaatggggattgggaattaccatggatcagacaaccaacagttttgccaccagttataatta

SEQ ID NO: 6878 - DNA, 309 bp, Homo sapiens
gccgggcgcggtggctcatgcctgtaatcccagcactttgggaggccgaggcgggtggatcacgaggtcaggagatcgacatcatcctggctaacaaggtgaaaccccgtctctactaaaaatacaataaattagccgggcgtggtggcgagtgcctgtagtcccggcggctactcgggagcctgaggcaggagaatggcgtgaacccgggaggcggagcttgcagtgagccgagattgcgccactgcactccagactgggcgacagagcgagactccgtctcaaaaaaaaaaaaaaaaaaattcagtt

SEQ ID NO: 6879 - DNA, 16982 bp, Homo sapiens
ggggcagctgggctccagagtccctcgggtctcaggtcatggcggtcgcggggcccgcgcccggagctggcgccaggtaagcagggcggtcggggaggaggtttgggagcaggagttccgggctgtagggaatgggctttcctgccctccgtgcctcgtccgccgccctggcgcccccgtctcgcccccgtgacttctgagagaaagaggagctctcgaaggggcgtccgccctcccgccgctctaggccgctccgcaccggccgcggccccctccgttcttggccggacttgtgccatctcctgcggtgtgggaccctcaccctcgcaactggcattctttttttgaaaagaagaacctcaggtgcacaaaattgagttgatccttctcagttcttgacaccctgtgggccaatgcaaggctccttgtttattttatcacttcctctcttcgttcctattcccagacccctttcactccccttttcagacagccactctggtgtgttatataagtggctttacggtccaccttgggtaaatttgtgcaagtgttactttgaaatctatatagcggtttcgaattcttcaatataatatgctgtgatttttctttaaacctttttcctcaacattgtgtttttgagtccatccatgctagtcatcttgttttcacttctgagtgcttgcatgaggggtgctgtgtgcatagacttattcccctagtggtggatagatttttttctagtattaacacccccacaagccacactgtaacgaatattctggcagttgtctccttgtgcatattgttgcatttctctgggtatccaccccagagttgggtcctggtcatatctaattttgctggattgttctttggaatggtcacactagtttatacttcccgacgggcagtgcataaagcttcctgtttcccggtatccctccatcgttcagtggcggctggttttgtaatgtttatcagtctggggggtgtaaggtggtatcccatcgtgtacattttctttctttctttctttctttcttttgagacggagttttgctcttgttgctcgggcaggaatgcagtggcatgatctcggctcactgcaacctccgcctcgggttcaagcgattcttctgcctcagcctcctgagtagctgggattacagacgcgcgccaccacacccagctaattttttgtatttttagcaaagatgggggggttggccagtctggtcttgaactcctgacctcaggtgatccacccgcctcggcctcccgaagtgcagggattacacttcccgacgggcagtgcataaaggaattacagacgtgagccactgctcccggcctacattttcatgtgtttattaaacgtgggttttcccttttttgaattgcctgtttatatcccttcccacttctctgtggatttcctatgttcctggcttgcaggaattcttgtaggctctagatttagatcctggccatgcccggtggctcacacctgtcatcctatcactttgggaggctgaggtaggtggaccactggagtccaggagttcaagatcagcctgggcaacatggtgaaaccccatctctaccaaaaatacaaaaattagctgagcgtgttgacgcacgcccgtactcccagccactaaaaaggctgaggtgggacagtcgcttgaacccgggaggcagaggttgccctgagctgagatcgcaccactgcattccagcctgggcaacagagcaagaccttgtctcaaaaaaaaaaaaaaaaagattttaggccaggcgcggtggctcacgcctgtaatcccagcactttgggaggccgaggcaggtggatcaccggaggtcaggagttcgagaccagcctgaccaatatgatgaaaccccgtctcctactaaaaatacaaaaattagccgggcgtggtggcatgcacctgtaattgcagcttgtcaggaggctgacacaggagaatcacttgaaccagggaggcggaggttgcagtgatccgagattgcgccgttgcattccagcctgggcaacgagcaaaactccgtctcaaaaaaataaagatttcaagtccttgttggttttgcactctgcagataccacctccaagtcttctaacttaatctatggcactgtgttgaataaaaacatttaactctaatgaagttaaattcatcagttttcccctgtataggtttttaaggtatcttcattaagacatttttctacatttccttctattaacatgatagtgttacttttcacgtttagatttttaatccatttgtaattttttaagttttttgtttttggttttttttttttttttgagacggagttttgctcttgttgcccaggctcttgttgcaatggcgcaatctcagctcactgcaacctctgcctcccaggtccaagcaattctcctgactcagcctcccgagtagctgggattacaggcatgagccaccacgcttggccaaagaatttcctttgtatccgtggtctgttcccagcctaccatcttcagcatttgaaaaccattctttctgcatggcctggaccctctacagaacaatgtggatgagcttaataactactccctaaggcttaattattgtcttgggcttttctctgcctccccaccttctcttcaggcccaggttagatctgcaatttctccagcggttcctgcagatactgaaggttttgtttccttcttggtcatcacaaaatgccttgatgttcctgacccttttgtgcctgaccctactgggtgagtgagtgagcccagactagaggagggaggggagctctggtttggggtccctttccatcttttttttttttttttttttttttgagacagagtttctctcttgttgcccaggctggagtgcagtgacataatctcagctcactgcaacctctgcctccctggttcaagtgattctcctgccttcgcctcctgagtagctgggattacaagcacccaccaccacgcccgactaaactttgtatttttcagtaaagacagggtttcaccatcttggccaggctgatctcgaactcatgacctcaggtgatacacccgcctcagcctcccaaagtgctgggattacaggcgtgagccaccgcgcccggccccttttcatctctttggggtgctgatgaggcagggactcaggaagaagcctcccttctttttaacccctcatcactgatttcttactcctctccctcctttcagagcaatttgtgatctaccaggttggcttgatccccagtcagtactatggggtcctgggaaacaaagacttggaagggtttaagactctgacattcctggctgtcatgctcattgttctgaactccacggtaagatctttccctctctctgtgtctctcgtcctctccagtccagtgtgaccgtaatgcctagtggaacttagcctccaggaagcaggaagcaagctgtgggggtgtgtttcctcccttttctgggaactaaagggatagttgcctttattaagcacgttgatcttgctattggcccacgtgggactgattcctcagatgtttccactcctgggcccaggccacaggttctggtttaattcagcatttagcagaactgatcattgcccctttccttcctagaactcttatttccggcagctcattaaaacggctcagcagccagagctgctgctcctcctctgcgggaccgaggctgtgactcaccctggcaccatgtcacacctcccagcctttgaacagtgctttcttgcagaatggcctcctcccctacccctcattcagtaggggggctaccacctgctcactcttcgtcatccctccgttgtcacctctttcaagtctttctcagctttctcctttgtgtctcctccaccaaactctgccctttttctgtacttaacgaattccttgagtttacctcgctgtaacactcctcacacgcttgtaattgttttctggctaaactgtgagctcataatgtccctagtgcttagcacataggtgccctggaaatggtaaatgatgagactcagggctgtaccagaactcaagcctaatgctgtctgccaggctgtgccacctgttttcttggggaagccactgctcatcgtaccatggccacttttgttgggtcttcggtcagtaagcacctatgcatacaaatctctgtcccaagcttgggggacaaaggagtaagaacataaatggaatcgacaatatggtctccaatcttcagaagctcatctactctcaaaataagacagtgtagaaagagggtcttgcctctggtaagccctttaatatttggtgaaggaggctgggtacagtggctcacgcctgtaatcccagcactttgagaggccgaggcgggcggatcacctgaggtcgggagttccagaccagcctgaccaagatggagaaaccccgtctctactaaaaatacaaaattagctgggcgtggtggtgcatgcctgtaatcccagctactcgggaggctgaggcaggagaatcgcttgaaactgggaggcggaggttgtggtgagccaagatcgcgccattgcactccagcctgggcaacaagagtaaaactccatctcagagaaaaaaaatttggtgaaggaatgaacacgtgagtgagtgaggaagggaaagtcccatgactcgatgatttaaaaaagaaaagtgctgagtggacggagtaatcagagtcagagtgggctgggatgggtcagcggaggctcttgcgagccttgagctttgagctgagattttcaggaagccatctctcccttccccttgcttcccccactgcacagctgaagagctttgatcagttcacctgcaacctgctgtatgtgagctggaggaaggacctcactgagcaccttcaccgcctctacttccggggccgtgcgtactacaccctcaacgtgctgcgggatgacatcgataacccgtaggcgccccaactcagtcctttctacactctgtgtggtcctttccttctggcctagccctggagactgctggtggcagacaccaaggagatcatctgcagtcgttttcaaatgctgctgcccagagtcatgggggagggtgccctgcagaggactcctggagaagctgcagggctgtgaataggcagctaaaaagaagaagcctgccaggtgcagtggcatgcacctgtagtcccaacaactcaggaggctgaggcaggaggatcacttgagcccaggagtagtgcaccgtgagcacacttgggaatagccactgtactctagcctgggcaacatagcagaaacccccatctcttaaaaaaaagaaaaatgttaggagcagctttcttttgtccttttcatactttatatcttagtcttccagtaagaagactaaggggtttctttagagggttctaaagaaaatgtccttgctagaaaaaccagctcttagattttcatcagtaaaaaaaattaccactatccaggactcagtctaggattcacatctccattctatcaccactcaggttataactcttaaagtcaccaagccccaggttccccttctgtaaaatgaggacaataatagttcctatctcaaagggtgtagtgaggatgaaatatcattcatgtaatgcacatgtacagtgcttgacacatagcaagtgtttcagtgtaagttagctattgttattttacagatgaggaagctgaagcccagagattgcaagtgacttgcccaaggtcacgtcactcattgggaataggaatcagtatggccctagtggtgagatgagacatagggggtctccttcacacccatcccctcactcaccaccttcctagcaagcactttgttggttggggtacctctcagctcaagcttagctttggtgcaaagatgcgtgggaggctgctgctgctgcctaacttctaggcctctttctgatggctatggcttccatcctgcctctgccccctgagtagctgggactacaggtgtgcctcacagcctggagctttcacagccagataactaaaggggccaggctagggcttatataagagaaatttgggaggattgagataaaggggatagtcttcttgatcatccaaaacagctcatctaccttcaagtttttctttggctctgctcagagctggctcaggcccctgggtactggacctttcagttcccactttttcaggggattaactaaggcaccgtaagatgcaactctctagaaccctgtttaaaggccctgggatttagttgcccctaggaaaccagccttgtctggttccctcttcccatagggtcagtgttcacagcactgtgaggcaaggtcaagagcagaggtgatgtgaaagtttcttgttctctctacctttgggcccatctccctgggtccagctactctgtgtcattggctccagggaccagcgcatcagccaggacgtggagcgattctgccggcagctcagcagcatggccagcaagctcatcatctccccgttcaccctcgtctactacacttaccagtgcttccaaaggtgaagcctccctcctccccagcctggtgtttccccagagggccctcagtcagctctcccaggtcaaggtccaagagaagcttatttcccctctctcccaccgtaccttaccacgtgctcacccatcccacgtgctcaggcccctgcccttcctttggccctgtgttgcagtgtcacagatatcctggctctgagagctcataccagatgcccccacataggagcagagggcccattgggccactcagattggacaggggctacctgagagggaacaggagtcagggctgaggcatgtggggataggtggcaccccacaccctctcccttctctccctctctctctatttcagcacaggctggctcgggcctgtgagcatcttcgggtatttcatcctggggaccgtggtgaacaaaactttgatgggccccattgtgatgaagctggtgcatcaggagaagctggagggagattttaggtgtgtctccctcacttgaggtttctgggctggggcataatagttaaggaaggggatctggagtaaaactgcctaagttcaaatcctagctgtgccagttactagctgtgtgatcttggagaggtctttaacctctccaagcttcaatgttcttgtctctaaagtggaaatggtaccgttgcctactgagaggattaggaggattaatgaaatcatacctgagaaggtctgagaaccgtgtctgcctggccatcaccatcgtcattgtcatctcttggccttctcactgccctggcataaccgccctgtcttggatcagttgggtgtggcagccaatggatccagtgcctgccctgtgcttcttgtccccctcctttgggccaggccctgggaggaggagatgctgtgagcaggaatacccctgtcctctctgcagaaagctgaggggcagccctgtctctgcagagctcctgccacaccacctagccctggggttttctaccccataacagtccaggaaagggtcagactgaggcagccacggttttgaggcagagccgggctccgcttgggcggtctttgtgatccaggactccaacaagagtgaggccagtactccctgttgtcagcacacatttccctttggtccgcccaggttcaagcacatgcagattcgggtgaatgcggagcctgctgctttctacaggtgagtctggagagatggttccccttctgccttgccagagctgagagtggagaaggaaagatgaatcctcaaccctcccaccaccaccgagctcaggggctgagtgttgtcacacttggctgtgaccctctccctctacctccccctgcccttgcctgcctcatccttaggtccaggggtttgcttctgaagctggtggttccttactgtggccagctttagtcttagtggcctagcgtggggcctgaaattgtcaaatgaatgaatgcctcatcctcttgctggtgactgtaagacatccgtctgcctctgctcttctgtctgttaagaagctttcttgccagtgcctgaggttcaagcctgatcctttgtctccgtagcgtgggatggaatgggagcttctcagaaaaccaggagacctgctccccacaatgctgtctaatggagccaagcgtctggtctcctgacggcagcagcaggagcagcagcagcggcatgaaatcccatcccttccctccagggccagaaccggtccctgtgctctgccttatgtgaggcctctgaaatcagcgttaggattgatagtgcaggcagaggtttgcgtttaagaagtggaagctactccttggctctgtacttggggtggatgtgatagccctgggacctttgctcctcagtctctgctgcagtttgcaacctccaccacttgagggcaccaagaatactgggaatctgcgctggggtggggttgtgaggtgggcagggctgggtgtgtaaaaaagttgcttttggaggccgggcatggtggctcatgcctgtaatcccagcactttgggaggccgaggcgggtggattgcctgaggtcaagagttcgagaccagccatggccaacatggtgaaaccctgtctctactaaaaatacaaaaaattagctgagcatggtggcgggcacctgtaatcccagctactggggaggctgaggcaggagaatcacttgaatccgggaggcagaggttgcagtaaggcaagatcctgccattgcactccagcctgggtgacagagcaagactccgtctcaaaaaaaaaaaaagaaaaaagttgcttttggattctgcagcctctgctcatgaagctctggggaaggcaggttagtttgtagagtttcagatgagttcttctgtggcctctgtgcaaaatctgaaatctccctccaccttttctgcctagcgaatttcttcccatccttgaaaccccagatcacctcctctggagagccttcccagactcccttaatggctaagcctatctgctgccatggccctgagggcacacttagtactcctgattccaagtgaagaatgcagtgtgcctgcctgccctctggactgagagctcctcaaagacagagataattttctcatttctttattgcactagctaactagtgcaatgcctggtacacctagtgaccgctctgtgtatgtttatttaacaatagtttttatttattgagggctccttatgtgcttggcactttatatttagaaacttttaattctaactctaacctattacataggtattattggctccattttatagattaaaaaaactgaggcttggaggcttaagtagcctgcctgtgtcacgcagctagtaactggccagagccaggatttgaactaggtctgcccaactctagagtttatgttcttcacacagacaataccattaaggcatgactgaagccgtgaatgggcgctaccagtagacagatcctgagaccaagatcatttgaatggccttggtttctaaaggagggtgtgatatgggacaggcggccccccaacctggctgaacctctccagccctgtggacatcccagcctttccttgtcagagctgggcatgtggagcacatgaggacagaccgcaggctgcagagactccttcagacccagagggagctgatgtccaaggagctctggctgtacagtaggcgagggggcccagggaagtgggaaccatggggttggactggtctgcttcccttcccacacctctctacctcctgtctgcaaggataaatgtgccatgatgaaggaattaaccggggatgaggagggggggctgttgcctttctgtgagtatcctcaggagaatgaggatccagagagtccacgtggccctacttggcgtcctgctccctgtcttagggttgtgtccgctgtagggcatgtggatggttcctgggtgtctcacagatgtgttttctacagtcggcatcaacacctttgactatctgggcagcatcctgagttacgttgtcatcgcaatccccattttcagcggggtctatggagacctgagtcccgcagagcttagcaccctggtcagcaaggtgagactccctcttggtcaccccacatgctgtccctctctgtccttggcccagtgtctgtgggctcgagtcgagacctgcttgacctcttcccatcctgtccagaatgcctttgtgtgcatctacctcatcagctgcttcacccagctcatcgacctgtccacgacgctctcagatgtggctggctacacgcacaggtgaggccgtgtcccacccctctggctcctgagcaaagtgtgtgctgctggcagaagtggctgagtgaaaaaaggaacagagacataccatgtactcgtgggtgtgagataggaaaaggagttcaccttcacctggctcccagaccctgcctcagattttcttttcttgttcagaattgggcagcttcgggagacgcttctggacatgtccctgaagtcacaggactgcgagatcctgggcgagagcgagtggggcttggacacgtgagtagcgggctggcagagcagtagttgaggctgcaggctgtggcatcacctggcttgggttaccctggagtcctgccctttcccagctgggcagcagagttgtaaggagtaaatggaaatggaatgccaggcacatgtaagttcacagtcgatgttgctgttccggcatctgttgtgttaatttacaccattccccggccagtggaagcaaagtacacacaccttctgcctgagataacaggaatctgcagtgtcctccccttcctgtgcttcctcctcccgctgattcctctccctgcccctttccttggggcatgtctgtctttgttcccccacctcactcagccccagagatgtctgtatccgtgtgtctgcgtggatctgtaatatttctgtgcattcaggatttgcttgatctccacactttccttgggcagattacctaactgttctgtttcttcatgtctgaaaaggaggtcataatgaacttccttcacttgttgtagggattagatatcatcatccatggaaagtgcttggacagtggccacatcataagctttcaaaaatcagtctgaattccagggcctacactcaacttgcttttcttaggagctaataccttaactgttgcttctgttccaaatgaaagcttcatgcaaccatgagtgcagaggctgggcatgaaggagggtctgtaggaaactggaattgctgttctgtggggagccaggcatccatgcagaggcagaaactccagaaccatttagctttaaccactcccattcttgttattagtactctggtcacactgtgatgccatgaagacccaccagcattagaatttgttgaataccgctctgcaacctgggcagttacttagccacctgattcttagtgtcctcatctgtgatgatatttgagactcatgggcattagactgagtaagatcagtcccataaggggctttgtccagccaggcagagagtagaagttccacccctacccctgtattaatgtgctcaggctgccatgacagaaaaccacaaaccggctggcttaaacaatagaaattaatttcctcacaattctggatgcttatggtccacgatcaagttgtcagcagggttggtttcttaggccactccttggcttgtagatggccaccttgttgctgtgtcctcacgtggcctttcctttatatgtgcgtgcccctgccacctctatcttaagaggacaccagtcatattggattagggtcccaccccaacaacttcatgttaacatcatctctttaaagaccctgcctccagctgggcacggaagctcacgtctataatcccaccactttgggaggctgaggtgggcagatcacctgaggtcacaagttcgagaccagactggccaacatagtgaaaccctgtctctactaaaaatatgggcacggtggtgggcacctgtaatccagctactcaggaggctgggacaggaaaatcgcttgaacccaggaggcggaggttgcagtgagctgagatagctccactgcactcaagcctgggtgacagcaagactttctctcaaaaaaaaaaaaaaaaaaaaagaccctgcctccgaatgcagttacattctgagtcactagggggctggacttcagcatgtgattttgggaggatgcaagtcagcccataataatccacaggtggtggctcccgggagcagtgcctcccccacagcaatactgaccctgcccatcttcctcacgccccctctcttctctgacacagacccccagggtggccagcggcagagccagcagacacagcatttctccttgagcgggtctccatctctgccccctcctctgacaaacccctaatcaaggatctgagcctaaagatctccgagggacagagcctgctcatcacaggcaacacgggcactggcaagacctccttgctccgggttctgggtggcctctggacgagtacacggggtgagagccaggccctccctgcctctgacccagcctgggccctaggggtggggtgaaggcggggacggtgtggtagaatccattcttttctgttggggaacaaggaagagaggagacaggcagttgcctcttctgggagatctcacaatggaggtttctgtgggctctgcaggctcagtgcagatgctgacggactttgggccccatggggtgctattcctgccacaaaagccattcttcactgacgggacccttcgggagcaggtcagtctagttcagggggctcactcctccctcctcaaccccgcccacccacagctgggacctctggcactgtgacaagtctcaggtcctagagtcagggcaaaaggtgaggtggtgaagtggcccgggcctgggaactgctggctctaagaaccttctattcacatccatggattgggcccactactcatagcagctcctgaggcaggtaaatggggcaaggactcacgccaaataccacacgcgtatgtcaaacacccaaggtcggattctggggcccctgccctcaggaggctgtcagactgttccccctaaacacacttctgaaggttgtagggaccttgccctgctgtctgccggccagagcctctcccatctgacccaggccaggcgttcccacctctcctccttgggaggttccagtgggttctggagggagggtgggctgtgtgcagctccgtcttttgctcgccctcctaggttggtgtggtttttttcttttctcaggtgatatatcccctgaaggaggtctaccccgactcaggtgagctggtcctccttaggtcatgtcctctccttctgtcatggttgtccctgctctacctgactgtggcctcatctgtgcccttggggagaggctccagccaggccgctgattcaaggaagaggggctcctctcctcttcctttgactgttttggggtctgtacccagatctcacctcattctttctgtccttaaggagagatgcccactgggacaaggaaagtgatgccttccttcacccaccccttcccttatgaagatctgcaacctgtggtttcaaagccttcgcccagcattctgaggcccccacccctgcatcatccatgatgtgccctgtctattctttttttttttttttttttttttttttgagatggagtttcactctgtcacccagactggagtgcagtggtgtgatctcggctcactgcaacctccacctcccgggttcaagcaattcccctgcctcagcctcttccgtagctggggctacaggtgcacgccaccttgcctgcctaatttttgtatatttagtagagacagcgtttcaccatgttggccagggtggtctccatctcctgaccttgtgatccacctgcctcggcctcccaaagtgttgggattacaggcgtgagccactgtgcacagccttgccctgtctattttgaccagccaggaggctctggctttttgcagaaggcttctttgttgtgcaggttctgccgatgatgagaggatcttgaggttcttggaattggcaggcctggtaagtggggagagggaccctcaggacccgagcccacctgggagcaccagctacaggtaggcaggtgctggccctgctatgcttgggcccaggactggaagtctgaacctggggtggagaatgggagtatcagttgacagtgtgtgctgttggccaggtttaggcacgaagggggtagtgctctcattggagaattttaaaacaagaataggattgatgaaggcggtttgctttttactgtcatcatgctccagcaagtctaaacagtgtcattggtagaatattcctctctgcctggggcagactgtcccacagtcccccgccttggtatgccactggggcatatatttgtcttagaggtgtgtgtgtatgctggggagtgagggaggttccccatgatggcaggtagcagggctggccatttcatggacatcctgccctctgggtctgttacagtccaacttggtggcaaggacagagggcctggaccagcaggtggactggaactggtaagaaaagagcttgggtgctccagagatagccccaccataaagacagtgggtttcagggtccctgtcaaggaatggaacggctcctgaccccaaagtccagatgtttggctggtcagtcgggtgcaagtttatgcccttgggaacagagttttgcctcactctgtgagggctgtaggcctatggtcgaaagggaaggggcttctgtctcctggggctcacctctgtgcagagaaacctcttcctacccagaccattctaggtaaaagccaagctatattcttcctcctctagcagtcctctctcctacctttcctcaggtatgatgttctgtccccgggggagatgcaacggctctcctttgcccgactcttctacctgcagccgaagtacgcaggtgaggtctcgccttgtggctgcacatgccatgcgctgtctgcactcacgggtgtagcagcatgtgttcacaggcacccaggcacacctgtgaatggctgggcttctccgcattccctgctggagaggacagcaggccctgcccgtgtaaacagtgcctggcatcgtcagagttaacactgaatatgcggtactgccagctcataagcttgcttttcttctgttttcttttttcttttctttttttttttttttttttgagacagtctcactctgtcacccaggctggggtacaggggcacagtcatggctcagtgcagcctggaactcccaggcttaagtgatcctcccacctcagcctcctgagtagctgggactacaagcatgtgccaccacaccctgctaatttttttatttttatttttgtagagacagggtcatgctatgttgcccaggctggtctggagttcctggactcaggccatcctcccacgttggcctcccaaagtgctgggattacaggcatgaaccactatgcctagctcataagctttttgcctggcagcagctggagccaggagccaacattgaagggttataattttatgctcctctggctccaccatcaaatgaatgggcacccatcctcctctcccaccaagctgtgcctggcaggtggatgggtgtggacttttccaaagactgacattcttgcgggggactgggattccctggattgagtggtcccagggagtggctggtgcttatctatagaagctgagagatttcatgcagctgctcacaggctattcccttggagagtctggccctctgctcctctggcccatccttctccctgaggcagggcttctggaagccagagcagctttcagcctcccctgggtcccagctggggttgagtatgggtgggaggagaagcagcggcggcagagggcagggctttgatctcttcctctgtgctctgccccctcagtgcttgatgaagccaccagtgccctgacagaggaagtggagagcgagctctatcgcatcggccagcagctggggatgacgttcatcagtgtgggacatcggcagagccttgagaaggtacccgtgctcacaaggatggcctgaggaggagaaagaacccaaaggctcagcctggccagggccagaggcccctcaaaacggggagtagcagtagcagagagaaccgagtggcctcctctgccagcggccagggcagcctgatctccatgtggtggtggtctcttgtagtttcattccttggttctgaaactctgtggaggaggaagatgggagctgatgagaatcaaagtggaatgaagctctggcttttggaaggagagccacactgtggcgggtcggcggccctcaggagagaccaggaggactgacagcgaagatcgagctcaggttcgccacatagatcccgtgcaggagccacatgggtcctgtgcaggacccctagcagtggtgggctgagcccaggtctaggtttctgtgggggacactgaatctcccagtgttcagtctcccaggactctgctgcctcagccagagcctccatatgcttgaagtgctgattacctacaaatgatttcagatcatgtttgctaaagagaaatctggaagtgtgagatctgtaagaaatgaaagaaatgactcttggagtcaagagatctggaaatcttttaatcagttaaattgtgcagcaatagatttttaactttaactgaccatttaagttttttaataagttttttacaaagaaaagttaaacattaaaaagaattacagctttctgtcttctctatc

SEQ ID NO: 6880 - DNA, 534 bp, Homo sapiens
cactaacttccaggggcctttggtctgccctaccttaacccaaatgaaagtaaatccctttccccttagccaaaataaggttgggttttctaaaaaaatagtctatattagggaacaacaacagcaaattagacaaaacccagaaagcacaaagcatgaggtggagttactgtgcccaaagtcctcactcagaccagtgcccctccagttcagttgtctatgtattaccttccttaccttcataatttttgccaggcttctgtacttctagtacttgagttacttaatatttttaaaaacaaaccttttaagtttaaatggatttttaagtgaaattttacacttaacatagatggaaagtaactaaaaataaatacaagaaaaaccatcggtgttattaacttacggctagatgctgttgcctgcatagactctgggcctgaggcttgttcattttgtaaaaaagagaggtgaggagttagacggactggcactcaactgagatttttctccttaataaaatcagaaagatgg

SEQ ID NO: 6881 - DNA, 5877 bp, Homo sapiens
ggaatttgggatttctattaatttgaaacaattagtgtcttaaaatattggagaatatggtatgtctctccatttatccacagatgtttaaattttcttagttttttcatataggatataatgtttgatttgttgtttatttccacttttatattaatctttttagctagcttggatttggaagtgaactactgaatctttttttctttttttataagcttttgttaggagtgataaacccaaactgttcagaggactgcaaatcaaggtaaggtgattgtagtggagatctcttttttccagccttaatttctttattttataattaaagtaaatatttgaataaatggtttcccccataaacatgtgcaaatattatgtatcaatttaaatttttaatttcactgaaaaataatttttttaaattaatagactttatttttttagagcacttttaggtttatgaaaatttgaatgcaaaggaaagagtattcccatatactccctggcccccacccccaccctcagttttcctgttgtaacatcttgcattggtgtggtacatttgttacaattgatgaatcaatattgatatattaattaaatttaatagttcgcattagcattcattctttgtgttgtataattataggagttttgccaaatgcataatattacatatctaccattacagtatcatacagaatagtttcactgccctaagaaatctccaatcctcacacgttcaggtcatttctctccctcttccccaccccctggcaaccactgatttgttgttgttgttgttgttgttgttgttgttgttgttgagacggagtcttgctctgttgcccaggctggagtgcagtggcaccatcttggttcactgcaacctctgcctcctgggttcaagcaattctcatgtctcagcttcctgagcagctttattacaggagcacgccaccatgcccagctagtttttttgtatttttagtagagatggggtttcgccacattggtcaggctggtctcaaactcctgacctcaagtgatccacctgccccagcctcccaaagtgctgggtaatattacaggtgtgagccactgcgcctggccaccactgatttttttattatctctataattttgccttttccagaatgttatatatttggaaccatacaatatgtagccttttcagattggcttcttattactgaatattactcgttattaccagttttgtcattcacctgtggaaggacatcttgattgcttccaatttggggcaattttgagtaaagctaatataaatatttttgtgtaatttctgtgtacacataagttttcaactcattgaggtaaataactgagtgcaattgctgggtcatacagttaagattgtttaactttgtaagaaactgcaaaactgtcttccaaagtgatgacatcatgttgcatttgccctagcagtgattaagaggtcctattgctccacatcctcaccagctttaggtattgttactgttttggattttagttgttctaataagtatgtgatgatatttcattgttattttaatttgcaattccctaatgatacatgatttgaatatcttttcatttgtttatttgccatctgtgtgtctttggtgagatgtctgttcagatcttttgccctctttttttaaattgtggtaaaaaatattaaatgtacaatcttaaccaattttaagtgtactacagtccagtattaagtattttcacattgttctgtaacagttctctataactttttcatcttgtgaaactgaaactctacgcccattaaacacttaattttatctttctgtgcccaccaccacccccgccctcctgccagcccgtgacaactacctgttttctgtttctatagttttgactacttcagatacttactatgagtggaatcatatagtatttgtccttgtgactgatttacttggatcagggttcatccatgttgtattgtgtgacaggatttccttcctttttaagaatgcatagtattccactacacacacacacacacacacacacacacacacacagagacacacacttttttttttttttttttttttttggacatggtcttactctgtcacccaggctggaaggcagtgatgtgatcacagctcactgcatcctcaccctctaaggctcaagcaatcccgccacctcagcctcccaagattctgagaccacaggtacacaccaacatgaccagctaattttttttatttttttatagagatagggtcttgctatgttgcctaagctggtcttgtattcctgggctcgggcgatcctcctgcctcagccttccaaagaacggggatttacaggcatgagccactgtgcccagctcccattttctttacccatgcatccatcagtggacatttgagttgcttccatcccttggctattgtaaataatgcttttatgacatttgggtgtgcaaatacctcttcaaggcccttttcttagttcttttgagtctatattccaagaagtggaattgctggatcatatggtaattctatttttaattttttgaggaacctctatactgttttccgtaatgacttcaccattttacagtcccaccaacagggcacaagtgttccaatatctctatatccttgtcaacacttgttattttctgttttttggtagtagccatcctaataggtatgaggtactgtctcactgtggctttgatttgcatttctcttaaaataaatggtgttgaacattttgttgaccatttgtttatcttctttagaacattgtttattcaagtcctttgcccattttataattgggatttttggttgttgttgttaagttgtggaggttccatctattctggatattaaacctttatcagatatatatgatttgcaaatattttctccccttctctgggttgtcttttcattctgttcattgtttcatttgatgcactgaagtttataagtttgagtggtcctgttactgtttttgtttttttgcctacttttaaattgaggttttttgtttgtttgtttgtttgtttgtttggtaagctgagctttaagagttctttgtatattttgaatacaagttctttatcagataggtgttttgcaactgattgtggcatataattccttatacacattgctggatttgactgctaatattttgttgaggatttttacaactatattatatctaatttcttatttccttttgggattataataagttttttaataaataaacatttttaaatattgggatctcaaatccaagcaaaaaagaaaaaaaaatccttaacttaagaagtaacctgaccggctgggtgcggtggctcccacctatgtaatcccagcactttgggaggcggaggtgggcagataacctgaggtcaggagttcgagaccaacctggccaacatggtgaaaccccatctctactaaaaatacaaaatgccgggtgtggtagcaggggcctgtaatcccagctactcgggaggctgaggcaggagaattgcttgaacccaggaggcagaggtggcagtgaaccgagatcacgccattgcactctagcctggacaacaagcgaaactccatcccaaaaaaaaaaaaaaagtaacctgaccaaaaatggttaagtagtaatgttattattgattcattagcctggatggcctattttctaaactccacaaatgggttgggaatataccaagtgttaataatcacatctgagctagtctccatctttggagttcacaaccccagaataccctagataaactgaagcataattctggaagaagttctaagaactctgtcatcactgccgaactacataactacattgttagttatccaatgctacttaatttaaaattggatatttgatctcttaatgaatggctgttgtcacatttacccagaattagaatttctcagagctctctggagaaatattggacccaactaatggatttgaagtttcaggaacccagcctaattctaaactgattacaaataaaatcattagatttgttaagccaagaaaaatgtatgatccagtatgtgattgattctgtgtctgcaaatttatatgcacagcgtattttaaaacattgctcttataccatcattttctcaactattttgaacttgtctgcctccattcaattttaagttcatttgagagtatcatgtgggcattacatacttgttaatttcaataataagctcaaatccccaataaactgtcttgctactaatagatatttttctctttaaaagtaaagtaatttcacttgcttctagtcccagggaggctgaggtgggaggatcacttgaaatcgggaggtggaggttgcagtgagctgagattgtgccactacactgcagcctgggtgacagagcaagaccctttctcatgaatgaatgaatgaatgaatgagtgatttttttaattctcctttttttccgaaatcctgtaaaactcttctccttaaagatttcctttaagacttgtttattgtcatgtctaaaagcctttttttaattactaaatttaaactggattgaattgctttgtcttagatgaggctgagaaggttgtttctgaacagaaagtaatgatgacgtccctcttttttgtagtatgtccgtggttcagaccctgtattaaagcttttggacgacaatgggaacattgctgaagaactgagcattctcaaatggaacacagacagtgtagaagaattcctgagtgaaaagttggaacgcatataaatcttgcttaaattttgtcctatccttttgttaccttatcaaatgaaatattacagcacctagaaaataatttagttttgcttgcttccattgatcagtcttttacttgaggcattaaatatctaattaaatcgtgaaatggcagtatagtccatgatatctaaggagttggcaagcttaacaaaacccattttttataaatgtccatcctcctgcatttgttgataccactaacaaaatgctttgtaacagacttgcggttaattatgcaaatgatagtttgtgataattggtccagttttacgaacaacagatttctaaattagagaggttaacaagacagatgattactatgcctcatgtgctgtgtgctctttgaaaggaatgacagcagactacaaagcaaataagatatactgagcctcaacagattgcctgctcctcagagtctctcctatttttgtattacccagctttctttttaatacaaatgttatttatagtttacaatgaatgcactgcataaaaactttgtagcttcattattgtaaaacatattcaagatcctacagtaagagtgaaacattcacaaagatttgcgttaatgaagactacacagaaaacctttctagggatttgtgtggatcagatacatacttggcaaatttttgagttttacattcttacagaaaagtccatttaaaagtgatcatttgtaagaccaaaatataaataaaaagtttcaaaaatctatctgaatttggaattcttctggtttgttctttcatgtttaaaaatgatgtttttcaatgcatttttttcatgtaagccctttttttagccaaaatgtaaaaatggctgtaatatttaaaacttataacatcttattgttggtaatagtgctttatatttgtctgattttatttttcaaagttttttcatttatgaacacattttcattggtatattatttaaggaatatctcttgatatagaatttttatattaaaaatgatttttctttgcttaac

SEQ ID NO: 6882 - DNA, 340 bp, Homo sapiens
atttatttcaaatgtttattgaccatttgtatatttgtacatattgctatacatagtgttttttcttaattatttgtaagagcccttttatatattagatgttagagataattttcttcagtttatcatttttatttttaatttgcttatggtggtgttttgctgtcctgatgtttccatttttacataggcgtatctataaaacatttccttttgggtcatgcttaggagtagatttttgtgttccatatttatgtaagttctctgtgctgtaggctttggtagtatttttaacctctcctttttagcagttatcatgactcattagttctgtgatttt

SEQ ID NO: 6883 - DNA, 16285 bp, Homo sapiens
gtcaatatttagggaagctttgtcatatttactaaatttcataatttcagaaaactgtttaaaacaaagagcaattgatggataaatcaggaatagattctcttgaccatgtgacatctgatgctgtggaacttgcaaatcgaaggtgagtggattcaatcatgtttattgtatctgaattatgagaaactattgtatataatgagtgacagtaaagataattttcaggaattgggaaagaaggaaaactagatttcactgaccttccaagtttatctagttacatagattgatataatagcattgcaaatactttaaattcaaaatgtgaatatattatgggacacattcgtcgagaaaaaatgtattctttgggtcatattagcatctcttccagactacatcctccggttcggtaggctgtgtttgttttactcagacactcttagcagtgaaccgaaccatacagccttttggagctcatacattgtcttgaaagatacagtttttttgtaagctgagcatagtggtgcatgccattagtcctagctagctacttgggaggctgaggcaggagcatccctggagtttccaggagtttgaggttgcagtgagctgtgattgcaccactgcactccagtctgggtgacagcaagacgatgtctacaaaactctttaataagagctgtagcattatgggctatttaaataggatgatcagtagaaaggctagctggttctgagcccatcctttaaaaaatttttaattctgggcatgttttctgagttggtcttggaagaaatgtacatttaggactgggtattaatggtaataagcagtaagaaaagaagatgaaattaatttttttcccatttttctagtgataactcttctgatagcagcttatttaaaactcagtgtatcccttactcacctaaaggggagaaaagaaaccccattcgaaaatttgttcgtacacctgaaagtgttcacgcaagtgattcatcaagtgactcatcttttgaaccaataccattgactataaaagctatttttgaaagattcaagaacaggaaaaagagatataaaaaaaagaaaaagaggaggtaccagccaacaggaagaccacggggaagaccagaaggaaggagaaatcctatatactcactaatagataagaagaaacaatttagaagcagaggatctggcttcccatttttagaatcagagaatgaaaaaaacgcaccttggagaaaaattttaacgtttgaggtgagtcagcattttacatacatggctacacataactcaagatgcccaaaatgatttgttggccaatttagaattgtctcagatatactgggaacagactgtctgcaattttgatactcttctatactgacttacccctaaagtccaccctatccttcaactgaatcttgacttgtatctcttaatataactacactttgccatatttaaaagatagtgctccaaggctctttgtataaaatcctttgatcttatcccatctcaggtctttaaacacaaccctaaaactcagtggggataataaaagctcacataacttgaaattacttttgcagtaacctaaactaaaaccacacatgccttatgttcagtggatatattcttaaggcctagatgtttctaagccaattatctgaaaaatacgctaatacttaggagtagacttttttaaatatttgagagttgtatgttgaatgaattcagaattaatttatgatcccttgccagaacctgaaattttatttgggaggattaatacatgttaatctcttcagttaatctcttaagtttaaggtgattatagtaaacattagaaatcttattcctgtttttacattttaaaatgcctttagtaagtcccagacatgacaagatatgtacttcacttttccatgttaccagcttaggtaaattcataattgtaatgtgaattttaataatcagcatttgataagtccacaagtggggagtagttaagatagcaaattcagagtctttgctaagggggggcattgccctttttgaacataggcacctgctgggtcttaaaaataaaatctcgacatacttatggtgtttttaatatatagcaagctgttgcaagaggattttttaactatattgaaaaactgaagtatgaacaccacctgaaagaatcattgaagcaaatgaatgttggtgaagatttagaaaatgaagattttgacagtcgtagatacaaatttttggatgatgatggatccatttctcctattgaggagtcaacgtaagtggaatcatatgaaatactttggtaataggttataaattaaatttctatgttaattgcttcatattttgcctttaatatagttatacttaaataatgaacaaagatacagagtatgacaattgggattattacagttgagccaagcttggcacaccgttcatctagaattctccagaacacaaaattctcaaattttgtgtttcctttgactagtattgcagtttcagttatatttcagagtggaatatacaactaattaggtcatcgaagattctgtcatctcgatgataaattttaatattacagagcagaggatgaggatgcaacacatcttgaagataacgaatgtgatatcaaattggcagtaagtgacttatttttttcctattccattttgggaaggcaggagttggttgatacagaaggaattatatttagtttttctcttacacttcatttaacttttgaaaagctctataagtttactgcaggaaatgcaagaaggaaaataattttttagagacttgataaagaacatggggttttcagtactatttttaataagtagcattctgatacatattattgctagttaggatgtcaaatgaaaaaataagcaatgttaatttggatttttaacatctacatgtagtctctaggttatctgaagtaatccagggcattcagctatatgtaattactaaactatttgagttattgcttaatccatgattttttgtttgttttatgcagggggatagtttcatagtaagttctgaattccctgtaagactgagtgtatacttagaagaagaggatattactgaagaagctgctttgtctaaaaagagagctacaaaagccaaaaatactggacagagaggcctgaaaatgtgacaggatcatgaatgtcaaaggtgaagcatatagaaaaaacgacttcatagaaatgaataaagataaatgtggatatatgtaccagtctggtggtgaagaaattctgaaacccagaactttataacaagaaaaaaaatttttaaccctgtgaagaagtttgtgaaagaaacttgtgaagtagtaataattagaaaaaaaaccattaaaacaccagagaaaatacatagaaaaatttgagaaattgtcatttgatttctgaataagagcttacaggtgtcctgtgagtattgaaacaatgaaatgtagtgattttaattttgaaaagaaaatcttaaagtaacttgacacccaaccatcttgaagaggggatttgaaatgctgtaattttatcccagctttgttcagccatgacaagtgacctgtcagatgcttagtattgtaataacctcatttccctttccaaatttagagtatctttaatactattttttttagacagagtctcgatctgtcacccaggctgtagtgcaatggccgcagtcttggcttactgcaacctccatctcccgggttcaagcgattctgcctcagcctccttagtagctgggattacaggcgttagccagcacacccagctagtttttgtttttttagtagagacaggctttcaccatggtctcgaactcctgacctcaggcgatccgcctgccttggcctcccaaaatgctgggattataggtgtgagccatggcacctggcctaatactacttttaactaccattttcactttttattagttcaagaaaaggcatacacatttattcaacatgtatacctggggagaaccagtcattaccccgatgttcattattttgatcaccacgatagagctgactactctgctatgtagtgcattttgggactgcacttatgtatgtttttgtttaacgtggacaaagacttacagataggtgcaaaaaataaatcctcttttgcaacccagaactcattgttcagtatgagttttgatacatataagaagggatattatgatacctgagacagttgattgatgggagtattgatagccataaaggttggttccaggccaggtgcaatgggtcaagcctgcaatccccacaccaaggtgggagtattgcttgaaaccaggagttcaagaccagcctaggcaagaaagtaagaaacacatctccacaaaaatttaaaaattagctgggtactggggcatgtgcctgtagttggagttactcagaaaggggggaggctgaggcagagttggaggctgcactgagctttgatggcaccactgtactccagcctgagtaacaaagacagaccctgtctcttaagaaaaaaaggttgattccaggcctgtagaatagataaacagcatgggatatgagggaaatcctcagcagtattaattttgcattccaatttcatgttgatgatatacacaatggctttttgttttaaaggcttttatcttgagaacatggtgtctggagttaaaggtatgtctcaatttgagttttcacatcatatttgtttatgtgtaggaaacagtatgttgtcagagcaagtttcattttattcagggacatttctaccatgcttttaattcccatttatactgatttctgaaaagaagaatcctagattcacacattttatagtgatgtgtcagattcattttagttgcaagcattagagggtcctgaatttgttagtttgtagcaataatcagaactttggatttcctacttgaagcctacagcattattttgaattaatgcacaatctaaaatgaggcagaggattttatggtttaatgcaaaatatagtataataaaagatgattacacaggtcataagaattcataaatttgaatgatgtagagtttgattaaaagttatataatgccaaagtcgtaacttacaggcacattatattcctgtattttataatggatgacaattaattttgagccaagaattaaaatttgctgaaatcttcgaattgggaaaacaacatcctctgttgcaatactgaagttcataacaacagttagactttaaacttaaatcttaagtttaaatctttttcctttggttcatgtaaaggagctacttgatgttactttttatttatcattcctctggctcctaagcacaacgtgattgtgaaattattgtttttgtgattaacgtagtaggaagtttctgcagttggcaatattgtaagagcatattgcagtttctgctcataatttctttcctatggagtgttagactttgttatttatgtgtataaatactagctggacacagtggtgcctgtggtccccagctactctggaggctaaggcaggagaaacacttgagcccagcggtttgaggctacagtgagatgtgatcctgccacatctcactgtagcctcgaacccctgggctcaagtgattcagcaagaatcacacgatttttaaaagacatggcagatcctgtgtctttaaaaaaaaatcaaaaccttgtaaatagtggttgaggtctatcccgatggggcttttcctgtagcctgcacatcgttggaaacgcctcatagagtaactctgtggttttactttactcacaggactattgttagatctgtgggaaggaattacaagacagttgctaaaagtttgaaaaagacggttgctaaacgttatgaaaaaccagataatctacttttttaccttaggtattggcatactccacacatctgtaccattcttgagtgatcgcttaggtaagttttaattggtgacagtataatcttttgggaaataatgattacagttcagatgatgaatttaactgttcaactgctgaatgataacgggcatgaactaaaacttaattctgacagagctggatatggctgtataataaactggatcttaaatttatacttgggttttagttttaataactggaaatgtatcctttctaaatctttaattggtactttctataggaatgaatgtgatttgaactcattcatgttgagaggtaagtaaaatatttaacttataataatcaaggactcaaaagatgaaaaatagaaattacaccatcccagtatttcaggtataacacagaattagtaagatactggcaaaaatattacaatgtatatatttgtatagagaaggaaaatgaagagactgcatgtctatacctaccaaacgaaactacctgtgttctttgcatcattattcaactggcagttacacatatttcatcctaaagtcacgtaaacctgtgtggatatgttgaatcaatagggatatgaattacataaaaagaattttgtgtaactggcagtttgagcaacaatgagcttgacgtttgttgtctgatctgttaagttacatgtatatattccatctttaagttttatagagagactgggcaaagattaggcaaagactagagttgtagcttaaaatgtagttaatgtagcttccttattacagtgacaattaggaaaaaagctcaaattattgtacttgttaaaggaatttgagaggtttgtgaaagcatttctcagcaatattgcaaatttgggaatacgagttgtacagttcagtcataattgcactgcatggtatctgcactcagcagtttacacctgctagggtgttcaaaggtcagtgctatagaaattcagtatctggcatcgttggttttcttggctttgtgcttgttaaacctggtatttctactgatacagtatttgtgtaggtttctcagagtgttcagtttgatatactctaaaatagtaagcaatgcttttttttccagggtgtcaaattgagaaccaggtagatccccaccacctacagtaaaaaggtaagattctctgtttctattgattctgcttgtttccctctatcagtagcactgccagcataacaagaacttcgtacaaatacactactaagctttaaagacttttacaatgcctcattctagagaatgggcactgttgatcatggtgtccaaaaatagttaatgtggctaaattgagacaggttatgcttccatcacagtatgcatattgcagtggtgacaatgagacctgtaacattttgctatgtttatgagtaaaaatgtaggagaaaaatgttgacttttcaatattagaaataacatttaataaggaattttcagctcttataggaccactttttttatgtgctgtatattgactgaaacattgtaatgtggtatacattactgtgtcttggatcaggtgtcaaaatgtaactgtactttgtacaattcaacttctaggaccctaaagtaaattggttgaagaaattagatcccaaagattcttggtaagttaattcattacttaaaaggccatgcaggttattttgttgaatactagcttttctccaaatgttattttaggttatttatttatctagcaatgctattgcaacatctatcaccacttaggagtaaaaaaaaggactaggcttacgttattatgtgtttaaacttcattattaacgatgttatgatgatgggcgaaatgttcaactgctctgaaggggctgaatgaaaatggcctttctgaacatccatttacattaaatattgcattgtatttcagaagattataaaagctcaaaggtaaaagttaccagaaacatgatcatagagcaaattcggatatgaatgggcatgggatcattgatttttaaaaatacctattagtttaaatagctattttaagcatagaattttcaataccttacttggggtgccgggtttcaggatactttggaacctaagcaacctcattcttgaaagatagatttatgtacttaatagtaaatataaatttgaaatacacatttttccacaggtgaattttgaagtcttcatcagtatatccatattaaaacgagatgacagaagccaaagtaattatggcaagtaatggtttttatcttaactataagttatttgctcaagggtgtaatggtcattaccaaggcttttagaatgcagtttctcatttgctgtggacatgaccataaaaaaatttcccagtaggttttctatctgctactttgctagcaatcagcttattgggaacagttgattaactgtaatagaaatgcaatacaaataaaatgtgaaccacatgtgatttttctttaaaatcagtgagatttgaaaattctcctagatctcttgaatcatgcaaatttgctttgcctttatattgtaacccttgtgggttgctaataaccaagcagtttgtagtagagttaactcaggctcgttctagggactcattcatgttcactcactgtacactcatctctggaaatgtaaaatttacttttatactattgttatgtagggctgacaggacaactggatcagtttcattaaaaaggtatgtatgcattagaaaagacatttgtatgggtcatttcaaagagggcttatgaggctgtgaaacccagagctcttaacgctgtgaccaaagatggaagttctctataggaagccatagcactcctaatgtttggtgctatgttttcctgaggagatataaaacgtaataatccaggattgttgccatgtgagagttttaaaggttaatcaaaatttctcttcttcagggcaaacttgaagataaatcttttgactccagctctttagaggatctaaagtgaccttgatggacagtggaagaaatcacaacatggaattcctcgaataacaatttattgactttaaataattttgtctaatgctacatatacacaattaaaaaacctttacactatttctagaaagtcagcatgtatttttggctcgaagtttctctagtgttttctgtggaaggaataaaaatttgagtttcagttgtgtacttcatgcttgaaaaattaagtccttctccctcagttatactcaccttatgggattcttttgcccttgctctgttttgggcataagcttcttgttttgttttttcttccttttgttgtttcacttcagctagttgattgtataacctgtaaagaatttatatagaattagagacaaacactgcaaaaagtgaatcactaaaaaaaaaaaaaaaattaaccctaccttagacccctttggtgccttagagcctgtgtagtctttctgtcttcaggaaaagatgctctgactttattcacgccctttagacgactcacagatgaacctgaggaaagaaaagtgaaatcaagttgtaaacacaaggctttaaacatttcagggagttggttgaagattttaaaaattcaacatacttatagatggtttctctttaactgttttgatttgagaattttcagagacatgaattttattccttatttctttctgcctctggtgggatctctccataaatgattttttcctctttataaatgcttcttgtaagctccctggtacaggtgtaagcctgcgaggggtttctgctgggggaaaagaaatttatgacagaaataggcaaagtatctactttccattagaagtgtggaggccgtccaaggcttacctgtagatgctgtccttggtttttctatggaaagttctgatacagctggataatctgaggcttctgttgctgatacaagaggcagaaactcactcacctaatggcaagaaagttgcatgttttactctttttaaacgctttaagcgggtcttgctctgctgtcagattagagtgcagcggcatgatcacacctcactgcagcctcaatcttagctgggtctacagagacccgccaccatgcctgatttttgtattttttgtagggattgggttttgccttgttgcccaggctggtcttgaactgggcttaggctccactgccctcacacctctaggcctctgtttagatagctttattcttattgcctccctactcccctagtaaaattaccagttgttctgaagtcatttttcaatatctgggaataagtttaggtaaaacttccaacttggcactataacactaggtgtataagattagttctgccagtcttggagacaggcataaattggagtggggattaaaagaaaatgcacaatggttgacagaatagtgaaggtttaagacaaattgagagctggtgggggtgtcggcttagttaaatgcatagcataattccctccaatgagtaccttctgataagttgtaagagacaaatcaactggtttgcttgtaatagaataaaatagaaggaaagcttaaatttacctgaaagaagcattttgcttcattctcgctcttctcttctagggttaaatttgcaaaatccatttcagcaatactggtatcagtggtgcttattaaagtaagttctggttcttccattataccatggccagtttctgtttcctgtgaaccacaattaaaaggaaaaccatgtcaaaatagccttaaaagacttaaactaatcgttttgtatataatgcacattttttgcaagtgtatataaatgtgaaaatggaggaagaaaagcaatgattggcaaagaccaacagatcagatttccttaggcttccataactccagcattcagttgtagaaatactggagcctactttggggaggggatgaaatagtgtgacaatggactgaaaggtatctaccacaatgattacaaacctaaatgcttgtagtgttgggcaaaaaatataaatgcaggttggctgtgccgaattgtatcctttaaagggagcaggggtcgactgggctgctaccaaatgtgggccactgactgctaacagataatgtttcaaaagtatctaaacacaacaagaacaaaagcagccacataaaacgtggtttagttgtaattcttattttcaatctgttatgtttatttgtggaaggataaactgcacatactgctagatgaaaaccagtcaccagttgactggtgttgaaagcaagcagattataagttgcttaatatgaggagcaggtttccaatacttattccaataatggatgaattcattgcactggaatgaggctcaacactgaaagtgctgaagcacaggcagaaccaccatttttcagggaagttggagaaaggatatctgaattgggagaaaaaggatcttttgtaaaatactctcagaagacagttttcaaatttttaagtttctgcattatgctggatatttctagtgatcacaagctggatagcaatattaacaagcagttttgcttgtattttgtttcaggtttttcctgccaggcattgtggtgtgtccaaactacttcggaagttgaggcaggaggatcccttgatcctaggagtttgagttcagcctgggtagcatagtgggaacttcatctctaattttagaagaaaaaagttttttcccaaaaaggaatttaaatgttatttatacaacactgatttcacttacccagactggtatagagctctgtaatgaaaatgatccagaacttgcaaaaagctctgattctcctagttgagatagttttttggtgatttttggaatgtctgtttcagctgaattctcaaaatatttttcattttgagtagttaaggaatatggtgcctgaattgaagttcccatctccactgttcttacacataatcgagagtcagtttcctctacctgtggatttatgtctaaaaccctacaggtttcatttttattatcttcaatgagtccttgactttgtaacattgtaacaacccctctttttgatagttcttcaaagcccatactttcctttctgctttctagttggtgttttgttgagcactcactagagttagaaccacatggagtgctatgctgtacatttaactgatcaaatacattagcttcatcagatgaactgtagactgaacttaagtttcctatagaaagctggaaatgaacaatttttttcttgttttgtaatatttcagtatgttcttcagagggatagttctgatttttcatgccttgggaagaatctcttgcttcaatgctaaaaatacttggtagatcagcatgctggctctcctcctgtgaagaatattctggctgaagctgttcaaaacattgttcagatcctgcattaagaaattcaaaaatcagttaatcatcgttacatgttgtaaaagttggatactgacagtctctaatagtttatcatccaattgcaagtaacctacaattttaggcataaaagttgatgtgtataaacatgaatacaaagataaggatggtcacagtgatttctcaaactacagctcacaccaagtattttttctttttctattaatatttaataaggacaatatggctataaactgaggatgttttcctctataagaactgaatatgactttaataacagaaaagagaataaagcatccatgtgtatctcaattatccatgtgtgtatatataatttgtacatccttgtgtatctcatgtatgtttgtgtgtatatataatcatttgtaccaaaggctcaagaatacttgttttctatgttgcccaggctggtcttgaactcctgggctccagggatcctcctgccgcagcttcccaaagtgctaggattacaggcgtgagccactatacttggcctaagaagaatacttaaactggctgggcatggtggctcacacctgtaatcccagcactttgggaggccaagacgagtggatcatctgaggtcgggagttctagaccagcctgaccaacatagtgaaaccctgtctatactaaaaatagaaaattagctgggtgtggtggcacatgcctgtaatcccagctacttgggaggctgagtgaggcaggagaatcacttgaacccagcaggcggaggttgcagtgagccaagattgcaccactgcactccagcctgggcaacaagagtgaaactcagtcttcaaaaacaaaataaaaacaaaaacaaaaacaaaaaaaacaaacaaaaaaataatacttaaactgttaactatcacataatgattgaggtagggaaattgaggaacaagaggcaacacttttccttttatttcataatgttcagtattgtttaaaaaaatgcatgtattacttctgtaatttaaatattttttaacacccaggataggggtgagagcaggggtgaagacaaaccaagaggtgctaggcttaatttctaaggaaatggatgtaaaaaatcatggaaaaattaactttttctaacttagtcatacatacccccaataatattttctgtagcaaaactgtgagctccaacatgagccaagttagtgtcaggttgttgattcggacttgtgttaagagaagaatgcatgctggtcctcctcagtgctgtgaaataaactgtacttttggataatccagtagcacagtggctttcagatgaagaatctgatctctggcaggaaacaaaagggaaaggctgaaatactgattaggtattaacaattgaaacaataatcattgtgttcctttggtattactcttccttaattatcacttcactatgacagcaatgatttgctttttcaaatccagttcttttcaatcaatatgaaagagactttaaaatgtcaggccatcaggaagtggaagcaaaaagactcaggtttaaatctcagctcctttgactgtgtaggaggatactttaaattttgcaaaattgtatttactttactgtttaaatatgttccacaactaaaagttgttattaagccttttatggcatcatactccctaggtggagacaggtggatgggacaaacaaaattctaatgtagctgttttcctttttttttttttgagatggggtctcactatgttgtccaggctggagtgcagtggcacgatctcggctcactgcaacctctgcctcccaggttcaagcggttctcagcctcccgagtagctgggactacaggcatgccatcacacccaactaatttttgtgttttttagtagagatgggatttcaccatgttggccaggctgatctcaaactcctggcctcaagcaatccacctgcctcagactcccaaagtgctgggattacaggcatgagccaccgcacccggcccaatgcagctgttttcaaagttggttccacattagaatcacttggggagcttaaaaaataataataataattagtactatctgagcactcccagaaactctgctttaattggtctagggtgtagtctggacaataggatttatttttattttttatttaagttttccatgtgattctttttgtttgtttgtttgtttctttttttaaagacagggtctggctctgtcacccagactggagtgtagtggcacgatctcagctcactgcagcctccacctcctgggctcaagtggtcctcccacctcagcctcccgagtagctgggactacaggtgcgcaccacgacacctggctaatttttgtattttcagtagagacagggttttgccatgttggccaggctggtctcgaactcttggcctcaagtaatctgcccgccttgggctctcaaagtgctgggattacaggtgtgagccactgtgcccagacttccatgtgattctaggtaagggtttagaagaacttttgttccagtagaagaaatggcttaaaactatttttagatattcactgcaatgggacatctactttaatatacctggtaaaagtctctgttgtctggagaaatcccagaggatgatgatgataagtcaaaatctggatgtggttctaagggtttaaacagctgatgatgcaaattaggaaaaatgtgttccaattctggaaagtcaaggtcaactgttagaatttttgagggaaaaaaatcataaatttatttttaaggtaaacactagaaaaggagtattaagaacatattcataaacgcttattttcaggtaactccagtgtaacaaaaacttcagtttttcccccatgatcagcagatgctttaaagttaagtcctatcatgattatttcaaaggtccaaaatatggatcctctcagtgaccaaaactttttaagttttatttttagagaaatttaatttttttaaatttaaaaaatttttttttaaaatagagatggggtctcagtgttgcccaggctggtcttgaaatcctgggctcaagcaatcctcctgcctcagcctcccaaagtgctacgattacaggtatgaacaaacttttgacaaatacgaatttccatttccacagccttatgaggctaatgaggatcaacaggacatatgtaaccactgcttcagtataagcttaaaaaaggaaaaaggctcactgtattcagtgttactatgggccagacattgtgctttatgtgcactatctcatttaatctataatattcctcttttataaaagattaaaaagtaacttgcccatggttttacagctaggaaatggtcaggctatgactcaaatccagaactgtatgatttctgagctcctgctcttatttatcagtaataccgcctcagccgtaatagctaactctgcaatggcaaaggaagatttgctaattaatctcctataaatgtgcctcagtgagtctaattggttccagatcccctttctcactaaatgccctcaatatattctgtggtaaaacggtgttgtagcaggccataagaacatgaagctcaaacaatcactgcataaaatttaaaatgatgaaaggtgaaaatttaaaacttaatttacataaaagtattgctttaaaataattttaccttgcaaatctgttttttcaggtatcaaatttgcttcattaatgtacttgtctatcatttgctgaaagtgtgtgtgaccacatgtagtttcatccactgcaggcaacagagatttatgaacgtctgaagagttctgccgctgataaatatcttgtgttgaaggaactatggaacttataatatttgtttcctc

SEQ ID NO: 6884 - DNA, 16285 bp, Homo sapiens
gtcaatatttagggaagctttgtcatatttactaaatttcataatttcagaaaactgtttaaaacaaagagcaattgatggataaatcaggaatagattctcttgaccatgtgacatctgatgctgtggaacttgcaaatcgaaggtgagtggattcaatcatgtttattgtatctgaattatgagaaactattgtatataatgagtgacagtaaagataattttcaggaattgggaaagaaggaaaactagatttcactgaccttccaagtttatctagttacatagattgatataatagcattgcaaatactttaaattcaaaatgtgaatatattatgggacacattcgtcgagaaaaaatgtattctttgggtcatattagcatctcttccagactacatcctccggttcggtaggctgtgtttgttttactcagacactcttagcagtgaaccgaaccatacagccttttggagctcatacattgtcttgaaagatacagtttttttgtaagctgagcatagtggtgcatgccattagtcctagctagctacttgggaggctgaggcaggagcatccctggagtttccaggagtttgaggttgcagtgagctgtgattgcaccactgcactccagtctgggtgacagcaagacgatgtctacaaaactctttaataagagctgtagcattatgggctatttaaataggatgatcagtagaaaggctagctggttctgagcccatcctttaaaaaatttttaattctgggcatgttttctgagttggtcttggaagaaatgtacatttaggactgggtattaatggtaataagcagtaagaaaagaagatgaaattaatttttttcccatttttctagtgataactcttctgatagcagcttatttaaaactcagtgtatcccttactcacctaaaggggagaaaagaaaccccattcgaaaatttgttcgtacacctgaaagtgttcacgcaagtgattcatcaagtgactcatcttttgaaccaataccattgactataaaagctatttttgaaagattcaagaacaggaaaaagagatataaaaaaaagaaaaagaggaggtaccagccaacaggaagaccacggggaagaccagaaggaaggagaaatcctatatactcactaatagataagaagaaacaatttagaagcagaggatctggcttcccatttttagaatcagagaatgaaaaaaacgcaccttggagaaaaattttaacgtttgaggtgagtcagcattttacatacatggctacacataactcaagatgcccaaaatgatttgttggccaatttagaattgtctcagatatactgggaacagactgtctgcaattttgatactcttctatactgacttacccctaaagtccaccctatccttcaactgaatcttgacttgtatctcttaatataactacactttgccatatttaaaagatagtgctccaaggctctttgtataaaatcctttgatcttatcccatctcaggtctttaaacacaaccctaaaactcagtggggataataaaagctcacataacttgaaattacttttgcagtaacctaaactaaaaccacacatgccttatgttcagtggatatattcttaaggcctagatgtttctaagccaattatctgaaaaatacgctaatacttaggagtagacttttttaaatatttgagagttgtatgttgaatgaattcagaattaatttatgatcccttgccagaacctgaaattttatttgggaggattaatacatgttaatctcttcagttaatctcttaagtttaaggtgattatagtaaacattagaaatcttattcctgtttttacattttaaaatgcctttagtaagtcccagacatgacaagatatgtacttcacttttccatgttaccagcttaggtaaattcataattgtaatgtgaattttaataatcagcatttgataagtccacaagtggggagtagttaagatagcaaattcagagtctttgctaagggggggcattgccctttttgaacataggcacctgctgggtcttaaaaataaaatctcgacatacttatggtgtttttaatatatagcaagctgttgcaagaggattttttaactatattgaaaaactgaagtatgaacaccacctgaaagaatcattgaagcaaatgaatgttggtgaagatttagaaaatgaagattttgacagtcgtagatacaaatttttggatgatgatggatccatttctcctattgaggagtcaacgtaagtggaatcatatgaaatactttggtaataggttataaattaaatttctatgttaattgcttcatattttgcctttaatatagttatacttaaataatgaacaaagatacagagtatgacaattgggattattacagttgagccaagcttggcacaccgttcatctagaattctccagaacacaaaattctcaaattttgtgtttcctttgactagtattgcagtttcagttatatttcagagtggaatatacaactaattaggtcatcgaagattctgtcatctcgatgataaattttaatattacagagcagaggatgaggatgcaacacatcttgaagataacgaatgtgatatcaaattggcagtaagtgacttatttttttcctattccattttgggaaggcaggagttggttgatacagaaggaattatatttagtttttctcttacacttcatttaacttttgaaaagctctataagtttactgcaggaaatgcaagaaggaaaataattttttagagacttgataaagaacatggggttttcagtactatttttaataagtagcattctgatacatattattgctagttaggatgtcaaatgaaaaaataagcaatgttaatttggatttttaacatctacatgtagtctctaggttatctgaagtaatccagggcattcagctatatgtaattactaaactatttgagttattgcttaatccatgattttttgtttgttttatgcagggggatagtttcatagtaagttctgaattccctgtaagactgagtgtatacttagaagaagaggatattactgaagaagctgctttgtctaaaaagagagctacaaaagccaaaaatactggacagagaggcctgaaaatgtgacaggatcatgaatgtcaaaggtgaagcatatagaaaaaacgacttcatagaaatgaataaagataaatgtggatatatgtaccagtctggtggtgaagaaattctgaaacccagaactttataacaagaaaaaaaatttttaaccctgtgaagaagtttgtgaaagaaacttgtgaagtagtaataattagaaaaaaaaccattaaaacaccagagaaaatacatagaaaaatttgagaaattgtcatttgatttctgaataagagcttacaggtgtcctgtgagtattgaaacaatgaaatgtagtgattttaattttgaaaagaaaatcttaaagtaacttgacacccaaccatcttgaagaggggatttgaaatgctgtaattttatcccagctttgttcagccatgacaagtgacctgtcagatgcttagtattgtaataacctcatttccctttccaaatttagagtatctttaatactattttttttagacagagtctcgatctgtcacccaggctgtagtgcaatggccgcagtcttggcttactgcaacctccatctcccgggttcaagcgattctgcctcagcctccttagtagctgggattacaggcgttagccagcacacccagctagtttttgtttttttagtagagacaggctttcaccatggtctcgaactcctgacctcaggcgatccgcctgccttggcctcccaaaatgctgggattataggtgtgagccatggcacctggcctaatactacttttaactaccattttcactttttattagttcaagaaaaggcatacacatttattcaacatgtatacctggggagaaccagtcattaccccgatgttcattattttgatcaccacgatagagctgactactctgctatgtagtgcattttgggactgcacttatgtatgtttttgtttaacgtggacaaagacttacagataggtgcaaaaaataaatcctcttttgcaacccagaactcattgttcagtatgagttttgatacatataagaagggatattatgatacctgagacagttgattgatgggagtattgatagccataaaggttggttccaggccaggtgcaatgggtcaagcctgcaatccccacaccaaggtgggagtattgcttgaaaccaggagttcaagaccagcctaggcaagaaagtaagaaacacatctccacaaaaatttaaaaattagctgggtactggggcatgtgcctgtagttggagttactcagaaaggggggaggctgaggcagagttggaggctgcactgagctttgatggcaccactgtactccagcctgagtaacaaagacagaccctgtctcttaagaaaaaaaggttgattccaggcctgtagaatagataaacagcatgggatatgagggaaatcctcagcagtattaattttgcattccaatttcatgttgatgatatacacaatggctttttgttttaaaggcttttatcttgagaacatggtgtctggagttaaaggtatgtctcaatttgagttttcacatcatatttgtttatgtgtaggaaacagtatgttgtcagagcaagtttcattttattcagggacatttctaccatgcttttaattcccatttatactgatttctgaaaagaagaatcctagattcacacattttatagtgatgtgtcagattcattttagttgcaagcattagagggtcctgaatttgttagtttgtagcaataatcagaactttggatttcctacttgaagcctacagcattattttgaattaatgcacaatctaaaatgaggcagaggattttatggtttaatgcaaaatatagtataataaaagatgattacacaggtcataagaattcataaatttgaatgatgtagagtttgattaaaagttatataatgccaaagtcgtaacttacaggcacattatattcctgtattttataatggatgacaattaattttgagccaagaattaaaatttgctgaaatcttcgaattgggaaaacaacatcctctgttgcaatactgaagttcataacaacagttagactttaaacttaaatcttaagtttaaatctttttcctttggttcatgtaaaggagctacttgatgttactttttatttatcattcctctggctcctaagcacaacgtgattgtgaaattattgtttttgtgattaacgtagtaggaagtttctgcagttggcaatattgtaagagcatattgcagtttctgctcataatttctttcctatggagtgttagactttgttatttatgtgtataaatactagctggacacagtggtgcctgtggtccccagctactctggaggctaaggcaggagaaacacttgagcccagcggtttgaggctacagtgagatgtgatcctgccacatctcactgtagcctcgaacccctgggctcaagtgattcagcaagaatcacacgatttttaaaagacatggcagatcctgtgtctttaaaaaaaaatcaaaaccttgtaaatagtggttgaggtctatcccgatggggcttttcctgtagcctgcacatcgttggaaacgcctcatagagtaactctgtggttttactttactcacaggactattgttagatctgtgggaaggaattacaagacagttgctaaaagtttgaaaaagacggttgctaaacgttatgaaaaaccagataatctacttttttaccttaggtattggcatactccacacatctgtaccattcttgagtgatcgcttaggtaagttttaattggtgacagtataatcttttgggaaataatgattacagttcagatgatgaatttaactgttcaactgctgaatgataacgggcatgaactaaaacttaattctgacagagctggatatggctgtataataaactggatcttaaatttatacttgggttttagttttaataactggaaatgtatcctttctaaatctttaattggtactttctataggaatgaatgtgatttgaactcattcatgttgagaggtaagtaaaatatttaacttataataatcaaggactcaaaagatgaaaaatagaaattacaccatcccagtatttcaggtataacacagaattagtaagatactggcaaaaatattacaatgtatatatttgtatagagaaggaaaatgaagagactgcatgtctatacctaccaaacgaaactacctgtgttctttgcatcattattcaactggcagttacacatatttcatcctaaagtcacgtaaacctgtgtggatatgttgaatccatagggatatgaattacataaaaagaattttgtgtaactggcagtttgagcaacaatgagcttgacgtttgttgtctgatctgttaagttacatgtatatattccatctttaagttttatagagagactgggcaaagattaggcaaagactagagttgtagcttaaaatgtagttaatgtagcttccttattacagtgacaattaggaaaaaagctcaaattattgtacttgttaaaggaatttgagaggtttgtgaaagcatttctcagcaatattgcaaatttgggaatacgagttgtacagttcagtcataacttgcactgcatggtatctgcactcagcagtttacacctgctagggtgttcaaaggtcagtgctatagaaattcagtatctggcatcgttggttttcttggctttgtgcttgttaaacctggtatttctactgatacagtatttgtgtaggtttctcagagtgttcagtttgatatactctaaaatagtaagcaatgcttttttttccagggtgtcaaattgagaaccaggtagatccccaccacctacagtaaaaaggtaagattctctgtttctattgattctgcttgtttccctctatcagtagcactgccagcataacaagaacttcgtacaaatacactactaagctttaaagacttttacaatgcctcattctagagaatgggcactgttgatcatggtgtccaaaaatagttaatgtggctaaattgagacaggttatgcttccatcacagtatgcatattgcagtggtgacaatgagacctgtaacattttgctatgtttatgagtaaaaatgtaggagaaaaatgttgacttttcaatattagaaataacatttaataaggaattttcagctcttataggaccactttttttatgtgctgtatattgactgaaacattgtaatgtggtatacattactgtgtcttggatcaggtgtcaaaatgtaactgtactttgtacaattcaacttctaggaccctaaagtaaattggttgaagaaattagatcccaaagattcttggtaagttaattcattacttaaaaggccatgcaggttattttgttgaatactagcttttctccaaatgttattttaggttatttatttatctagcaatgctattgcaacatctatcaccacttaggagtaaaaaaaaggactaggcttacgttattatgtgtttaaacttcattattaacgatgttatgatgatgggcgaaatgttcaactgctctgaaggggctgaatgaaaatggcctttctgaacatccatttacattaaatattgcattgtatttcagaagattataaaagctcaaaggtaaaagttaccagaaacatgatcatagagcaaattcggatatgaatgggcatgggatcattgatttttaaaaatacctattagtttaaatagctattttaagcatagaattttcaataccttacttggggtgccgggtttcaggatactttggaacctaagcaacctcattcttgaaagatagatttatgtacttaatagtaaatataaatttgaaatacacatttttccacaggtgaattttgaagtcttcatcagtatatccatattaaaacgagatgacagaagccaaagtaattatggcaagtaatggtttttatcttaactataagttatttgctcaagggtgtaatggtcattaccaaggcttttagaatgcagtttctcatttgctgtggacatgaccataaaaaaatttcccagtaggttttctatctgctactttgctagcaatcagcttattgggaacagttgattaactgtaatagaaatgcaatacaaataaaatgtgaaccacatgtgatttttctttaaaatcagtgagatttgaaaattctcctagatctcttgaatcatgcaaatttgctttgcctttatattgtaacccttgtgggttgctaataaccaagcagtttgtagtagagttaactcaggctcgttctagggactcattcatgttcactcactgtacactcatctctggaaatgtaaaatttacttttatactattgttatgtagggctgacaggacaactggatcagtttcattaaaaaggtatgtatgcattagaaaagacatttgtatgggtcatttcaaagagggcttatgaggctgtgaaacccagagctcttaacgctgtgaccaaagatggaagttctctataggaagccatagcactcctaatgtttggtgctatgttttcctgaggagatataaaacgtaataatccaggattgttgccatgtgagagttttaaaggttaatcaaaatttctcttcttcagggcaaacttgaagataaatcttttgactccagctctttagaggatctaaagtgaccttgatggacagtggaagaaatcacaacatggaattcctcgaataacaatttattgactttaaataattttgtctaatgctacatatacacaattaaaaaacctttacactatttctagaaagtcagcatgtatttttggctcgaagtttctctagtgttttctgtggaaggaataaaaatttgagtttcagttgtgtacttcatgcttgaaaaattaagtccttctccctcagttatactcaccttatggaattcttttgcccttgctctgttttgggcataagcttcttgttttgttttttcttccttttgttgtttcacttcagctagttgattgtataacctgtaaagaatttatatagaattagagacaaacactgcaaaaagtgaatcactaaaaaaaaaaaaaaaattaaccctaccttagacccctttggtgccttagagcctgtgtagtctttctgtcttcaggaaaagatgctctgactttattcacgccctttagacgactcacagatgaacctgaggaaagaaaagtgaaatcaagttgtaaacacaaggctttaaacatttcagggagttggttgaagattttaaaaattcaacatacttatagatggtttctctttaactgttttgatttgagaattttcagagacatgaattttattccttatttctttctgcctctggtgggatctctccataaatgattttttcctctttataaatgcttcttgtaagctccctggtacaggtgtaagcctgcgaggggtttctgctgggggaaaagaaatttatgacagaaataggcaaagtatctactttccattagaagtgtggaggccgtccaaggcttacctgtagatgctgtccttggtttttctatggaaagttctgatacagctggataatctgaggcttctgttgctgatacaagagcagaaactcactcacctaatggcaagaaagttgcatgttttactctttttaaacgctttaagcgggtcttgctctgctgtcagattagagtgcagcggcatgatcacacctcactgcagcctcaatcttagctgggtctacagagacccgccaccatgcctgatttttgtattttttgtagggattgggttttgccttgttgcccaggctggtcttgaactgggcttaggctccactgccctcacacctctaggcctctgtttagatagctttattcttattgcctccctactcccctagtaaaattaccagttgttctgaagtcatttttcaatatctgggaataagtttaggtaaaacttccaacttggcactataacactaggtgtataagattagttctgccagtcttggagacaggcataaattggagtggggattaaaagaaaatgcacaatggttgacagaatagtgaaggtttaagacaaattgagagctggtgggggtgtcggcttagttaaatgcatagcataattccctccaatgagtaccttctgataagttgtaagagacaaatcaactggtttgcttgtaatagaataaaatagaaggaaagcttaaatttacctgaaagaagcattttgcttcattctcgctcttctcttctagggttaaatttgcaaaatccatttcagcaatactggtatcagtggtgcttattaaagtaagttctggttcttccattataccatggccagtttctgtttcctgtgaaccacaattaaaaggaaaaccatgtcaaaatagccttaaaagacttaaactaatcgttttgtatataatgcacattttttgcaagtgtatataaatgtgaaaatggaggaagaaaagcaatgattggcaaagaccaacagatcagatttccttaggcttccataactccagcattcagttgtagaaatactggagcctactttggggaggggatgaaatagtgtgacaatggactgaaaggtatctaccacaatgattacaaacctaaatgcttgtagtgttgggcaaaaaatataaatgcaggttggctgtgccgaattgtatcctttaaagggagcaggggtcgactgggctgctaccaaatgtgggccactgactgctaacagataatgtttcaaaagtatctaaacacaacaagaacaaaagcagccacataaaacgtggtttagttgtaattcttattttcaatctgttatgtttatttgtggaaggataaactgcacatactgctagatgaaaaccagtcaccagttgactggtgttgaaagcaagcagattataagttgcttaatatgaggagcaggtttccaatacttattccaataatggatgaattcattgcactggaatgaggctcaacactgaaagtgctgaagcacaggcagaaccaccatttttcagggaagttggagaaaggatatctgaattgggagaaaaaggatcttttgtaaaatactctcagaagacagttttcaaatttttaagtttctgcattatgctggatatttctagtgatcacaagctggatagcaatattaacaagcagttttgcttgtattttgtttcaggtttttcctgccaggcattgtggtgtgtccaaactacttcggaagttgaggcaggaggatcccttgatcctaggagtttgagttcagcctgggtagcatagtgggaacttcatctctaattttagaagaaaaaagttttttcccaaaaaggaatttaaatgttatttatacaacactgatttcacttacccagactggtatagagctctgtaatgaaaatgatccagaacttgcaaaaagctctgattctcctagttgagatagttttttggtgatttttggaatgtctgtttcagctgaattctcaaaatatttttcattttgagtagttaaggaatatggtgcctgaattgaagttcccatctccactgttcttacacataatcgagagtcagtttcctctacctgtggatttatgtctaaaaccctacaggtttcatttttattatcttcaatgagtccttgactttgtaacattgtaacaacccctctttttgatagttcttcaaagcccatactttcctttctgctttctagttggtgttttgttgagcactcactagagttagaaccacatggagtgctatgctgtacatttaactgatcaaatacattagcttcatcagatgaactgtagactgaacttaagtttcctatagaaagctggaaatgaacaatttttttcttgttttgtaatatttcagtatgttcttcagagggatagttctgatttttcatgccttgggaagaatctcttgcttcaatgctaaaaatacttggtagatcagcatgctggctctcctcctgtgaagaatattctggctgaagctgttcaaaacattgttcagatcctgcattaagaaattcaaaaatcagttaatcatcgttacatgttgtaaaagttggatactgacagtctctaatagtttatcatccaattgcaagtaacctacaattttaggcataaaagttgatgtgtataaacatgaatacaaagataaggatggtcacagtgatttctcaaactacagctcacaccaagtattttttctttttctattaatatttaataaggacaatatggctataaactgaggatgttttcctctataagaactgaatatgactttaataacagaaaagagaataaagcatccatgtgtatctcaattatccatgtgtgtatatataatttgtacatccttgtgtatctcatgtatgtttgtgtgtatatataatcatttgtaccaaaggctcaagaatacttgttttctatgttgcccaggctggtcttgaactcctgggctccagggatcctcctgccgcagcttcccaaagtgctaggattacaggcgtgagccactatacttggcctaagaagaatacttaaactggctgggcatggtggctcacacctgtaatcccagcactttgggaggccaagacgagtggatcatctgaggtcgggagttctagaccagcctgaccaacatagtgaaaccctgtctatactaaaaatagaaaattagctgggtgtggtggcacatgcctgtaatcccagctacttgggaggctgagtgaggcaggagaatcacttgaacccagcaggcggaggttgcagtgagccaagattgcaccactgcactccagcctgggcaacaagagtgaaactcagtcttcaaaaacaaaataaaaacaaaaacaaaaacaaaaaaaacaaacaaaaaaataatacttaaactgttaactatcacataatgattgaggtagggaaattgaggaacaagaggcaacacttttccttttatttcataatgttcagtattgtttaaaaaaatgcatgtattacttctgtaatttaaatattttttaacacccaggataggggtgagagcaggggtgaagacaaaccaagaggtgctaggcttaatttctaaggaaatggatgtaaaaaatcatggaaaaattaactttttctaacttagtcatacatacccccaataatattttctgtagcaaaactgtgagctccaacatgagccaagttagtgtcaggttgttgattcggacttgtgttaagagaagaatgcatgctggtcctcctcagtgctgtgaaataaactgtacttttggataatccagtagcacagtggctttcagatgaagaatctgatctctggcaggaaacaaaagggaaaggctgaaatactgattaggtattaacaattgaaacaataatcattgtgttcctttggtattactcttccttaattatcacttcactatgacagcaatgatttgctttttcaaatccagttcttttcaatcaatatgaaagagactttaaaatgtcaggccatcaggaagtggaagcaaaaagactcaggtttaaatctcagctcctttgactgtgtaggaggatactttaaattttgcaaaattgtatttactttactgtttaaatatgttccacaactaaaagttgttattaagccttttatggcatcatactccctaggtggagacaggtggatgggacaaacaaaattctaatgtagctgttttcctttttttttttttgagatggggtctcactatgttgtccaggctggagtgcagtggcacgatctcggctcactgcaacctctgcctcccaggttcaagcggttctcagcctcccgagtagctgggactacaggcatgccatcacacccaactaatttttgtgttttttagtagagatgggatttcaccatgttggccaggctgatctcaaactcctggcctcaagcaatccacctgcctcagactcccaaagtgctgggattacaggcatgagccaccgcacccggcccaatgcagctgttttcaaagttggttccacattagaatcacttggggagcttaaaaaataataataataattagtactatctgagcactcccagaaactctgctttaattggtctagggtgtagtctggacaataggatttatttttattttttatttaagttttccatgtgattctttttgtttgtttgtttgtttctttttttaaagacagggtctggctctgtcacccagactggagtgtagtggcacgatctcagctcactgcagcctccacctcctgggctcaagtggtcctcccacctcagcctcccgagtagctgggactacaggtgcgcaccacgacacctggctaatttttgtattttcagtagagacagggttttgccatgttggccaggctggtctcgaactcttggcctcaagtaatctgcccgccttgggctctcaaagtgctgggattacaggtgtgagccactgtgcccagacttccatgtgattctaggtaagggtttagaagaacttttgttccagtagaagaaatggcttaaaactatttttagatattcactgcaatgggacatctactttaatatacctggtaaaagtctctgttgtctggagaaatcccagaggatgatgatgataagtcaaaatctggatgtggttctaagggtttaaacagctgatgatgcaaattaggaaaaatgtgttccaattctggaaagtcaaggtcaactgttagaatttttgagggaaaaaaatcataaatttatttttaaggtaaacactagaaaaggagtattaagaacatattcataaacgcttattttcaggtaactccagtgtaacaaaaacttcagtttttcccccatgatcagcagatgctttaaagttaagtcctatcatgattatttcaaaggtccaaaatatggatcctctcagtgaccaaaactttttaagttttatttttagagaaatttaatttttttaaatttaaaaaatttttttttaaaatagagatggggtctcagtgttgcccaggctggtcttgaaatcctgggctcaagcaatcctcctgcctcagcctcccaaagtgctacgattacaggtatgaacaaacttttgacaaatacgaatttccatttccacagccttatgaggctaatgaggatcaacaggacatatgtaaccactgcttcagtataagcttaaaaaaggaaaaaggctcactgtattcagtgttactatgggccagacattgtgctttatgtgcactatctcatttaatctataatattcctcttttataaaagattaaaaagtaacttgcccatggttttacagctaggaaatggtcaggctatgactcaaatccagaactgtatgatttctgagctcctgctcttatttatcagtaataccgcctcagccgtaatagctaactctgcaatggcaaaggaagatttgctaattaatctcctataaatgtgcctcagtgagtctaattggttccagatcccctttctcactaaatgccctcaatatattctgtggtaaaacggtgttgtagcaggccataagaacatgaagctcaaacaatcactgcataaaatttaaaatgatgaaaggtgaaaatttaaaacttaatttacataaaagtattgctttaaaataattttaccttgcaaatctgttttttcaggtatcaaatttgcttcattaatgtacttgtctatcatttgctgaaagtgtgtgtgaccacatgtagtttcatccactgcaggcaacagagatttatgaacgtctgaagagttctgccgctgataaatatcttgtgttgaaggaactatggaacttataatatttgtttcctc

SEQ ID NO: 6885 - DNA, 16281 bp, Homo sapiens
gtcaatatttagggaagctttgtcatatttactaaatttcataatttcagaaaactgtttaaaacaaagagcaattgatggataaatcaggaatagattctcttgaccatgtgacatctgatgctgtggaacttgcaaatcgaaggtgagtggattcaatcatgtttattgtatctgaattatgagaaactattgtatataatgagtgacagtaaagataattttcaggaattgggaaagaaggaaaactagatttcactgaccttccaagtttatctagttacatagattgatataatagcattgcaaatactttaaattcaaaatgtgaatatattatgggacacattcgtcgagaaaaaatgtattctttgggtcatattagcatctcttccagactacatcctccggttcggtaggctgtgtttgttttactcagacactcttagcagtgaaccgaaccatacagccttttggagctcatacattgtcttgaaagatacagtttttttgtaagctgagcatagtggtgcatgccattagtcctagctagctacttgggaggctgaggcaggagcatccctggagtttccaggagtttgaggttgcagtgagctgtgattgcaccactgcactccagtctgggtgacagcaagacgatgtctacaaaactctttaataagagctgtagcattatgggctatttaaataggatgatcagtagaaaggctagctggttctgagcccatcctttaaaaaatttttaattctgggcatgttttctgagttggtcttggaagaaatgtacatttaggactgggtattaatggtaataagcagtaagaaaagaagatgaaattaatttttttcccatttttctagtgataactcttctgatagcagcttatttaaaactcagtgtatcccttactcacctaaaggggagaaaagaaaccccattcgaaaatttgttcgtacacctgaaagtgttcacgcaagtgattcatcaagtgactcatcttttgaaccaataccattgactataaaagctatttttgaaagattcaagaacaggaaaaagagatataaaaaaaagaaaaagaggaggtaccagccaacaggaagaccacggggaagaccagaaggaaggagaaatcctatatactcactaatagataagaagaaacaatttagaagcagaggatctggcttcccatttttagaatcagagaatgaaaaaaacgcaccttggagaaaaattttaacgtttgaggtgagtcagcattttacatacatggctacacataactcaagatgcccaaaatgatttgttggccaatttagaattgtctcagatatactgggaacagactgtctgcaattttgatactcttctatactgacttacccctaaagtccaccctatccttcaactgaatcttgacttgtatctcttaatataactacactttgccatatttaaaagatagtgctccaaggctctttgtataaaatcctttgatcttatcccatctcaggtctttaaacacaaccctaaaactcagtggggataataaaagctcacataacttgaaattacttttgcagtaacctaaactaaaaccacacatgccttatgttcagtggatatattcttaaggcctagatgtttctaagccaattatctgaaaaatacgctaatacttaggagtagacttttttaaatatttgagagttgtatgttgaatgaattcagaattaatttatgatcccttgccagaacctgaaattttatttgggaggattaatacatgttaatctcttcagttaatctcttaagtttaaggtgattatagtaaacattagaaatcttattcctgtttttacattttaaaatgcctttagtaagtcccagacatgacaagatatgtacttcacttttccatgttaccagcttaggtaaattcataattgtaatgtgaattttaataatcagcatttgataagtccacaagtggggagtagttaagatagcaaattcagagtctttgctaagggggggcattgccctttttgaacataggcacctgctgggtcttaaaaataaaatctcgacatacttatggtgtttttaatatatagcaagctgttgcaagaggattttttaactatattgaaaaactgaagtatgaacaccacctgaaagaatcattgaagcaaatgaatgttggtgaagatttagaaaatgaagattttgacagtcgtagatacaaatttttggatgatgatggatccatttctcctattgaggagtcaacgtaagtggaatcatatgaaatactttggtaataggttataaattaaatttctatgttaattgcttcatattttgcctttaatatagttatacttaaataatgaacaaagatacagagtatgacaattgggattattacagttgagccaagcttggcacaccgttcatctagaattctccagaacacaaaattctcaaattttgtgtttcctttgactagtattgcagtttcagttatatttcagagtggaatatacaactaattaggtcatcgaagattctgtcatctcgatgataaattttaatattacagagcagaggatgaggatgcaacacatcttgaagataacgaatgtgatatcaaattggcagtaagtgacttatttttttcctattccattttgggaaggcaggagttggttgatacagaaggaattatatttagtttttctcttacacttcatttaacttttgaaaagctctataagtttactgcaggaaatgcaagaaggaaaataattttttagagacttgataaagaacatggggttttcagtactatttttaataagtagcattctgatacatattattgctagttaggatgtcaaatgaaaaaataagcaatgttaatttggatttttaacatctacatgtagtctctaggttatctgaagtaatccagggcattcagctatatgtaattactaaactatttgagttattgcttaatccatgattttttgtttgttttatgcagggggatagtttcatagtaagttctgaattccctgtaagactgagtgtatacttagaagaagaggatattactgaagaagctgctttgtctaaaaagagagctacaaaagccaaaaatactggacagagaggcctgaaaatgtgacaggatcatgaatgtcaaaggtgaagcatatagaaaaaacgacttcatagaaatgaataaagataaatgtggatatatgtaccagtctggtggtgaagaaattctgaaacccagaactttataacaagaaaaaaaatttttaaccctgtgaagaagtttgtgaaagaaacttgtgaagtagtaataattagaaaaaaaaccattaaaacaccagagaaaatacatagaaaaatttgagaaattgtcatttgatttctgaataagagcttacaggtgtcctgtgagtattgaaacaatgaaatgtagtgattttaattttgaaaagaaaatcttaaagtaacttgacacccaaccatcttgaagaggggatttgaaatgctgtaattttatcccagctttgttcagccatgacaagtgacctgtcagatgcttagtattgtaataacctcatttccctttccaaatttagagtatctttaatactattttttttagacagagtctcgatctgtcacccaggctgtagtgcaatggccgcagtcttggcttactgcaacctccatctcccgggttcaagcgattctgcctcagcctccttagtagctgggattacaggcgttagccagcacacccagctagtttttgtttttttagtagagacaggctttcaccatggtctcgaactcctgacctcaggcgatccgcctgccttggcctcccaaaatgctgggattataggtgtgagccatggcacctggcctaatactacttttaactaccattttcactttttattagttcaagaaaaggcatacacatttattcaacatgtatacctggggagaaccagtcattaccccgatgttcattattttgatcaccacgatagagctgactactctgctatgtagtgcattttgggactgcacttatgtatgtttttgtttaacgtggacaaagacttacagataggtgcaaaaaataaatcctcttttgcaacccagaactcattgttcagtatgagttttgatacatataagaagggatattatgatacctgagacagttgattgatgggagtattgatagccataaaggttggttccaggccaggtgcaatgggtcaagcctgcaatccccacaccaaggtgggagtattgcttgaaaccaggagttcaagaccagcctaggcagaaagtaagaaacacatctccacaaaaatttaaaaattagctgggtactggggcatgtgcctgtagttggagttactcagaaaggggggaggctgaggcagagttggaggctgcactgagctttgatggcaccactgtactccagcctgagtaacaaagacagaccctgtctcttaagaaaaaaaggttgattccaggcctgtagaatagataaacagcatgggatatgagggaaatcctcagcagtattaattttgcattccaatttcatgttgatgatatacacaatggctttttgttttaaaggcttttatcttgagaacatggtgtctggagttaaaggtatgtctcaatttgagttttcacatcatatttgtttatgtgtaggaaacagtatgttgtcagagcaagtttcattttattcagggacatttctaccatgcttttaattcccatttatactgatttctgaaaagaagaatcctagattcacacattttatagtgatgtgtcagattcattttagttgcaagcattagagggtcctgaatttgttagtttgtagcaataatcagaactttggatttcctacttgaagcctacagcattattttgaattaatgcacaatctaaaatgaggcagaggattttatggtttaatgcaaaatatagtataataaaagatgattacacaggtcataagaattcataaatttgaatgatgtagagtttgattaaaagttatataatgccaaagtcgtaacttacaggcacattatattcctgtattttataatggatgacaattaattttgagccaagaattaaaatttgctgaaatcttcgaattgggaaaacaacatcctctgttgcatactgaagttcataacaacagttagactttaaacttaaatcttaagtttaaatctttttcctttggttcatgtaaaggagctacttgatgttactttttatttatcattcctctggctcctaagcacaacgtgattgtgaaattattgtttttgtgattaacgtagtaggaagtttctgcagttggcaatattgtaagagcatattgcagtttctgctcataatttctttcctatggagtgttagactttgttatttatgtgtataaatactagctggacacagtggtgcctgtggtccccagctactctggaggctaaggcaggagaaacacttgagcccagcggtttgaggctacagtgagatgtgatcctgccacatctcactgtagcctcgaacccctgggctcaagtgattcagcaagaatcacacgatttttaaaagacatggcagatcctgtgtctttaaaaaaaaatcaaaaccttgtaaatagtggttgaggtctatcccgatggggcttttcctgtagcctgcacatcgttggaaacgcctcatagagtaactctgtggttttactttactcacaggactattgttagatctgtgggaaggaattacaagacagttgctaaaagtttgaaaaagacggttgctaaacgttatgaaaaaccagataatctacttttttaccttaggtattggcatactccacacatctgtaccattcttgagtgatcgcttaggtaagttttaattggtgacagtataatcttttgggaaataatgattacagttcagatgatgaatttaactgttcaactgctgaatgataacgggcatgaactaaaacttaattctgacagagctggatatggctgtataataaactggatcttaaatttatacttgggttttagttttaataactggaaatgtatcctttctaaatctttaattggtactttctataggaatgaatgtgatttgaactcattcatgttgagaggtaagtaaaatatttaacttataataatcaaggactcaaaagatgaaaaatagaaattacaccatcccagtatttcaggtataacacagaattagtaagatactggcaaaaatattacaatgtatatatttgtatagagaaggaaaatgaagagactgcatgtctatacctaccaaacgaaactacctgtgttctttgcatcattattcaactggcagttacacatatttcatcctaaagtcacgtaaacctgtgtggatatgttgaatcaatagggatatgaattacataaaaagaattttgtgtaactggcagtttgagcaacaatgagcttgacgtttgttgtctgatctgttaagttacatgtatatattccatctttaagttttatagagagactgggcaaagattaggcaaagactagagttgtagcttaaaatgtagttaatgtagcttccttattacagtgacaattaggaaaaaagctcaaattattgtacttgttaaaggaatttgagaggtttgtgaaagcatttctcagcaatattgcaaatttgggaatacgagttgtacagttcagtcataattgcactgcatggtatctgcactcagcagtttacacctgctagggtgttcaaaggtcagtgctatagaaattcagtatctggcatcgttggttttcttggctttgtgcttgttaaacctggtatttctactgatacagtatttgtgtaggtttctcagagtgttcagtttgatatactctaaaatagtaagcaatgcttttttttccagggtgtcaaattgagaaccaggtagatccccaccacctacagtaaaaaggtaagattctctgtttctattgattctgcttgtttccctctatcagtagcactgccagcataacaagaacttcgtacaaatacactactaagctttaaagacttttacaatgcctcattctagagaatgggcactgttgatcatggtgtccaaaaatagttaatgtggctaaattgagacaggttatgcttccatcacagtatgcatattgcagtggtgacaatgagacctgtaacattttgctatgtttatgagtaaaaatgtaggagaaaaatgttgacttttcaatattagaaataacatttaataaggaattttcagctcttataggaccactttttttatgtgctgtatattgactgaaacattgtaatgtggtatacattactgtgtcttggatcaggtgtcaaaatgtaactgtactttgtacaattcaacttctaggaccctaaagtaaattggttgaagaaattagatcccaaagattcttggtaagttaattcattacttaaaaggccatgcaggttattttgttgaatactagcttttctccaaatgttattttaggttatttatttatctagcaatgctatgcaacatctatcaccacttaggagtaaaaaaaaggactaggcttacgttattatgtgtttaaacttcattattaacgatgttatgatgatgggcgaaatgttcaactgctctgaaggggctgaatgaaaatggcctttctgaacatccatttacattaaatattgcattgtatttcagaagattataaaagctcaaaggtaaaagttaccagaaacatgatcatagagcaaattcggatatgaatgggcatgggatcattgatttttaaaaatacctattagtttaaatagctattttaagcatagaattttcaataccttacttggggtgccgggtttcaggatactttggaacctaagcaacctcattcttgaaagatagatttatgtacttaatagtaaatataaatttgaaatacacatttttccacaggtgaattttgaagtcttcatcagtatatccatattaaaacgagatgacagaagccaaagtaattatggcaagtaatggtttttatcttaactataagttatttgctcaagggtgtaatggtcattaccaaggcttttagaatgcagtttctcatttgctgtggacatgaccataaaaaaatttcccagtaggttttctatctgctactttgctagcaatcagcttattgggaacagttgattaactgtaatagaaatgcaatacaaataaaatgtgaaccacatgtgatttttctttaaaatcagtgagatttgaaaattctcctagatctcttgaatcatgcaaatttgctttgcctttatattgtaacccttgtgggttgctaataaccaagcagtttgtagtagagttaactcaggctcgttctagggactcattcatgttcactcactgtacactcatctctggaaatgtaaaatttacttttatactattgttatgtagggctgacaggacaactggatcagtttcattaaaaaggtatgtatgcattagaaaagacatttgtatgggtcatttcaaagagggcttatgaggctgtgaaacccagagctcttaacgctgtgaccaaagatggaagttctctataggaagccatagcactcctaatgtttggtgctatgttttcctgaggagatataaaacgtaataatccaggattgttgccatgtgagagttttaaaggttaatcaaaatttctcttcttcagggcaaacttgaagataaatcttttgactccagctctttagaggatctaaagtgaccttgatggacagtggaagaaatcacaacatggaattcctcgaataacaatttattgactttaaataattttgtctaatgctacatatacacaattaaaaaacctttacactatttctagaaagtcagcatgtatttttggctcgaagtttctctagtgttttctgtggaaggaataaaaatttgagtttcagttgtgtacttcatgcttgaaaaattaagtccttctccctcagttatactcaccttatggaattcttttgcccttgctctgttttgggcataagcttcttgttttgttttttcttccttttgttgtttcacttcagctagttgattgtataacctgtaaagaatttatatagaattagagacaaacactgcaaaaagtgaatcactaaaaaaaaaaaaaaaattaaccctaccttagacccctttggtgccttagagcctgtgtagtctttctgtcttcaggaaaagatgctctgactttattcacgccctttagacgactcacagatgaacctgaggaaagaaaagtgaaatcaagttgtaaacacaaggctttaaacatttcagggagttggttgaagattttaaaaattcaacatacttatagatggtttctctttaactgttttgatttgagaattttcagagacatgaattttattccttatttctttctgcctctggtgggatctctccataaatgattttttcctctttataaatgcttcttgtaagctccctggtacaggtgtaagcctgcgaggggtttctgctgggggaaaagaaatttatgacagaaataggcaaagtatctactttccattagaagtgtggaggccgtccaaggcttacctgtagatgctgtccttggtttttctatggaaagttctgatacagctggataatctgaggcttctgttgctgatacaagaggcagaaactcactcacctaatggcaagaaagttgcatgttttactctttttaaacgctttaagcgggtcttgctctgctgtcagattagagtgcagcggcatgatcacacctcactgcagcctcaatcttagctgggtctacagagacccgccaccatgcctgatttttgtattttttgtagggattgggttttgccttgttgcccaggctggtcttgaactgggcttaggctccactgccctcacacctctaggcctctgtttagatagctttattcttattgcctccctactcccctagtaaaattaccagttgttctgaagtcatttttcaatatctgggaataagtttaggtaaaacttccaacttggcactataacactaggtgtataagattagttctgccagtcttggagacaggcataaattggagtggggattaaaagaaaatgcacaatggttgacagaatagtgaaggtttaagacaaattgagagctggtgggggtgtcggcttagttaaatgcatagcataattccctccaatgagtaccttctgataagttgtaagagacaaatcaactggtttgcttgtaatagaataaaatagaaggaaagcttaaatttacctgaaagaagcattttgcttcattctcgctcttctcttctagggttaaatttgcaaaatccatttcagcaatactggtatcagtggtgcttattaaagtaagttctggttcttccattataccatggccagtttctgtttcctgtgaaccacaattaaaaggaaaaccatgtcaaaatagccttaaaagacttaaactaatcgttttgtatataatgcacattttttgcaagtgtatataaatgtgaaaatggaggaagaaaagcaatgattggcaaagaccaacagatcagatttccttaggcttccataactccagcattcagttgtagaaatactggagcctactttggggaggggatgaaatagtgtgacaatggactgaaaggtatctaccacaatgattacaaacctaaatgcttgtagtgttgggcaaaaaatataaatgcaggttggctgtgccgaattgtatcctttaaagggagcaggggtcgactgggctgctaccaaatgtgggccactgactgctaacagataatgtttcaaaagtatctaaacacaacaagaacaaaagcagccacataaaacgtggtttagttgtaattcttattttcaatctgttatgtttatttgtggaaggataaactgcacatactgctagatgaaaaccagtcaccagttgactggtgttgaaagcaagcagattataagttgcttaatatgaggagcaggtttccaatacttattccaataatggatgaattcattgcactggaatgaggctcaacactgaaagtgctgaagcacaggcagaaccaccatttttcagggaagttggagaaaggatatctgaattgggagaaaaaggatcttttgtaaaatactctcagaagacagttttcaaatttttaagtttctgcattatgctggatatttctagtgatcacaagctggatagcaatattaacaagcagttttgcttgtattttgtttcaggtttttcctgccaggcattgtggtgtgtccaaactacttcggaagttgaggcaggaggatcccttgatcctaggagtttgagttcagcctgggtagcatagtgggaacttcatctctaattttagaagaaaaaagttttttcccaaaaaggaatttaaatgttatttatacaacactgatttcacttacccagactggtatagagctctgtaatgaaaatgatccagaacttgcaaaaagctctgattctcctagttgagatagttttttggtgatttttggaatgtctgtttcagctgaattctcaaaatatttttcattttgagtagttaaggaatatggtgcctgaattgaagttcccatctccactgttcttacacataatcgagagtcagtttcctctacctgtggatttatgtctaaaaccctacaggtttcatttttattatcttcaatgagtccttgactttgtaacattgtaacaacccctctttttgatagttcttcaaagcccatactttcctttctgctttctagttggtgttttgttgagcactcactagagttagaaccacatggagtgctatgctgtacatttaactgatcaaatacattagcttcatcagatgaactgtagactgaacttaagtttcctatagaaagctggaaatgaacaatttttttcttgttttgtaatatttcagtatgttcttcagagggatagttctgatttttcatgccttgggaagaatctcttgcttcaatgctaaaaatacttggtagatcagcatgctggctctcctcctgtgaagaatattctggctgaagctgttcaaaacattgttcagatcctgcattaagaaattcaaaaatcagttaatcatcgttacatgttgtaaaagttggatactgacagtctctaatagtttatcatccaattgcaagtaacctacaattttaggcataaaagttgatgtgtataaacatgaatacaaagataaggatggtcacagtgatttctcaaactacagctcacaccaagtattttttctttttctattaatatttaataaggacaatatggctataaactgaggatgttttcctctataagaactgaatatgactttaataacagaaaagagaataaagcatccatgtgtatctcaattatccatgtgtgtatatataattgtacatccttgtgtatctcatgtatgtttgtgtgtatatataatcattgtaccaaaggctcaagaatacttgttttctatgttgcccaggctggtcttgaactcctgggctccagggatcctcctgccgcagcttcccaaagtgctaggattacaggcgtgagccactatacttggcctaagaagaatacttaaactggctgggcatggtggctcacacctgtaatcccagcactttgggaggccaagacgagtggatcatctgaggtcgggagttctagaccagcctgaccaacatagtgaaaccctgtctatactaaaaatagaaaattagctgggtgtggtggcacatgcctgtaatcccagctacttgggaggctgagtgaggcaggagaatcacttgaacccagcaggcggaggttgcagtgagccaagattgcaccactgcactccagcctgggcaacaagagtgaaactcagtcttcaaaaacaaaataaaaacaaaaacaaaaacaaaaaaaacaaacaaaaaaataaatacttaaactgttaactatcacataatgattgaggtagggaaattgaggaacaagaggcaacacttttccttttatttcataatgttcagtattgtttaaaaaaatgcatgtattacttctgtaatttaaatattttttaacacccaggataggggtgagagcaggggtgaagacaaaccaagaggtgctaggcttaatttctaaggaaatggatgtaaaaaatcatggaaaaattaactttttctaacttagtcatacatacccccaataatattttctgtagcaaaactgtgagctccaacatgagccaagttagtgtcaggttgttgattcggacttgtgttaagagaagaatgcatgctggtcctcctcagtgctgtgaaataaactgtacttttggataatccagtagcacagtggctttcagatgaagaatctgatctctggcaggaaacaaaagggaaaggctgaaatactgattaggtattaacaattgaaacaataatcattgtgttcctttggtattactcttccttaattatcacttcactatgacagcaatgatttgctttttcaaatccagttcttttcaatcaatatgaaagagactttaaaatgtcaggccatcaggaagtggaagcaaaaagactcaggtttaaatctcagctcctttgactgtgtaggaggatactttaaattttgcaaaattgtatttactttactgtttaaatatgttccacaactaaaagttgttattaagccttttatggcatcatactccctaggtggagacaggtggatgggacaaacaaaattctaatgtagctgttttcctttttttttttttgagatggggtctcactatgttgtccaggctggagtgcagtggcacgatctcggctcactgcaacctctgcctcccaggttcaagcggttctcagcctcccgagtagctgggactacaggcatgccatcacacccaactaatttttgtgttttttagtagagatgggatttcaccatgttggccaggctgatctcaaactcctggcctcaagcaatccacctgcctcagactcccaaagtgctgggattacaggcatgagccaccgcacccggcccaatgcagctgttttcaaagttggttccacattagaatcacttggggagcttaaaaaataataataataattagtactatctgagcactcccagaaactctgctttaattggtctagggtgtagtctggacaataggatttatttttattttttatttaagttttccatgtgattctttttgtttgtttgtttgtttctttttttaaagacagggtctggctctgtcacccagactggagtgtagtggcacgatctcagctcactgcagcctccacctcctgggctcaagtggtcctcccacctcagcctcccgagtagctgggactacaggtgcgcaccacgacacctggctaatttttgtattttcagtagagacagggttttgccatgttggccaggctggtctcgaactcttggcctcaagtaatctgcccgccttgggctctcaaagtgctgggattacaggtgtgagccactgtgcccagacttccatgtgattctaggtaagggtttagaagaacttttgttccagtagaagaaatggcttaaaactatttttagatattcactgcaatgggacatctactttaatatacctggtaaaagtctctgttgtctggagaaatcccagaggatgatgatgataagtcaaaatctggatgtggttctaagggtttaaacagctgatgatgcaaattaggaaaaatgtgttccaattctggaaagtcaaggtcaactgttagaatttttgagggaaaaaaatcataaatttatttttaaggtaaacactagaaaaggagtattaagaacatattcataaacgcttattttcaggtaactccagtgtaacaaaaacttcagtttttcccccatgatcagcagatgctttaaagttaagtcctatcatgattatttcaaaggtccaaaatatggatcctctcagtgaccaaaactttttaagttttatttttagagaaatttaatttttttaaatttaaaaaatttttttttaaaatagagatggggtctcagtgttgcccaggctggtcttgaaatcctgggctcaagcaatcctcctgcctcagcctcccaaagtgctacgattacaggtatgaacaaacttttgacaaatacgaatttccatttccacagccttatgaggctaatgaggatcaacaggacatatgtaaccactgcttcagtataagcttaaaaaaggaaaaaggctcactgtattcagtgttactatgggccagacattgtgctttatgtgcactatctcatttaatctataatattcctcttttataaaagattaaaaagtaacttgcccatggttttacagctaggaaatggtcaggctatgactcaaatccagaactgtatgatttctgagctcctgctcttatttatcagtaataccgcctcagccgtaatagctaactctgcaatggcaaaggaagatttgctaattaatctcctataaatgtgcctcagtgagtctaattggttccagatcccctttctcactaaatgccctcaatatattctgtggtaaaacggtgttgtagcaggccataagaacatgaagctcaaacaatcactgcataaaatttaaaatgatgaaaggtgaaaatttaaaacttaatttacataaaagtattgctttaaaataattttaccttgcaaatctgttttttcaggtatcaaatttgcttcattaatgtacttgtctatcatttgctgaaagtgtgtgtgaccacatgtagtttcatccactgcaggcaacagagatttatgaacgtctgaagagttctgccgctgataaatatcttgtgttgaaggaactatggaacttataatatttgtttcctc

SEQ ID NO: 6886 - DNA, 357 bp, Homo sapiens
ttctgagctcaggtcaagtgtagaaaccatcatagttacaaagatcagtagtaaaaccttttcatcattgcccagaaatgattaggctttcatagacatacatacgcacccccccaccctcaatctcattcattcctacagctgttatctttataaacacatgtgcgtacacacacacacacacacacacacacacacacacaccagacatatgcccttattgttttacattgttttatagttttgcttctcagaactgtagagatcatgcatcaggtagactggaaagacttctgatgctcagatttggctagtttcatcattgatccacttcactaaaagcagatctcagaaagc

SEQ ID NO: 6887 - DNA, 357 bp, Homo sapiens; identical to SEQ ID NO: 6886

SEQ ID NO: 6888 - DNA, 357 bp, Homo sapiens; identical to SEQ ID NO: 6886

SEQ ID NO: 6889 - DNA, 3786 bp, Homo sapiens
ctgaatctgtaaattgctttgggcagtatggccctttcaacaatattgttttttcctatccatgagcatggaatgtttttctatttgttatgtcatctctgatttctttgtgcagtgttttgtgactttcatcgtagagatcctttacctccctggttagctgtattcctagtattgtattctttttgtggctattgtgaatggaattgcattcttgatttggctgtcaccttggatgttgttggtgtataggaatactactgatttttgtacattgattttgtatcctgaaactttgccaaagttgcttatcagatcaaggagcttttgggcagagactggaattttctaggaatagaatcataacatctgaaaacaggaatagtttgacttcctctcttcctatttggatgccttttctttttttttgtctgattgctgtgtccaggacttccagtaatatgttgaattggagtggtgagagaaggcgttcttttcttgctccagttttcaaggggaaggcttccagctttgctcattcagtatgatgttggctgtgggtttgtcatagatggttcatattattttgagttatgttccttcagtgcctactttcttgagggtttttaacctgaagagatgttgaattttatggacagccttttctgcatccattgagctaatcatgtggtttttgtttttagttctgtttatgtgatgaactcacatttatttatttgtgtatgttgaaccaatcttgcatcccagggataaagcctgcttgatcatggtggagtagctttttgatgtgctgctggattcagtttgctagtattttgttgaggaccttggcatctatattttattaaggatattggccttaagtttttttgttgttgtgtctctgccaggttttggtatcagaatgattctggcctcacagaatgagttagggaggagtccctccttctcaattttttggaatagagtggtaccggctcttctttatacatctggtagaattcagctctgtcaatttctgtcaattgcctgtgttgaaatccaatgactacctcaaactatttctaatctcttttacatttttacccaaccaatttaatttcttggattcccacatattccttttttttttttttttttttttttttttttgagatggagtcttgctctgtcgccagactggagtacagtggcgcgatcttggctcacagaaacctctgcttcccaggttcaagggattctcctgcctcagcctcccaagtagctgggactacaggcatgcaccaccacacccagctaatttttgtatgtttagtagagacgtggtttcaccgtgttggccaggatggtctcgatctcttgatcttgtgatctgcctgcctcggcctcacaaagctctgggattacaagccacacattctattcttaccagcttgacaaatggagtacctactgctcattgttcttctcattggccatacctccctaccatgcttctataggtagaacaacatcaaagtatcatatgcctcaaactcaactcaggtgtttgtaaccaagcttagaatccccttcactggcccatttctgactaaaaaggaggtcatttcaggcactctctgaaacatgacctaaaaaaacccatgtccacattaaaaccacactagattttctactttatagcaaatttcattgtatcaaatatgaattttatttgaaagggcctttgattaactcgagcctgaaaatccaaagttgtatcttaacattgaaatttgtatgtataagtagactctacatcctgggaactttgggttgtattgcttatgtgttttctctttgtatgaaatagagtgaataaactattgcctatttagaaagatgatatggaggcctactctgactaggtagacatgtgctttatgttgcttttctagtgcaagagctgcagtttcatgatgcatgcacatcctgttgcctgttttgttttactacaaatggcccactgggaatattcccttcagttaagatgtactgagcacccagcatgggccaactagcatgataggcaggttagtagtgtgtgtgtgtgtgtgtgtgtgtgtgtgtgtgtaaaatacaatattatatataatatacatattatactatattttatatatatcttatatatactagatatataagatatatataaaagaaatacaacgtttgcccattatactaactgaagatacttgtgagttaggctcatcccaaactgtccagtatttgcttctcttagaaagtccaaaagcttttcatgtaacttggtgggctttctccctgacagaagcatttcacatatgcctactctctagcatgtcattcctgccacatatctcagccatgggcatctcactctcagctagtgcagcctatcttgatacctgctcagaacttggtataaacaaaactctatatacttcatgttgcatgcagtgagctaaaggaagctttgcttactttcacagattacaggtttattttataatcatgccatgaacacaagtcagagtaatctgattctttgctgcagtggcattagagcactgatagcacactctcctttttcagggagaatgttgtgtgtctggttgactggataaactcttcagtcttataggatttgaaagaacataaaaggcaggcatttatttactataataaaacaatagactttgcaatgaattctgtaataactgccttttaatcctcacagtcccccacacacacacacgagaactttataccccccaaaaaaaagttaaacgtcacacttactttattttatatctctgaagttggtcttcaatcaagcaaaaaaataagggataaagtgaaaggaaatttgagaaaagatcctgcaagaagcaagctgagactagaatttcataaaatccatttctagccctgtcagctgcctgcctcattaccttagactttcatataatcttttaagtctttagttcaatctttctactcagttatttttcttcagtttcttgtaaccttcaaaaatgctaacaatagaaatcacaggccaacctgaagttaatccagtaccttgtaaccacagccttttaccacccttaactgagctgtgtgtgggtggcttgcatcccacggttggtactctgggcttagagagtccttgcatgctatgtgggtggcgttcatcctgtagtgttcctacgggtttagggagtccctttccagtacccaatcagatatacattgttctttatatgctgggctgaaagattccatacttttgtttctaggaattcaggaccattcaactaagataatacggtataatgcagggaccaacaatctttttctttttgggctatgctgtctgtgttgcagctatgcggctctgcctttgtggtggggaagtagccatagacaacatatatataagtgaatgcatgtggctgtgttccagtaaactgtatttacaaaagtgggtggcaggccacatttggccctcaggccgtactttgctgactcctggtatctggacaagattgctgggtttcgagctgaggtttcacatggggcttgagacccatataatcacagagtggtctcaaatgggtctcatacttttgtatgtatttgtaaagttcacggtaatagcacttgccatgccttccttagaaagttacatgggataatttaatttttaatttttgttaacattctatagacttaaaaaaa

SEQ ID NO: 6890 - DNA, 502 bp, Homo sapiens
tttttttttttttgtatttttagtagagacacagtttcaccatgttggccaggctggtctcaaactcctgacctcaggtgatctacccgcctcggcctctcaaagtgctgggattacaggcatgagccaccgcgcctggcccaggagtcacttctaattcctcacagctatcccagaatgtctttgaacacaggatttagtgacagaaccacaacaagccatatgagagccccacactgggcggtacactgcacctggaaatgtgcgtgtgaatgtgattctaatctgaaaccccagcaacagatcacctagcaaagggaacaaatgtgaaaggagcctttttgcctgcgtgtacagcttcaggaagaatgcagaggagaagaggaggatgcccccagggtctgtgatatttttatatcaactccggcagtcaatgaggtgatgggtattataggtattatagctggtttccctcccatctaagtgttcccatgtgaaaatg

SEQ ID NO: 6891 - DNA, 886 bp, Homo sapiens
aagcatagtacccaataggtagtttctcagtcctcaccctcttcccacccaccaccctcaagtaggtcccggtgtctgtttttcccttctttgtgttcatatgtgctccatgtttagctctcacttataagtgagaacatgcagttttgattttctgtttctgaatgaggttgcttaggatgatggcctctggctccatccatgttgctgcaaagaacgtgagttcattcttttttagtattccacggtgtatatgtaccacattttctttatccagtttaccattgatggacatttaggttgattccatgtctttgctattgtgaacagtgctgcaatgcacatatgtttgcatgtgtctttatgttagaatgatttatattcctttgggtatatactcagtaacgggactgctgggtcaaatggtaattctgttttaagttctttgagaaatcctcaaactgttttccataatggaagaactattttacattttcatcagcagtgtgtaagttttcccttttctccacaacctcaccagcatctgttattgactttttagtagtagccattctgactgatgtgaaatagtatctcactgtgattttgatttgcttttctttaatgatcagttgtgcttagcattttttcatatgcttcttggccacatgtatgtgtactttcaaaaagtatctgttcatgtcctttgcccacttcttaatggggttgattattgcttgtaaatttgtttcagttcctaatagatgctagatattagacctttgttgaatgcatagtttgaaaatatttttcccataatgtaggttgtctgtttactctgttgatagtttcttttgctatgcagaagctctttagtttaattagg

SEQ ID NO: 6892 - DNA, 6245 bp, Homo sapiens
cccagcagtccaattacaacacagtcagcactagcatgaatggatatggaagtggcgccatggccagtctaggggtccctggctcgcctggatttcttaatggctcctccgctaactctccctacggcagtaagtgtctgtttttgtcacacgtcatcacgcagattcatattcactaccgagtcgagtgtgtgcattgcttggatgttctgtgatgtgagctactggataaaaggaagggtggccctggaggctgggcgtccaaatggcgaccgtaaattgacccaaaacgggcccgatgtgatctcattggaaaccaaaacaaaatcagaacaaaatgggctgctcaattggaagggaaagtccagtgcaaaagagcttgcctgttatccagagcgtggccgagccagacgcatgtcatgttttgttttcgtgcccctgcccccccgtccgaggcgaggcctttggtgccctctcgccgtggcgctgtgccgcggccgcgcgtgctgaccgtgtttgctttgttgcagtagtgccgtccagccccaccatggcagcctcttcggtcaccctcccttcaaactgtagcagcacacacggcattttctcattctcacctgccaatgtcatctccgcagtgaaacagaagagcgccttcgcgcccgtggtccggccccaagcctctcctcctccttcctgcaccagcgccaacgggaatggactgcaaggtgagggtggtgcggggccgtgggccagtgctgggtcctctccaggggtggggatgggagtgggggtgggggctcggcctttctcctggcacctctgtgactgctgcatgttctcccgtggcccaccttgatgcgtgccacctctgcctggtgttcacagcgaggacccctgtgcactgagccccagaaaggaccagattcctcctcttggtttttgtccagctcacccttccgacggcacctagtgtacttacggtggagcaccctgtgcccctaagggggtgggaccacgtaagagaaggcgggagtgtggtgaaggtagctgtggtcactgtcggtctgattcagccaatgggcctttgcccggggcctggcacttctcagcgcaggatgctgccctgcccatagctcctgggcttgcagcctgctatgcacaaagcagcgaaaatagccctggcatgggaatggcggggcaccatgctacctgtggagcccatctcaaaatctgctaccctcgttgtcccgaggctgggccttggttctccaccttatctgctgggccacacatccagcagggctgcactgtcttttggaaagaggtgtgcgtctagacccagggccaggtgtgtaccaacaccaggttgcagtcctgtctgtggacaggagctgattttcctacgtgatctctttcaaagaatcaggagggagaagggccggccccgagggcacagctgtccacagatgaggccacacggggtgggcaccctgtgcctgcccagcgcctggcccatctgagctgtgcaggctgcacgtggcctgtgatgtgtgtgacgggcagagccacatgggtgcccccaggcctcatgaacttgcgagtggccctttgtgaggtgctgaggcccgcaggcacttaaattaagtggccgtcatctggcctctttcagacaccacctttggtatatgctcctcccagtgactcaaatccagttactcctttagaaacatgaacccattcaaccagtatttactgagcacctactatgtaccaggctctctgctgggtgctgaggacgtagccgcggagaagacaaactggcccttttgtgaagtcggtggcatatttcactttgatgaactaatgctcaaaaaaggaactggaaaggtatcagtgatttgaaatcattgtcttcacaacatccgttagcgtatgaagggacgcccaggcccccgaagtgccgccgactggcctgcgtgccatcagcgggcaccacaccagggtcgttgcagaggcaggtggtgaggtgccgcggccctgcccgtgacacggggtcgggccggctgaaagacggcacctcctacgcggtgtgtacgcacagggcttccaaaccgtaaagttgtaacggtgagtcggagataaattaatattgttgaaattaatgaactgagaaattgaagctcacgtcactacatgaacaaatgtattaatatgttatacataaattaatgagaacgatcattctgacaaaaattaaacaacaccagcggtaaaagattttaaattacattcgtaccaggagttcatgtgaaagcgtcagccccacttggcgttttcgtgcaaagttttctcttctttcctgagaagagaaaaaaggtcccgaggcggtgccatgactcacgtctctccgtggcccttgcctggaggttccagggcaggtgggctgtgagtggctttgattctggagagcccctgactcaccattacgatacagagagatgaccgcacggtcagagcccagacctggaagcagagggggaaactgaggccagtctggttctcacatagggagcgagagcagggcctgtgagccggccttgactggcgtcacgggagtgaccaggctgggtcacctctctcgacagagggggctccgggcctccgttggctttgcacctgttggcagtgcaccggtcagtgtggggaagctgcagcctctgcacacagcagtgccaggagcccttcccttttccaaaagaagcctttaaagaagcctttgaggagggctgcaggaggggcaggactgggggttgttgtccccacgtgtgcccccacctcaggaagcagattccccagcacgccctaaccacgcccgaggctggtggacggaactgtgcaagaccagcctcccagttgaataggggggaagggcagccccgcccgcgtcagcgttggcgggagggcgcgtgggggagcctgcagtaactgctctgtccttctgtcttgcagctatgtctgggctggtagtcccgccaatgtgagggacttctgtttaccttccgcagcacccagcatcaaaggacggacttcaggggacacgtttagtatattaagacatgctgatggaaacagtatcttcaaaaaaatcagcagcaattgaaatgctacaaaagactttgtttaaagattttatttaaactattaagaatcaacatgcaaacagcctacttcttcatgaacaattccattttattgactgaacttttctcatattttcacatttctcagtcctgaagaataaggaaaacaaagcgacgcctattttgtataaagtttccgactccgtcttggccatgtctagtaattgctatgtgttgggagaaactttgtgaatgcaccattttgatgatcatgaaacgctgatgaaaaatgcctccaaacatttttctgtactcatacttagattcacaatggttgtgtatctctataatgtgaaatatttttttgtggtgataaaaagagggccaaggaggtatgagccatcagactggaaaaaaggatgactatatgatgaggagaaactggggtggcagggagggagggagggtttatcactgcttaacttcatcttcatgaaatgaaactttgtaacttattgtagttagaaattgtaactttgatattgaattctcttgccttcaacaagcacactgacagagaaaaaatgctactgtctgttggttccaatattctcccactgctagagcttcctgttaagcaagtgtgatctgcaacattttttcaacttttgctagcactgtatactattgcattcttaggctactgtgaggtctatgtttcttgtaccagaaattgtccttttgacttctagatccttcttccctaatgtgttttgtatgtggttataaaattgtagacttttgtgattttgccaaagttgtagctaaatatttatacacttgtcttgaatttttttcagatccacttaaaatatttagaaaaacaagttttattccttatgtgtcttataaggaataaaatggtcttcatttgacacttactttcccatgaacacttgcagttgctaagggactttattttgtaacatatcaattataaatattgtatttatctttgaaattttgtacattgcttttcccaccttttcctttttcttctttcttgtctgtattggtttttgatcacggcctggtgttgtgatactgggaagagcattagccaagaacttgtctctttgatctgtttcgttaagctgaaccagtgtctttacatttcatttgtacttcaaaaaatatgctattgtttagactttccatcctttttttttttattttgaggaaaagtcaaattcattgtttatttttatattatttttaagttatctgaacaaatacttttgaaaaaaaagtttgttgtatagtcaaaacaaatcggtgccacccggccgtgacaaatcctagtagattctgtgcatgtggagcggccgcgaagaggtgacaccgtttggggctgtgtccttattttattttatttttttgtagaatgtaaaaagtcattttagatgccacccattgactttgccacatagctgaactgtgtttactggaaaaattcagaggcctaaagtttaaaataaaatttacttctgatgttttaattaaaatgtttgccacattaacttttctgatgccttaaaagtgaacttctttaaagaacctttgtgctattttatcacaggcttacactacaattgttaataaatacttcatttggagatgtatggtgtaaaacacacaaacacacacaaaaaagcacaagcccgctgcatgacccgtctctcctttctgggactatttctgctgcgtcctgcaccctcctgggcccacctccgattcacagaggtttcagggggacccaaatcactgctggttttcaatttttttttaacaatacatttttgtggtcagttccaacagcactgtccgtacttttaaaactggaatgacctccttcagatatcgtgcctcttagtgccaaacccacagtgagaccaaaagtgtcaggtgtttttttttttttctttctcctttgcactaagtgctttgcagacacggcacagcaaacattttgcaaactgcagcagaaatcgaatttaaaacaaaaaggagggactttaaaataccttcttgacaaaaatcaacaatgcacaacttacaaagtgttcattctagggacaaaattaaataaacagaatgtccccaggagtcagcaggtcacagtctggctttgtgatggttgacaaggtctagctacatgggaaagcctgagaagtcactttggaactaaattgcctccattttattttgtacgagtaagggtttgatctacaaaagagctcacatggacgcactgagaacgcctgccagcttccccatgccctcacttggtttgtgttttaggttaagtagtcaatgcccacatcacttcactgtctcaagactgagcacttcactaaatggtagattttactgttaaagaccctacaataagattgttttatctgtacattttttcagatatttaactgtataaaaatgttcattttacacaatatttaattaaagtatttcttgtctgtgaatttcacttttggtaattttctctgtttttgattattaaaatgactaaacactaacataaaagttacatcaggggtttcatttgcacagaccgggttctgaagctgcaacttggccaagataaaaatgttccacagaggaactttccacaaagttatccagcctccgtcctctaacctgcatagaaagagaggttcagcaaattgtcacttacgtggtcctgacccccagaggtgccatctgtattcatgctgcactctggctgatgtttctgtgtcacagatgttctgtgggccacagcagcactggggtgacacaatcactgttccagcacttgtctttgagaactcaaacaatcccaaggctcactgaggggcttcataacccactccctccagaccttctgccccagcccctctgcttctgaatagcgcactgggcaggtagagaacaacggctccggtgaccccagacacatgcttcttttggttccatggttgggttccactgggcaagaaccaggcttagaagagtgacacagcagcaaaggctctggatggg

SEQ ID NO: 6893 - DNA, 4798 bp, Homo sapiens
ccgagggcacagctgtccacagatgaggccacacggggtgggcaccctgtgcctgcccagcgcctggcccatctgagctgtgcaggctgcacgtggcctgtgatgtgtgtgacgggcagagccacatgggtgcccccaggcctcatgaacttgcgagtggccctttgtgaggtgctgaggcccgcaggcacttaaattaagtggccgtcatctggcctctttcagacaccacctttggtatatgctcctcccagtgactcaaatccagttactcctttagaaacatgaacccattcaaccagtatttactgagcacctactatgtaccaggctctctgctgggtgctgaggacgtagccgcggagaagacaaactggcccttttgtgaagtcggtggcatatttcactttgatgaactaatgctcaaaaaaggaactggaaaggtatcagtgatttgaaatcattgtcttcacaacatccgttagcgtatgaagggacgcccaggcccccgaagtgccgccgactggcctgcgtgccatcagcgggcaccacaccagggtcgttgcagaggcaggtggtgaggtgccgcggccctgcccgtgacacggggtcgggccggctgaaagacggcacctcctacgcggtgtgtacgcacagggcttccaaaccgtaaagttgtaacggtgagtcggagataaattaatattgttgaaattaatgaactgagaaattgaagctcacgtcactacatgaacaaatgtattaatatgttatacataaattaatgagaacgatcattctgacaaaaattaaacaacaccagcggtaaaagattttaaattacattcgtaccaggagttcatgtgaaagcgtcagccccacttggcgttttcgtgcaaagttttctcttctttcctgagaagagaaaaaaggtcccgaggcggtgccatgactcacgtctctccgtggcccttgcctggaggttccagggcaggtgggctgtgagtggctttgattctggagagcccctgactcaccattacgatacagagagatgaccgcacggtcagagcccagacctggaagcagagggggaaactgaggccagtctggttctcacatagggagcgagagcagggcctgtgagccggccttgactggcgtcacgggagtgaccaggctgggtcacctctctcgacagagggggctccgggcctccgttggctttgcacctgttggcagtgcaccggtcagtgtggggaagctgcagcctctgcacacagcagtgccaggagcccttcccttttccaaaagaagcctttaaagaagcctttgaggagggctgcaggaggggcaggactgggggttgttgtccccacgtgtgcccccacctcaggaagcagattccccagcacgccctaaccacgcccgaggctggtggacggaactgtgcaagaccagcctcccagttgaataggggggaagggcagccccgcccgcgtcagcgttggcgggagggcgcgtgggggagcctgcagtaactgctctgtccttctgtcttgcagctatgtctgggctggtagtcccgccaatgtgagggacttctgtttaccttccgcagcacccagcatcaaaggacggacttcaggggacacgtttagtatattaagacatgctgatggaaacagtatcttcaaaaaaatcagcagcaattgaaatgctacaaaagactttgtttaaagattttatttaaactattaagaatcaacatgcaaacagcctacttcttcatgaacaattccattttattgactgaacttttctcatattttcacatttctcagtcctgaagaataaggaaaacaaagcgacgcctattttgtataaagtttccgactccgtcttggccatgtctagtaattgctatgtgttgggagaaactttgtgaatgcaccattttgatgatcatgaaacgctgatgaaaaatgcctccaaacatttttctgtactcatacttagattcacaatggttgtgtatctctataatgtgaaatatttttttgtggtgataaaaagagggccaaggaggtatgagccatcagactggaaaaaaggatgactatatgatgaggagaaactggggtggcagggagggagggagggtttatcactgcttaacttcatcttcatgaaatgaaactttgtaacttattgtagttagaaattgtaactttgatattgaattctcttgccttcaacaagcacactgacagagaaaaaatgctactgtctgttggttccaatattctcccactgctagagcttcctgttaagcaagtgtgatctgcaacattttttcaacttttgctagcactgtatactattgcattcttaggctactgtgaggtctatgtttcttgtaccagaaattgtccttttgacttctagatccttcttccctaatgtgttttgtatgtggttataaaattgtagacttttgtgattttgccaaagttgtagctaaatatttatacacttgtcttgaatttttttcagatccacttaaaatatttagaaaaacaagttttattccttatgtgtcttataaggaataaaatggtcttcatttgacacttactttcccatgaacacttgcagttgctaagggactttattttgtaacatatcaattataaatattgtatttatctttgaaattttgtacattgcttttcccaccttttcctttttcttctttcttgtctgtattggtttttgatcacggcctggtgttgtgatactgggaagagcattagccaagaacttgtctctttgatctgtttcgttaagctgaaccagtgtctttacatttcatttgtacttcaaaaaatatgctattgtttagactttccatcctttttttttttattttgaggaaaagtcaaattcattgtttatttttatattatttttaagttatctgaacaaatacttttgaaaaaaaagtttgttgtatagtcaaaacaaatcggtgccacccggccgtgacaaatcctagtagattctgtgcatgtggagcggccgcgaagaggtgacaccgtttggggctgtgtccttattttattttatttttttgtagaatgtaaaaagtcattttagatgccacccattgactttgccacatagctgaactgtgtttactggaaaaattcagaggcctaaagtttaaaataaaatttacttctgatgttttaattaaaatgtttgccacattaacttttctgatgccttaaaagtgaacttctttaaagaacctttgtgctattttatcacaggcttacactacaattgttaataaatacttcatttggagatgtatggtgtaaaacacacaaacacacacaaaaaagcccaagcccgctgcatgacccgtctctcctttctgggactatttctgctgcgtcctgcaccctcctgggcccacctccgattcacagaggtttcagggggacccaaatcactgctggttttcaatttttttttaacaatacatttttgtggtcagttccaacagcactgtccgtacttttaaaactggaatgacctccttcagatatcgtgcctcttagtgccaaacccacagtgagaccaaaagtgtcaggtgtttttttttttttctttctcctttgcactaagtgctttgcagacacggcacagcaaacattttgcaaactgcagcagaaatcgaatttaaaacaaaaaggagggactttaaaataccttcttgacaaaaatcaacaatgcacaacttacaaagtgttcattctagggacaaaattaaataaacagaatgtccccaggagtcagcaggtcacagtctggctttgtgatggttgacaaggtctagctacatgggaaagcctgagaagtcactttggaactaaattgcctccattttattttgtacgagtaagggtttgatctacaaaagagctcacatggacgcactgagaacgcctgccagcttccccatgccctcacttggtttgtgttttaggttaagtagtcaatgcccacatcacttcactgtctcaagactgagcacttcactaaatggtagattttactgttaaagaccctacaataagattgttttatctgtacattttttcagatatttaactgtataaaaatgttcattttacacaatatttaattaaagtatttcttgtctgtgaatttcacttttggtaattttctctgtttttgattattaaaatgactaaacactaacataaaagttacatcaggggtttcatttgcacagaccgggttctgaagctgcaacttggccaagataaaaatgttccacagaggaactttccacaaagttatccagcctccgtcctctaacctgcatagaaagagaggttcagcaaattgtcacttacgtggtcctgacccccagaggtgccatctgtattcatgctgcactctggctgatgtttctgtgtcacagatgttctgtgggccacagcagcactggggtgacacaatcactgttccagcacttgtctttgagaactcaaacaatcccaaggctcactgaggggcttcataacccactccctccagaccttctgccccagcccctctgcttctgaatagcgcactgggcaggtagagaacaacggctccggtgaccccagacacatgcttcttttggttccatggttgggttccactgggcaagaaccaggcttagaagagtgacacagcagcaaaggctctggatggg

SEQ ID NO: 6894 - DNA, 453 bp, Homo sapiens
cgcctgccttgacctcccaaaatgctgggattacaggagtgagccaccgtgcccagccagatattgcacactttcaaaagcgtcagtaaatgattttctaggggaagctctttgcccattaagaaatagatttggtcatggtctgggcaagggacagtgggatgccaccatggtgggcccccgagagtgcggccagctgggccgggcctggggtgacaggccggctcccacttgctcctgctgcaggagatcatcttgaagcgagcggcggacatcgccgaggcgctgtacagcgttccccgcaatcacaaccagatccccaccctgggcaacaaccctgcacacacgggcatgatgggcgtcaactccttcagcagccagctagccgtcaacgtgtcagagacgtcacaagccaacgaccaaggtatgccagcatgctgggaggacccctgc

SEQ ID NO: 6895 - DNA, 467 bp, Homo sapiens
gtccagccccaccatggcagcctcttcggtcaccctcccttcaaactgtagcagcacacacggcattttctcattctcacctgccaatgtcatctccgcagtgaaacagaagagcgccttcgcgcccgtggtccggccccaagcctctcctcctccttcctgcaccagcgccaacgggaatggactgcaaggtgagggtggtgcggggccgtgggccagtgctgggtcctctccaggggtggggatgggagtgggggtgggggctcggcctttctcctggcacctctgtgactgctgcatgttctcccgtggcccaccttgatgcgtgccacctctgcctggtgttcacagcgaggacccctgtgcactgagccccagaaaggaccagattcctcctcttggtttttgtccagctcacccttccgacggcacctagtgtacttacggtggagcaccctgtgccccta

SEQ ID NO: 6896 - DNA, 4971 bp, Homo sapiens
aatcagtgggattcctttggatgatattgaatttgctaaggtaaagccctgagaatgttgcatctgtgtattgtgcatgataaacacagctagtggcatgatttattcattcattctttttctttttagggtagaggaacatttccctgtgatatttctgtccttgatattcatcaagatttagactggaatcctaaagtttctaccctgaatgtctggcctctttatatctgtgatgatggtgcggtcatattttataggtaacattcacaatgtttttgttgctgttagtaatacatttttggcgtgcatacatatcttattttccataaatatctttactgtttttatgatatggagcggcactaaccggtagaaatacagtgacagccaaacatgattataatttgaagttttctagtagccacattaaaaacaataaaaagaaacaggtgaaattaattttaaaaatattgtaaacccaatatatccaaaatatgatcattacatgtcatcagtataaaaaatcatttgtattttgcatttttttattgtactgagtcttagaaatattgtatgtctgttatatttccagcacatctcaatttgaaccaggcatatttcacaagctcaatagccacatgtggctaatggctgttgtattggacagcacagatgtagaggaaaaagaatagtcattggagcctcacaaatctgggttcaaaactagctttctgatttacctagctcctcatctataaaattgcaacaatgatgtctaccttgcaggattttatgagaattagagctgttgcatgtaaaataactggcacagtgcctattatagatgttcaataatgatagctgttactactgctaataacatggaagttattctccgccacttttagaagtaagcaatatgttcctgtgattaacaccttagaaatctgggacatctcagtatataaaataatattacttcaccagtaacagatttcattatcttgctgaggagcatcatagcattcaagcatacattaatagaggtggagggctctactggactaatatgtgattaatattttatatgtagggataaaacagaagaattaatggaattgacagatgagcaaagaaatgaactgatgaaaaaagaaagcagtcgactccagaagactggacatcgtgtaacatactcacctcgtaaagagaaagcactaaaaatatatctggatggagcaccaaataaagatctgactcaagactgactctgatagtgtagcattttccctgggggagttttggttttaattagatggttcactaccactgggtagtgccattttggccggacatggttggggtaacccagtgacaccagcactgattggactgccctacaccaatcagaagctcagtgcccaatgggccactgttttgactcggaatcatgttgtgcactatagtcaaatgtactgtaaagtgaaaagggatgtgcaaaaaaataaaaaaaaacaacaaaaaaagctaaccttctattagaaaaggggacaggggaatgagtaaacttcttttattgcggacaaatgtgcacatagccgctagtaaaactagcctcaaacaggatgctcatagcttaataataaaagctgtgcaaaggccatgaatgaatgaattttctgtttatttcactgatgcacacattacctcattgacaattcagaagtaaatccaacgtgtgttgactcttggaaagcagcaaaaacaggagctgaagaaaagaaattcttggaaccagccgtaacccagtaaggaattgtgaagttgtgtttttattttgtttcattttttgcagagtattaagaacattattctggaacatcagaacgtttcccttagaccgatcccagcaggtggcagctcagattgctgcagtgttgtaattataactgattgtacttaagttatggatgtagagaatatgtttcattcatttattcagcatgtaaataaaattgatcctgttgagttatcataattgcagttcaactatctgccatgattattcttttcacgtatcattcattctgtacatttgtgtacattgagaagtatagcaatctatgtaaatgtaatcctcagtgaggttcctcagtgctaggtcccataggattgtcgttgcccttgttaatgaggtttctctgttcagcggcttcaatttttttctctttgtacatctagttttgaagatttacttcaagtttgaatcttctagaatgcttgtaagtccagttttaatttttagagtcaatttgtagttacatgtagtttaacttttgggaaacgtcttaacattgttctgaataaacttgctaatgaggtcaggtcatggtacagactgatgcagtcaacatgatttcattgcagagtttattagtatcagcaagtttttgctttgctaaataaaagtactcaatgaacacaattctacataaattttgacataccatctaatttataaaaatcaataaaaaaggttttggtaaaactttttcatgccagatgctgtttacaacaatgaacatgccaataaaacatttgttcattctgttgtgttattttagtcattaaacttctgtggatgaagaatctgggttaagaatagatttgtcatctttaaatatgacattttgtaatgtgtattggatatctcatttctatgataaaggtatatttacagtaaagttctcataagagaaatgaaaagctgtgttaatatctaactttggggaaccctgtcagtatttcagatccgatttttaccctttttttcttataagaaagataaaattagaaaatactgttagcaaatgtggctctgccatttgaatataatcaccgagaattccatgtcttaaaagtctcctggaatccacaatgaaaaaaaaaatcttttctaaggtatttttctggctaatttttatttgaagaaagctatagcatttagcgaaatttgactgaagtaatgttctgagtttgcattagtgggattggtgatgttctcagaagaaaattggaaacacttgtgatgaattgtctttcagatcacttagattttctgatgtaagaggacagctgtttggttctgatacaggcctgcttacttgggatgtagggttagtaaatggggtttctgctttaaaggactgacttgctatcacacaaaagaggcagacttgtaaacacaatgggctttggagtttggtctgattgggtttggtttagtattcctatgagcgtaaatggtaaaattcttctgatacccactctttagactgtgccttctgctctgttctttgttttatgtttaactgctgtttctaattgcaggtgtattacagatacaaataagagtaaagaaaatatatttcattatagaaaagaaaaaattaaaagcttcttgcttttcagtgcctgatagagtgaaaacacaaagttgcactttaataatttcaataaaagctaatctgtgtcagcctccctctgcttcagagagtcaggtgagcatccataacctaacaggcagagccctagcgatgtggatcaagtttcctgagcccgggggcggtggagcctcatgatctcttatcttttgaggctgaggcaggtcacatgcaacaaattgtgaccctgctccccacaagtcatgcaaaggttttgaagagcttttaccgtggggcagatgaacttgtgtcaaccatgcacaccctgtgagaaccaagtacctgtgtttctaaggcgggcactcaaggtgaggggtgcattctggccaaagaaacaaaagctgtggtttcaggaccatgccgtgtgtagctgatctgtacgggacgtgtatgtaaggaagagcaatcatgatagataagaacagtgtgtgaagcagccctcacactagagtgtttggtcatctcttataatgtaagggaaggtactttaaaattctgggaagatgcgatgaactcatgtcccagtcagaaaataatccaatgaaataagcattggttgccaggccacagttaggaattgtattgtgatacatctagaggccaagagagcaggagagagctaccaacttacactgtggtttaagctaaatgaccgcacagcatcatagcattgcagtgttgttactaaatctggaagtgacctgtgaatgtatggaatacaataaagtcttttattctggttcatttgctagtacttcctttttgattggatactgtagttcttcctctggattttattttgttcagcgtcaaggccctaattttgcaaatgtagtctaaaccacattacgtggactagaggatactctgaattagcaagttttttgtttgctgaataaaactattccatcttaacaattctgtgtaatttttgaaaaacatcaacattttggtcactagtagtcaaaatcttataaggccatatgtcctgaaaggcaaaactctgtgtatgtgcgatttaccagggagatagtaggacagtttttatgagggtttcaaaggagttcatggcccaaatgaagcttgtggccacctaggtttagtgtacatgaaattggaagatgcttcttgattgtagttcccatggggaagagggaggctgtgatcatttggttagatacagcattaattgtcacaacttgactttcagaaacaagaatactgcacaaactcaagcatgcattggagcatgtgttactatttagaaaagagtgcagccatcagtaggtcaagctaggagggcaaaagagagttgagaggaatgctctgccccttccccatcacagcactgcccctttccacctcctcaccagctcacctgtacaagagaattgatctcaactgagtgtcagctcaccaggtcagaaattgttattggaccctaaaaccttgcctcacaggtggg

SEQ ID NO: 6897 - DNA, 103 bp, Homo sapiens
tgtaacttggaaaaactgaaaacagtctcagtgtccatcagtaggagataaaatgtatattgttcggttattgaagagaatgtggtcactttgtatcctattc

SEQ ID NO: 6898 - DNA, 357 bp, Homo sapiens
cccctgaacctccatagtgcctccaagatgtgctgtccctgccaactcctgcaccagcttgactggtggtggaagaggccaggaagagcggggggaagacatgtgctaaccacttcttagcaatgaggctggtaaggttactgtccccttgtgcctggtcactagtaacttttttgtagacatgaaggtagatgccctgcaggtcctatcagcaaaggacccaactcctaacagcattggtgctccctcatgaaatttgacagtgtcttgccagcctcctgctggcagacacttctctgcagtgaataccactatcccatgctgcactagtccctaccaagtcttcaaccctcaatt

SEQ ID NO: 6899 - DNA, 1706 bp, Homo sapiens
ctagaatttactatttgttagttacatacaaaaattataatttatatacataaagttatactatgctgtcatttttaatatccgtacaacattgcatagtaccataatttagtctattgatgtacattaggttatttctaatattttgctatttatgtgcacattgcagtgaacactccctttacatatgtccttgtagtgttgtctcctaagatatattccttttatatcttacatggtgacaacattaaatatctgaactctgtgacatcttggggacatacatttacctctgataatttgctatttgtatgacccttgaattgagtaaatgcaccctaggcatggtagaccagagaactaaccagaaaagtggcactgtgtttagtcatcctagattctttaagatttttaaaggtaacttaagtagtagtttttgtctagtccatacatgcatgtggtgtaaaattcaaaagatatagaaaggtaaagtaaatctttctcccactctgaaacctcttctacccagtttctgctcctgggaaactactatgagtttattcatccttctgcacatattttatacatatatgtatactttctgcacatatatgtgcatatatatgtatatattttaagttttttgtaaatgatagcatactatgctgttctacagttcactttttctcacttaactataataatatctaacacttacgtagtgctttgttctaggccctgttctaacaagtgtttttgtattgattactaatcttcatcacaaacgtgagaagtaggtaaatattattcccttaccacagaggaagaaactgaggcacagaaactttaaatgacatgctagtaggttgtcagctggaaggtgaactccagcatccagcagtttggctacagagtcttttatattagcccatttgctatactaactcaattgttgcctcattctttttattaactacataatattcccttgaaaaaacttcagtttatctaactaggtcctagttggtggacatttaggtgtttccatatactgctgttatagatgatgctagtgtgaatatcctggtgcttataaatgcctgtgtcattttgaatatgtaaatctctttcattttcatccattcaaatttgggagttaggggagtcttgtgttcatatagttacattctattttgagatctaatatgagacttttttttcaatgaatgtatttagctaatttatatttattatatcattatggttatagcctcatcttttatagctaatggactaagagataagtcaaggtatgttaacaattgaaatatacttaaagatgtaaagcagtacagtataaagatattagcattcctcagtctatttactctctcacgttttgttggttatataaaaacattatcaggaattgtaacaattacattatattctatagccatagccatagttttagaccaatagttaagtggattcaaatgctcaaagtttgttattttcgatagttttttaaaaatcttttagatggctgaactttatcatcaagtattttcttaaagtttatgaaaactattccttagggttttgcatatttaatgatgttttatgctgggggtaaattcttgagtactctagatattgcttcactgattttttttttttttttttgagtcggagtttcgctattg

SEQ ID NO: 6900 - DNA, 106 bp, Homo sapiens
ttaacagtctttattgggctcagaccaggagtccgtgggtcttgaggacctctgtgtatttgtcagttttcttctccatgttcctattggcctgtatccgtaggct

SEQ ID NO: 6901 - DNA, 1515 bp, Homo sapiens
aggtaaattaaaagcatgatcattttgttgataatcagcctttggagaattaaacagcctgcttactgccagtgctagttcagtaaatatgtttctcattttctatttggcaaaattagataacctaagcctaggaaaaataaaaaattagaaaaaaaaaagtagatttggggatatttaactcaaattgcccttactggtggaaactcgaggcagttacttagattatttccaaatggcttttttaaaatgtatttctatattgtatacaacagtctcagtcttcatctctcctgttcagctagccatacatcccttaaaattagatatttttaatgtttagtaaaccttcagtttgggtttatagacaacatttaaccttctcatgaaagggtcagaatactccagttgcaggcacaaacaggccatagtttagttgaaggagaaactgcgaactcaaaggagcactgcttctctgcaggaaagatcccgtcagtggacctgcggggcacagctgccaccagtgtcatgtagctattcagtgtcggaaaactagaaatcacaagtgaagagaaattgtaaattacctcaaattctatgcccagaagcaaccactatggaaatccttctagacattgtcccgtataaatatatttccctaaaaaaaattataccccatactctgccacttcaaaaaaatcaagactgtttttccatgtcaataaatatctatatcatttaatgaatacataatactcccttgtttgaatgtacaatattctgtattgttgcacatttgttgtttccaatttaacaattacagtactccaatgaagcaatcatcttaaaatacatgtataacgtattataatgttccatcctttaaggttagaaacgacgtcccatacctgtctcccgtcactctgagaacagtgcggtaacaggatcagcgattctcaaccatgggcaatttagccccctatggcacatttgacaacgtctggagacatttttggttgtcacaactagggggtaggggatgctactggcatctagtggtggaggataggaagctgctaaacatcacgcaacgcacgggaccgtcctccatgacaaaggacccgtgcaaaatgtcaatagtgccactgttgagaaacccggattaagatcatgttgtaactacatttcagtgggataagactttgaaagtttccaccgggcacagtggctcatgcctgtaatcccaacactttgggtgcccgaggcaggtggatcacttaggtcaggagttcgagaccagcctggctaacatggtgaaacctcatctcttactaaaaatacaaaaactagttgagcatggtggtgcgcacctgtaatcccagctactcgggaggctgaggcacgagaatggcttgaaccggtgaggtggaggttgcattgagtcaagattgcaccactgcactccatcctgggtgacagatctagactctgtctcaaaaaaaaacgaaaaagaaa

SEQ ID NO: 6902 - DNA, 1515 bp, Homo sapiens
aggtaaattaaaagcatgatcattttgttgataatcagcctttggagaattaaacagcctgcttactgccagtgctagttcagtaaatatgtttctcattttctatttggcaaaattagataacctaagcctaggaaaaataaaaaattagaaaaaaaaaagtagatttggggatatttaactcaaattgcccttactggtggaaactcgaggcagttacttagattatttccaaatggctttttttaaatgtatttctatattgtatacaacagtctcagtcttcatctctcctgttcagctatccatacatcccttaaaattagatatttttaatgtttagtaaaccttcagtttgggtttatagacaacatttaaccttctcatgaaagggtcagaatactccagttgcaggcacaaacaggccatagtttagttgaaggagaaactgcgaactcaaaggagcactgcttctctgcaggaaagatcccgtcagtggacctgcggggcacagctgccaccagtgtcatgtagctattcagtgtcggaaaactagaaatcacaagtgaagagaaattgtaaattacctcaaattctatgcccagaagcaaccactatggaaatccttctagacattgtcccgtataaatatatttccctaaaaaaaattataccccatactctgccacttcaaaaaaatcaagactgtttttccatgtcaataaatatctatatcatttaatgaatacataatactcccttgtttgaatgtacaatattctgtattgttgcacatttgttgtttccaatttaacaattacagtactccaatgaagcaatcatcttaaaatacatgtataacgtattataatgttccatcctttaaggttagaaacgacgtcccatacctgtctcccgtcactctgagaacagtgcggtaacaggatcagcgattctcaaccatgggcaatttagccccctatggcacatttgacaacgtctggagacatttttggttgtcacaactagggggtaggggatgctactggcatctagtggtggaggataggaagctgctaaacatcacgcaacgcatgggaccgtcctccatgacaaaggacccgtgcaaaatgtcaatagtgccactgttgagaaacccggattaagatcatgttgtaactacatttcagtgggataagactttgaaagtttccaccgggcacagtggctcatgcctgtaatcccaacactttgggtgcccgaggcaggtggatcacttaggtcaggagttcgagaccagcctggctaacatggtgaaacctcatctcttactaaaaatacaaaaactagttgagcatggtggtgcgcacctgtaatcccagctactcgggaggctgaggcacgagaatggcttgaaccggtgaggtggaggttgcattgagtcaagattgcaccactgcactccatcctgggtgacagatctagactctgtctcaaaaaaaaacgaaaaagaaa

SEQ ID NO: 6903 - DNA, 412 bp, Homo sapiens
ctgagtcacatatattgagaggtatcctgtttgtacgttttctttgtaattataaagtctttaggcagtttatttctgtttattaaaataaatcagaagaaaatgtgtcatagtttactatatgttatatgaagagaaagttcttttggggatcatagttttatcatagtaataaaaaattatcagcagtaaaaaagatagtcttatctcacttttattatagtttatagcattacgacatactgttagcttttttagtaggtaaatactacatagattgctttaacatatgctttgcaattgttgaaatactgctcatttaagttccttcttagatgtgattcagaagtgtactttaatgtatttaagctatattttcctagttcagttatattgagcttttttttttttt

SEQ ID NO: 6904 - DNA, 417 bp, Homo sapiens
gaacaccaaggttgcggcagacaccagaagctggaagaggccaggaccgcctctcccctaacgccttcagagaaagcacagcctggccaccaccttcatcttcgatttctggcctccagaactgagagaatgaatgtctattgtttaagctgccagtatgtggcactttgttacagtagccctagcaagctaacattcagtatgtctgaagggtagtcaagaggaagctagaaattaagatgtcggcccatgtttggagtggatttaagccaaacagcgtactatgtgtgccctgctaaaaattataataacgagcaaattgttacagcctaagagtgaccccaggatttgtaactgacgttgagtgcccaagaactgcgtgataagtctattaagataaaattatttcaagtcctc

SEQ ID NO: 6905 - DNA, 554 bp, Homo sapiens
cttgagcccaggagtttgagtccagcctggacgatatagccagaccctgtctgtaaaaaaacaaaaaccaaaacaaaaaaaacaatgaaaacatttttttttaaaacgccatcaaaactttgtttcatgcacaaaattatttaaaatatataatataaccttaccttcaggctatgtgggtaaggtaaggtgtatgtgaaacaaatgaatttcccatttagacttgggtcccatccccaagatatcttattatgtatatgcaaatattccaaatcaaaaatatctgaaatacttttgtcccaagcatttcagataaaggttactcaacctgtaataaaaacactcagtgcttgcctgaaggaaaaaccaagaatttgtcatccatccttaaatttttatgacaccctttgtaatcaggaaaccttttaatacctaagaatatatttgatatattctggtatatgtttatcattctgatgtttaatgttctatgttgggcatatatcagtgtaataaatacattagatccaaatacagatcatgctgccttttta

SEQ ID NO: 6906 - DNA, 416 bp, Homo sapiens
gaacaccaaggttgcggcagacaccagaagctggaagaggccaggaccgcctctcccctaacgccttcagagaaagcacagcctggccaccaccttcatcttcgatttctggcctccagaactgagagaatgaatgtctattgtttaagctgccagtatgtggcactttgttacagtagccctagcaagctaacattcagtatgtctgaagggtagtcaagaggaagctagaaattaagatgtcggcccatgtttggagtggatttaagccaaacagcgtactatgtgtgccctgctaaaaattataataacgagaaattgttacagcctaagagtgaccccaggatttgtaactgacgttgagtgcccaagaactgcgtgataagtctattaagataaaattatttcaagtcctc

SEQ ID NO: 6907 - DNA, 20594 bp, Homo sapiens
caacagtcagttacctctgattgtaaaaggtcgctcctcctgagtcttagtgtttactagaatttgcttcaatgttttatttttgtgttaccagttttaggttgactgtataatgaaattctgtattttgaatcacatttccctgctgatatcagcccagcttataacaagtaatgcttgccttaaacatattttttctttctctcacttctgccatcaattcaacaataggattgcagatacagtttactttggggctgaattaagcagtagcagaggggtgtttgtaaactaactgatgttatcaataggcagggacacagcatggcttaggatcatggtcttccagcttgatgacctgctttgcaatctgtttgcttcatccacatcaatgaggagccagaccttctggtccttcatttactcatagactctcttaagagctttgtacattcaattctgaacttattggtgccataaaatattattactgtgcaaaagaataaaagtgctagtgtgttcttattagtagccatgaatttcatttctcttttccctcttcccacctgagattcatctttgaggggaagccagataccttgggcttcttattttcccatcctgcccttattcttggaaggtcctcaggtttgttgacatggtttttgttctctgggacttttctagtgtgttgtttgcatgtcagccagctcaacttaatgcatgtcagctcagtgccacttgtgctccatgtgacttcagttagcaccagtgtaaatcttgtggctgttaatagaggtggagtcccagctctgacggcagtagtgggagaagaagaggaaattgtcagggcccaaacatttcatatctcatttaaatggatctgaccacttcatagaaaagaaaatttgaatcattgtgctcaaaggtttcccctttgagatacatattttgacctttataaactatagagcatttgtgttttcatggatggttatgtttagttttataaggaccaactctgctatacttcggattttcaggttcctaaagagaaagatgaaatggtagagcaagagtttaaccggttgctagaagctacatcttaccttagtcatcaactagacttcaatgtcctcaataataagcctgtgtcccttggccaggcattggaagttgtcattcagtaagtactttgatactgcttattgtatagtgagttccatgtgtaaagatttgctatttatgttttaagtttttctgcaagtcttgtttgaggtagtttttacttaattttgtatgaaaccattgaatccaaagttaaaaattatttaaaataattatatgatcccttaaggcccctttcacttctaaaattcagtgcttttatggtattatactatatttaacatagcctaggaaataatttccaactagccaactttcttgttcctaagtatcagaagtttcagtgggccttgatgcccttaaatgtttttgatgggcacctgtcttattctgcaaagttggctttgagagcagattatacatattgtctctcttaggttacaagagaagcatgtcaaagatgagcagattgaacattggaagaagatagtgaaaactcaggaagaattgaaagaacttcttaataaggtgaaattctgtattttcttcatagctgaagaagctttaataggagaaaaagtctttagaaattttaaaagcatttccgagattttttcctccatggaagagaaagtctgcacagctgggactcattcttaagaaaataatgactaacgaaagagactgttttatctgtcagtctttcagtgtggcattattgataaatggttgccagaggaaatagatctttcctctttgtctggttccctttggctcaggggtgtccagtcttttggcctccctcagtcacattggaagaagaagaattgtcttgggcaacacataaaatacactaacactaatgatagctaatgagcttaaaaaaaatggaaaagaaaattcagtgttttgagaaaatttatgaatttgtgttgggccgcattcaaaactgtcctgggccacgagttggacaagcgtggtttagctattctaaagctatcccagtgccctcagctgaattctaggactagcaggagaattagctgtactggagccaagttttcattggtgaagaccaacaaatcagcagccagttcattggcataattatttctcttgagttgctgccacccccacctctgttccccagggctgaaccgttagggctcttctctgccaccgccttccagagccccaggctccagcgcattaaagtccaaccatttgcttctcctcaccctgccagctgcaaaggtcgcatcagcttagggagaaaatagcccctggagggggcctttatagtgcatactctgggtgtgcctgtgactggactcttgcctcactctcactgtgcctcattcttcatcctgtctaatgaagagatctccagctcacagtcttcatggattgtggtaaggatgaaatgagaagagtgatttaagaactgccaagtggccaggatacctgtagggtggcccagtctcaggctttgtcactcttgtcctgtgtggtatcatcagaaacctgaaaaaagctaacattaacaatggttccttaagattctttggccaggcacagtggcttatgcctataatcccaacactttgagaggctgaggcaggtggatcatttgaggtcaagagctcgagatcagcctggccaaatggtgaaaccccttctctactaaaatacaaaaaatttgctgggcatggtagcacacacctgtaatcccagttactcaggaggctgaggcatgagaatcatttgaacctgggaggcagaggttgcagtgagctgagattgtgccattgcactctagcctgggtgacagaacaagactgtgtctcttagaaaaaaaaaaaaaattctttgaccttttacatatttaaaaaacacattataggaccaggcatggtggctcacgcctgtaatcccagcactttgggaggccgaggagggcagatcacgaggtcaagagatcgagaccattctggctaacatggtgaaaccccatctctactaaaaatacaaaaaattagttgggcatggtggcgggtgcctgtagtcccagctactcaggaagctgaggcaggagaatggcgtgaacccaggaggcagagcttgcagtgagccgagatggtgccactgcactccagcctgggcgacagagtgagactctgtctcaaaaaaaaaaaacaaacacacacattatgacaatttgtttccgaaaataagtttaagttacattagcaacagtttcctttttgtggagattaaatttatttcaatactgggttttttctttgtttgtttaaattaatgggacactcctcatccttctcattcgttttagaaggcagcactgatcttacttatcagatagagttgtggtacctttatgtcaagccctataagatttctttcctatttcccaaatggaatgatgtaggttagaacaagtacttaagaattctcaggaccttgcattgtagccctgttttgttgggatagcagttttgaggagccaaaaaagggtacatgtgatgtagacataaactacattgctatctggaatggtaaatttgtatttttccttcttagatggtaaatttgaaagagaaaattaaagaactccatcagcaatacaaagaagcatctgaagtaaagccacccagagatattactgccgagttcttagtgaaaagcaaacacagggatctgaccgccctatgcaaggtgtggtatacatacatgcctaactggttttacttggaatcctaagaaatagcacagatctggggaattttggaaaagagagccactagccaatcacaagtgccttcagtgcaatgaagacgatttggtacataaggagccatggggatttaatgggttagttcggtttaagacctgcttgtcctgcagaattcttatcctgtcttaataatctcatcattttatcttaaatctcaatttagccctaacagtttagagtaagagtattaaacatggacttcagagtcatttggggtcaaactgtctgattcaaatccctaacttggaatctcgagccatgtgaccttggactccttaattgcctcatctgtaacatggtcttaacacctaccttgtagggtaattgtgaagcttaaataaaattatgtataaagtgcttacccagtgccagggacatggcatgcttatgaaatggtgcttgctatgatttttcatccccactttgcagcacactagtatgtttcttccattattttctcctgtgtgctccttgcctccccctaatattccaggcccccaactgtaacttgtctccaaaaacaaaaatctctcagctctatctaaccccagcctaaaattgagccacacttcctgtacatgatctgaagaggaaatatgatccagaccttatactttgtggtacaaagaaactaggtggatatctgacccttcagggtaactcaggttcacttaatttttatcaggaatatgatgaattagctgaaacacaaggaaagctagaagaaaaacttcaggagttggaagcgaatcccccaaggtaaggaaaacaaacacaaaagttcagagggagagcttttactgttctttcagcttgatttggaaggaaaattctaaatcataatgagcttttatttatgttcagtgagtggtttaaattgttaaataaatgaatgtgtgactacttttgaggtttctaaatcccctgctcctgtattttaatgtgtcctagatacctaaacagattgtttctaaagagagagcctttctccgtaagatctgatatttggataaagatgtaatagatggaaattatctttcttgagagggtagaagttgctgttgctttacacttccataattttggaaactagcggggtattatactttatttccactgggtttttgacagtgaatgctggtgaaatgttttcacttgcatccagcctccacataaatctgttctgttctgtattcaagaatgctacccaccctttctttttttgagatgggatctcgctcttgttgcccaggctggagtgcaatgatgtgatctcagctcactgcaacatccacctcctgggttcaagcaattctcttgcctcagcctcctgagtagctgggattacaggtgcccaccaccatgcccagctaatttttgtatttttagatggggtttcacctgttggccaggctgatctcgaactcctgacctcaggtgatccacctgcctcgacctcccaaagtgctgggattacaggcatgagccacagcatccagcctgcccatcctttctatagagtctatgctgtgtgtaaaatataagacattttttacaactagtaagcttttatgatataaggtgatttcatatgaagcattcttttttttttttccttcagacaaatgaggcctacatgtaatttgctttacgtagtgagcttggcactgctctagacatcagagataaagaggttaataagacagataagatgctactttttgatttgtaatttcttcatataaggcacagccctggcttaggttctgacacagttactgagatcacctacatcacactgagagaactagtgatatcttttaataatcctgtagtcctttgttcttttgcagtgatgtatatctctcatcaagagacagacaaatacttgattggcattttgcaaatcttgaatttgctaatgccacacctctctcaactctctcccttaagcactgggatcaggtaagtttcccttattgtttattttattgcacatgcctttgagagggattgtaagagaaatagttaattttgtatgtgtgtttttaaacagctttagtaagagacatcatttacatacagtgaaattcacctattttaagtgaacagtttattgatttgccagacttcagtcataagcccccacacaatcagaatatagaacatgcccatcatcctgaaatgttttctcctgcctctttgtagttaatcccccatgctctggctcctggccctggacaaccactgatttgcgttatcactgtaattttgtttattctacagtttcatataaagtgaatcatacagtacatagctttttgtgtgtgatatatttcacttagtatagtttttgagatgtgcatgaagtttttgagattcatcttttttgcctgtatcagtagtttgttccttttaattatttaatagaattccattgtgtggatataccactggtgccttaatgggcatttgggttgtttcccttttttgactgctaatgaacgaagctgcttaagaatgttcatgtctttctcttgagtaaatatttatgaatggaattgctgggtactatggaaagtggatttttaactttataaatcaacttccaaactattttccaaattgccttcccatcagcaatgtatgaaaattccattttctccaaatcctcaccaatcttggtaatgccagtttttaaaatgtcagccattctaataggtatagtagtatttgcatttccctgatgactagtgatgtagagcaactcttcctgagcttatgagccattcatatgtcatctttgagtaaatgtctgctcagatcttttgcctattaaaaaagtctgattgtctgcttgttgatgagtttgaagtttattatgttctttaaattctaggcagaagtcctttgtcagatttatgttttacaaatatttatttccttgtcatctgtggcttgtctttaattttctaaatctgtctcaaagagtaaaagtttttactttaatttttttcttttgagacaaggtcttgctttgttgcccaggctggagtggtgtgatcatggctcccttgcagcctttacctcctgggctcaagtgatcttcctgccttggactcccattcctatttataaaatttttcttttaaaccatgttctttttctatcttgaaaagaatctttgtcttacctgtggtcacaaagatgttatcctgtgttctcctgcagaaattgtatgggtttagctcttatgtttaggtctatactccattttgtgttaatttttatgtttaaggaaaggtaagtgaagggttcatgtttttccatatagttatgtaattattattccagcactatccttttcttcatttgtcttggcacctttgttgaaaattaattggcatgtaagcatgagtatttagggttgtcttttctgttaatttatctgtctatccatatgccactatcatactgtcttgtaagttctccaactttgttcatttttgaaattgttttggctattttaaggtacgtatttccataacagttttagaatcaacttgtcaatttctacaaaaatcaccttctgggattttgattaggagtgcattaaatttctaggtcaatttagggtgaattgccatcttaacaatattgaatattcttatccttaaatacagtatacttctccaaaaatagttttctttcgtttatgtcagtgatgttttatagttctcagtgagcagggctataccatcttttcttaaatttcagtgtgatttactcttcaagtgagaaatcacaaggcttcttggaccaatctctaaatctgagactttggccagaattaagactgtataggctgggtacggtggctcacgcctttttaaacccagcactttgggaggccagagcaggaggatcaattgagtcaggagttcaagaccagcctggccctgtctctactaaaaatacaaaaattagccgggcatggtggcgggcacctgtaatcccagctacttgggaggctgaggcacgagaattgcctgaacccaggaggcagaggctgcagtgagcggagatcgcgccattgcactccagcctgggcaacagagcaagactccatctcaaaaaaaaaaaaaatgtatagaagtaaattattaaatttttatttatatattttagtttacattatacattttcctaataaaaattattttgacaggctgggcatggtggctcatgcctgtaatcccagcactttgggaggccaaggcaggcggatcacctcaggtcaggagttcgagaccagcctggccaacatggtgaaaccccatctctactaaaaatacaaaattagcctggcgtggtggcgcatgcctgtagtctcagctgcttgggagactgaggcaagagaatcgcttgaacccaggaggcggaggttgcagtgagccgagatcacgccactgcactgcagcctgggcaacaagagcaaaactccatctcaaaaaaaaaattattttgacttcttaatctttagattataatctgatagttttagtatttgaagagttggacttgttagagataaagtcttgcagaactaccagttcctttgtggtttttcatgtaaatactaacttaggcccttctagtcattgatttatcatttgatgtttcaatatgtgtctatttgtaatagtattaaattttaaatgagtgatttcagctgaagtagagtgttgctgccagcccagtattttgatctaatttccccaagaatttcatgaaattagaaatccttaccagcttacaaaaaaaatgttacatagaaaaattttcagtaaattcaaagaagtaagatcattttggggatctttaaattcctggtcaattcctgactttttttttactgtatggactgtcttgggccactctttatggtcctagattaccttcatctagtttgactgacttagttttggaaatcttcctcaacttcaaacctgtaaatttaaagaataaaaactgattttgctctcaggtaaaagaaaatgtaatcaggactgtgaccctgatatccttcaagtctgtaatgtattcaaaagccagataaataaacttgaatgatgtttaatcatctgaatttcctgaatcatcattccccctaccacctccctaccctaaccaccatagaagatccggacttagtggtattggactggaatgataaaaactatccagggaaggccgagcgtggtggctcatgcctgtaataccagcactttaggaggctgaggtgggtgggtcaggagtttgagaccagcctagccaacgtggtgaaaccccgtctctactaaaaatacaaaaactagcggggtgtggtggtacatgcctgtaatcccagcagttacttgggaggctgaggcaagagaatcacttgaacccaggagtccgaggttgcaatgagccgagagcacgccactgcactccagcctggatgacaaagcaagactctgtatcaaaaaaaaaaaaaaatccagggacaaaagaaacttccctaatctcactacccgaagatttagggacattttttggtgttttctctttttccttcagtttcctttggtaactgtagctaaatactgagtgatttgttctttagtttgccttaaaatattgactgtttccacaagcttgtgttttcattgttgttgtacagaactaggtgcaaatgacacagattaataaaaggttggaaatatgttcttttctctcctctttaggatgatgactttgagttcactggcagccacctgacagtaaggaatggctactcgtgtgtgcctgtggctttagcagaaggcctagacattaaactgaatacagcagtgcgacaggttcgctacacggcttcaggtatgtcactgctttacaaaaggtaagagagaactctcctgaaacaggactgatcttttgttaggtgcgacctatcaggtacatttcctgatagagtgtttatgacaccataggtaaaaattggcatttatagacagttgagcctatagagtctttggtggttctaaccctatcattttataaactgggaaatcgaagcaagttttagagtttccaatttgtgcatgagctagttggatattactggtcgagcatccctaatctgaaaatctgaaatctctaatgccccagtgagcatttcctttgagcaccatgtcagtgctcaaaaagttttccattttggtgacccagtgagtttggatctagttttgttaagtatattcataaataccaggattttggcccctgggctccactaggacccaccccttatatttcaccatccgcattttggtctttggattcattttggctttttctatgcatttgggctaattcgcttacgtttggttcctagttctggagcagtcctgctaataagttgacttcttcagagatagagtttccctgtgcttgctatggggataggctcaatgctcattattattgctggtttcaggctacatttgatgtaaagtgcagacaactgttggattttgaactcctcaagataactagtcatctccctctctgagaacccatgtatgactatgtaggcatgagaaatggagacatagccatcaatcttaccctgcgctgcccctttccttggagttactgagatcaccacagatgttttggttttttactaacaatcagtgaaacagttttccatttaattttcccatcagaggcagcttgtagttgacagtgctgagaagatctgcagccttgagccttttgcaggcagacggagaacagtgagaatagatgttgtgccattttctcgagttctgcagccatagaaaatgagcatgtactgagctttcatatttattttgagatatataatttcaaaatatatatagtatataaacagacattcattaaaaaacaaacgaggaaaacgatgttaacataatttcagtaccctctctgaggtcagctttgaactcattcatactctgacaagctgagaatcactgtgcattctcaagcatagcacgctccacagttttaggctgcatcccccagatctgcatcacagccttcttgtagcattcttctgttggtcgatagtgagcagctaaccacagtcagaagacattggttctattgggatgagcactttattctttatttttggtctaaatgtacttaacttgagtaagtggtataaggtcctttcattagtctagatcaccagtgtatcaggagggtagtgtggggatgacagttgaggattctgaagttgactacaagggtttgaatcctggcacttattacgtgtgtagccttagatgagttatttcacctctacctcagttttcttatgtgaaacatgaaggtaatgaaaatagaaaaatgagaattgagaaatggatgtccatctgttgtacactaaatgttcagtgtccttatcagtgccatattcatcaccactagtcttttcccacccaacctctgcaggatgtgaagtgatagctgtgaatacccgctccacgagtcaaacctttatttataaatgcgacgcagttctctgtacccttcccctgggtgtgctgaagcagcagccaccagccgttcagtttgtgccacctctccctgagtggaaaacatctgcagtccaaaggatgggatttggcaaccttaacaaggtagcttgccctagacactcctgtctacagatctgatgtacaaatagcagtcttcgttgtttacttggtgaggaggtggccttgcatttttgggcatttggctatgctcccaattgtgacatcagggctgaggcgtgtcagttgattctcttcagtgcctaagtctatcatcaagtgtctgttcatatggacttagtcttatggggtcatttcacaaactcaggcctataaaaaggggatcgtaaatgtcatcctaaataataaggattgctgggcttattttgaaagcagattagaagagactttaaggaagtctgttgaagccagtattatctggcccctgtcactggctcatgtgcttctttcttatggtaggtggtgttgtgttttgatcgggtgttctgggatccaagtgtcaatttgttcgggcatgttggcagtacgactgccagcaggggtgagctcttcctcttctggaacctctataaaggtaaatgccttctaattttaatcttttccatatccttacaggaatatagaatttgaaatattttgggttttctcaatatatatgccttaatttctctctttattaactcaacaaacaattcctgaaataccttctaggtactggggtataaaaatacctgccttcaaggagctcccaacttagtggggatacagtaagcggggaagcaggcttagaacagggcagtaggtggcctgatgggctgaacgcccaggttactggaggtccactcagcctggagggataggcccagggaggcttcctaccaggggaagcttgcgttctcattctcagactgacttgcccctgattctttgattacttctcttactatgtgtttatgaaattcctacctcctgttcagttattttcttttgtaattggacttaactgtatgtagacttgtaatatttgtaccccacctcattccaagaaaaggctgtaaaaataagacattggccttgtcagtgcagacacatcagctaaccgttggcttgctccccatccccagttctttccattactcctcactgcccagtggtgaatggtctttcacaccccagagcctctaacttcacagagggggaacttggctccctgagcacattgctttctgagagcagcagcgtgtcttttcccttccccatccaggctgtcaagtcctgtcagtgctagccttacaatctcttgcaaacctatttacttttttctattgcctacctcccagtccaagccattcttacctgttgcctggacggttaccaatagctactactgctattcctgcttcttttagtgactttctactgctgaaagaaaatgttcaaactccttatcttggcccatgctaaggttcttcattatctagctcatctctacttccttgtccatccccagattccaggcacattcggctgttctcacatcctggaaggcaccatgctgctttctgcctcagagcctctgcgtgtactgtggtctaggcctgggggtgctgcttctcccaccccctcgacccccttccttcccaacctgtcttactcagcattcaggtcttgacataaatttcaaagtatttcaaagacgacttccaggacacatctccactgccccaaatgtaaattaaataccccatattcttttccgtgtagcctacgtttttcttcatagcttttaagttaataattgtctgtgtaattttgcatctgttgctctattggagtaatagtttatatcatattttttatcccccttttctagtactgtgcctaccacctaagtctgttgcataattactcaccggatgggtgactgaagacagtcctgggcttggaggggcctgggatggctaaaagggatgtagtcattgtcatggagctatccaaggtagtcaaggttaagaattctgtgccaaagtaaagcgatgcttaataattcccttttattagcaagatctgaaattatatcttcagaactgctgtattttgccaggttagaagcagtgaggtgcctgagaatcttacttcactctagtctgccagctcctactggctggtgtctggcgacaaagagttctgtatgctgtttcagaaacataatctgtctcttcgcatttgaatggtactgcgtgtgtcttgtcatcagatttcagagcaccaggaataaggtggggcctgataaggaagtttttgaggaaagtctgtaggaaaaccctagaattatcctttctgtttccccagctccaatactgttggcactagtggcaggagaagctgctggtatcatggaaaacataagtgacgatgtgattgttggccgatgcctggccattctcaaagggatttttggtagcagtgcagtacctcaggtaagtaggtaggtggggcaaggagggatctagggttcagactcaaccagggtttaatgtatttgcagcatgttcttggtcaggacagtttaagctagaattgaggtctgtgcttttacatgaataattaatgtttggagttcatggcctaagcgtggggttcagaaaaccccccaggacaagagctggggagtctgaaggctgctagctgcatttctcctccggctttagagtcacaccagatccctgacattttagacaaaatggccaaactccagtgagtatctccgggaagttttcagagaacctcttggtactttttcgtgttctttgaaatactttaaccctttaggattcctttgaagggaaggatattgtgaatttataaaagagaataaaggccaagccctgtgtagatctctggattcatagacaggaaggcaacatggaggggcatccttcctgtctgaagtccttttgtccatgtgtgttttaaagcaggcattcatcacttgatcactggctctcacatgttgcccctctttctcttcacttgcatctccacccaccactgcttttccacctttcaaggattgatttgtgcttggtgtctcgtaatgacttttgctcctggtttttcttttagcccaaagaaactgtggtgtctcgttggcgtgctgatccctgggctcggggctcttattcctatgttgctgcaggatcatctggaaatgactatgatttaatggctcagccaatcactcctggcccctcgattccaggtgccccacaggtgagaagctggcaaactatctgggcttatttgggaagaggccaggatctcatgatgtccctgattttttttttttttttcagattttagtcattccatcttcggaccctttcagataaccaagagcagagttaaaaggatgggcagcatttctgatttctcataatttggttttgtaaatctaggcagtctacattcagaatggaggagtccagagtataagtcaaataacatttttccttattcaggttttctccctaaaaaacaaaaccatttttaattgcacttccattttgtaatggctcataggattgctgtaaggtctcaattactaggggcttccagggcatttctgagaaataaccctgggtccttgtctagacccttatgccagaccccactccaaagagcggtaagaattccttagtgtcatagcccagacctgctgagctgcgaggcttaagtgtccctgatcaccaaatgtcctgtgcttcagggtagcgaggctccctcccagaaggtagttatacatgagggaaggacgctttacaactgggtatctaaactgatgagaacacatgttaagcatcactttaggactgagcctaggtagagttttattgtctcatttctacttgtcaattctgggaaagtgcctactgataagggagactcttcgatagaatgatgaatagtaattgggggggtcagcctttaaaaaggtcaacagcaatttaagtacttagcaatttaagtacaagaataaaggtatatgtgcagcctgccaattttctctttttcccctaaaatagccgattccacgactcttctttgcgggagaacatacgatccgtaactacccagccacagtgcatggtgctctgctgagtgggctgcgagaagcgggaagaattgcagaccagtttttgggggccatgtatacgctgcctcgccaggccacaccaggtgttcctgcacagcagtccccaagcatgtgagacagatgcattctaagggaagaggcccatgtgcctgtttctgccatgtaaggaaggctcttctagcaatactagatcccactgagaaaatccaccctggcatctgggctcctgatcagctgatggagctcctgatttgacaaaggagcttgcctcctttgaatgacctagagcacagggaggaacttgtccattagtttggaattgtgttcttcgtaaagactgaggcaagcaagtgctgtgaaataacatcatcttagtcccttggtgtgtggggtttttgttttttttttatattttgagaataaaacttcatataaaattggccctctcttttgttcctttgagttggagttacatacaagatgggggcattactcctttggaaatgccaagtttatcctatggcaatagtaatacatgttttctccatgtttaaataaggaagaagatgttcatataaaagagaaaaatggtttgatcaggtcagaagataaggtaggggggccggtcctgtagaagcagtggacttcctggtcagtcggactaggcttcctcacttgggtgggggtggagtgtggtggtgtgccaagaacatggttattaggaaactttggatgcactttcaagatagaacacaaaagagctgaaacaaagtctgagcctttgggagaccagtctgcctttattcctgattccctccatgggtatgtgctaaaacttcccaattctactaaaggtggtggtgtacattttgggaagcgcactacataggatcaagggcttaggtaacagctggtttaacagattgccacaaacttagtggctcttaaaaaaacagaaatctattcgaaagttctggaagcttaaagtctaaaatgggtacacagggctgcattcattacagaggctctcagagcagggaggatcagttcatttccttgctcttttcagcttctaggtgtgggaaggctcgtggctccttcctccatcctcagagcacataactccagtttctgcttccatcatcacattgccttctcctgtagtcaaatcttttgtctctctcttaaaaggatactacctgtgattacatttaaggcccacctggatcatctaggatgttctgcctcatcccagcatccttatctgcaaagtcccttttgccatataagatgataaaaacatgttacatgctggttccttcccaggggctcctgactgactgacagatagatgataaacactgttactgcaaatccaagtaatgtcccttaaatgtggttttattctttcttactgtgagttaagggacatcattatatatattggtgatctgactggaagatgaaaacggagaaggcttttccccccctagtcttagaattcgtggcagtaatggaaagaatctgcacaccaggatcagggcagttaatgtttccagtccttgcagtatcagtaattggttaggtaaaatacccaattttaagtattacacaatgaaataaataaatatactagagctgcgccaacgcatagaagacagatgatacacagggatgacattgacaaaactggcatcacagactcgcacagagtatacggaaacgagggagctttattggttacatattgtactgcagagccaacagagagcattcgcgccagaggatacatgcagacaggcagctccaatgatacacatgcacccaaggagccctgagccactgctttgccctggtttccagcgacaggttctggcctccttggtcccatgcttggagctgctgcacctagactctaaggggcaggggtgagagagaccagagcacctgcctgagcaagtaggtgtggaccaacaggctgcccccaacaaaggggcctataatgcaataacagtttatttgagggctactttcttagccctctcaatctttaaaatacaaaaaaatagactttattctcttaaaaatacattccattcagtatatgttctgagctgggaagcagcaggaaaatagggcccctttcctatgatcctatggttgtgaggctttgaggagaaccctgctccccactcggggtattcaaaaaataatccctaaaagcagctctttccaaagcaatcttgtcagagaaataacaaaacctcataacaaggtagccagggacccagcctctgggtccccattcctttattgggaagtggtagcacttggcactgacccactaaatataaagaactaaaactgccccaggacgacaagtccaagaacactatagtgccccctgcatcccgaacactccactgacgggggttatttatgtgcaagcttgcctacagctgagggtggggtggcatccttggccccactgcagatccctttaacccacactgtgactctttctcattgccacccaaaagcaaaaaacagccacagcttctttatccacctgcagctttctctggtttagtatcagagtggcaaaaaaagcagcagcacgtggaagagatcagctgctggtactaagccagcttcacttcctccaaccaagcagctctattgccaggtcccccaactcactaggaaccctccaacaaccatacacctgccagtaaaatttaagagccaagctgcggaagaaaactgtcataaaagtgggtttgttgaccgggggcagtgggactatttggcttgattaaacaactattcaactaccaggtctcccctctacttggaggcttcctccaggacccctgatgatgaggcctgggtccaaacagtcacacctcagttgcttttcagaaacatgcctcccaactttgggatttgagagccagccttgccagccatttgaagcccagagaaacagcctccagcctttacttgctattacaatgttattttctgcaatgctgaggacacttaaaaataaaatctatctagaaagtgtgcagattaaagaaacaaaatatcctgaaataactgttacaagcaaatcctattgcactcagatttcaagatggcagccccagcaaaagggcatcacagctgtccctcttcaacaggacattttgagtagcagcagatgttggtgctgctgaaatgtggaaagatccagactttggcaccaggagctatagcaccagaatccagggctccaacactcaaagacaagaattattggcgagatctttttaggcatggcttggcgcccttctgtttccatcagcagagaagagccacagacttagtttcctaatacctttagttgaccaccacagaggttgattttctttgaactctcaaggttgccaaccagtgaaggagaatggcagggaggctgcaagtgaaggatggcagccttgagtgagctagtttctggccagtaagccaggagaagcagcagtaagagatcttggaaatagcatcttgagcatcagaggtggggatgtggacaggaaaggcaggccacatgacaatgcctttagattggcaaaactctgggaagcagaagtatgagcaatagattcctgtccctgaaagtaaggtaggtgctccccaagcctcctcactgccaaatctgatacagacaaggtcaggatgaacactggttcccatgctgagtgaaggcagagaagacaaattcctctggaggaagtcttgagtcttcctcttgccaggaaattcataggagatgcacaggaacaggagatacacagacttgggtactttccataatacctagactcctagaacgccaggagatactgtgtggcactgggcaaggctgatgccacaaagagcctcagagaccatcccatctaatcccttcacactttgcagattgggaaacaggcccacggagcttctctgagctcatccccatgagattaaaacatacagaaactaaaaaacaaggcccagaaaaacaattgagggcaggagggaagaacccacacggatgataccttccacaagcaaaaatcatcccatactattatagatggtgaaaacaggagaaccttagaataccagatttggtgcccttagagatcatccatttcaaagaactcattttacagacagggaaactgaggctccaagaagacaatgactcacccaaggtcacacagcaaggaagtaaagccatggggaaaaaaatccagcttaccagactggtagtttaatgttctctcattctgagggcaatagtgtctacttcataaaggtagcctttgaaagaggatcccttctttgaattgacagaatgctaaagaaaaagcactgccaagaatatacaattcttttcaacttccccatgtgactggtataaggaacctaaccaatttatttacgtggctttctgaaaagtttgctgcattttgaactatataaagctgaggccctcaatgcgtatgtacgtatcacctttcctccagcgaagtcatcatgatagtcgacttgcagaaatccggggcccacttctgtaggaatgcatcagcttggtaaagtgcgatgcctcctccatgggggatggagaaggaggaacaggagggagtagtctcacagtccatgcctctcatggagctattgcttgtggagtgactaaaggggtctgctttccctcttgctgggcacttcctagaaggcagaggatgctgggtcaggcccagcttagcctagggattttcccaaggtggaaacaatgaagtcagcttga

SEQ ID NO: 6908 - DNA, 20595 bp, Homo sapiens
caacagtcagttacctctgattgtaaaaggtcgctcctcctgagtcttagtgtttactagaatttgcttcaatgttttatttttgtgttaccagttttaggttgactgtataatgaaattctgtattttgaatcacatttccctgctgatatcagcccagcttataacaagtaatgcttgccttaaacatattttttctttctctcacttctgccatcaattcaacaataggattgcagatacagtttactttggggctgaattaagcagtagcagaggggtgtttgtaaactaactgatgttatcaataggcagggacacagcatggcttaggatcatggtcttccagcttgatgacctgctttgcaatctgtttgcttcatccacatcaatgaggagccagaccttctggtccttcatttactcatagactctcttaagagctttgtacattcaattctgaacttattggtgccataaaatattattactgtgcaaaagaataaaagtgctagtgtgttcttattagtagccatgaatttcatttctcttttccctcttcccacctgagattcatctttgaggggaagccagataccttgggcttcttattttcccatcctgcccttattcttggaaggtcctcaggtttgttgacatggtttttgttctctgggacttttctagtgtgttgtttgcatgtcagccagctcaacttaatgcatgtcagctcagtgccacttgtgctccatgtgacttcagttagcaccagtgtaaatcttgtggctgttaatagaggtggagtcccagctctgacggcagtagtgggagaagaagaggaaattgtcagggcccaaacatttcatatctcatttaaatggatctgaccacttcatagaaaagaaaatttgaatcattgtgctcaaaggtttcccctttgagatacatattttgacctttataaactatagagcatttgtgttttcatggatggttatgtttagttttataaggaccaactctgctatacttcggattttcaggttcctaaagagaaagatgaaatggtagagcaagagtttaaccggttgctagaagctacatcttaccttagtcatcaactagacttcaatgtcctcaataataagcctgtgtcccttggccaggcattggaagttgtcattcagtaagtactttgatactgcttattgtatagtgagttccatgtgtaaagatttgctatttatgttttaagtttttctgcaagtcttgtttgaggtagtttttacttaattttgtatgaaaccattgaatccaaagttaaaaattatttaaaataattatatgatcccttaaggcccctttcacttctaaaattcagtgcttttatggtattatactatatttaacatagcctaggaaataatttccaactagccaactttcttgttcctaagtatcagaagtttcagtgggccttgatgcccttaaatgtttttgatgggcacctgtcttattctgcaaagttggctttgagagcagattatacatattgtctctcttaggttacaagagaagcatgtcaaagatgagcagattgaacattggaagaagatagtgaaaactcaggaagaattgaaagaacttcttaataaggtgaaattctgtattttcttcatagctgaagaagctttaataggagaaaaagtctttagaaattttaaaagcatttccgagattttttcctccatggaagagaaagtctgcacagctgggactcattcttaagaaaataatgactaacgaaagagactgttttatctgtcagtctttcagtgtggcattattgataaatggttgccagaggaaatagatctttcctctttgtctggttccctttggctcaggggtgtccagtcttttggcctccctcagtcacattggaagaagaagaattgtcttgggcaacacataaaatacactaacactaatgatagctaatgagcttaaaaaaaatggaaaagaaaattcagtgttttgagaaaatttatgaatttgtgttgggccgcattcaaaactgtcctgggccacgagttggacaagcgtggtttagctattctaaagctatcccagtgccctcagctgaattctaggactagcaggagaattagctgtactggagccaagttttcattggtgaagaccaacaaatcagcagccagttcattggcataattatttctcttgagttgctgccacccccacctctgttccccagggctgaaccgttagggctcttctctgccaccgccttccagagccccaggctccagcgcattaaagtccaaccatttgcttctcctcaccctgccagctgcaaaggtcgcatcagcttagggagaaaatagcccctggagggggcctttatagtgcatactctgggtgtgcctgtgactggactcttgcctcactctcactgtgcctcattcttcatcctgtctaatgaagagatctccagctcacagtcttcatggattgtggtaaggatgaaatgagaagagtgatttaagaactgccaagtggccaggatacctgtagggtggcccagtctcaggctttgtcactcttgtcctgtgtggtatcatcagaaacctgaaaaaagctaacattaacaatggttccttaagattctttggccaggcacagtggcttatgcctataatcccaacactttgagaggctgaggcaggtggatcatttgaggtcaagagctcgagatcagcctggccaaatggtgaaaccccttctctactaaaatacaaaaaatttgctgggcatggtagcacacacctgtaatcccagttactcaggaggctgaggcatgagaatcatttgaacctgggaggcagaggttgcagtgagctgagattgtgccattgcactctagcctgggtgacagaacaagactgtgtctcttagaaaaaaaaaaaaaattctttgaccttttacatatttaaaaaacacattataggaccaggcatggtggctcacgcctgtaatcccagcactttgggaggccgaggagggcagatcacgaggtcaagagatcgagaccattctggctaacatggtgaaaccccatctctactaaaaatacaaaaaattagttgggcatggtggcgggtgcctgtagtcccagctactcaggaagctgaggcaggagaatggcgtgaacccaggaggcagagcttgcagtgagccgagatggtgccactgcactccagcctgggcgacagagtgagactctgtctcaaaaaaaaaaaaacaaacacacacattatgacaatttgtttccgaaaataagtttaagttacattagcaacagtttcctttttgtggagattaaatttatttcaatactgggttttttctttgtttgtttaaattaatgggacactcctcatccttctcattcgttttagaaggcagcactgatcttacttatcagatagagttgtggtacctttatgtcaagccctataagatttctttcctatttcccaaatggaatgatgtaggttagaacaagtacttaagaattctcaggaccttgcattgtagccctgttttgttgggatagcagttttgaggagccaaaaaagggtacatgtgatgtagacataaactacattgctatctggaatggtaaatttgtatttttccttcttagatggtaaatttgaaagagaaaattaaagaactccatcagcaatacaaagaagcatctgaagtaaagccacccagagatattactgccgagttcttagtgaaaagcaaacacagggatctgaccgccctatgcaaggtgtggtatacatacatgcctaactggttttacttggaatcctaagaaatagcacagatctggggaattttggaaaagagagccactagccaatcacaagtgccttcagtgcaatgaagacgatttggtacataaggagccatggggatttaatgggttagttcggtttaagacctgcttgtcctgcagaattcttatcctgtcttaataatctcatcattttatcttaaatctcaatttagccctaacagtttagagtaagagtattaaacatggacttcagagtcatttggggtcaaactgtctgattcaaatccctaacttggaatctcgagccatgtgaccttggactccttaattgcctcatctgtaacatggtcttaacacctaccttgtagggtaattgtgaagcttaaataaaattatgtataaagtgcttacccagtgccagggacatggcatgcttatgaaatggtgcttgctatgatttttcatccccactttgcagcacactagtatgtttcttccattattttctcctgtgtgctccttgcctccccctaatattccaggcccccaactgtaacttgtctccaaaaacaaaaatctctcagctctatctaaccccagcctaaaattgagccacacttcctgtacatgatctgaagaggaaatatgatccagaccttatactttgtggtacaaagaaactaggtggatatctgacccttcagggtaactcaggttcacttaatttttatcaggaatatgatgaattagctgaaacacaaggaaagctagaagaaaaacttcaggagttggaagcgaatcccccaaggtaaggaaaacaaacacaaaagttcagagggagagcttttactgttctttcagcttgatttggaaggaaaattctaaatcataatgagcttttatttatgttcagtgagtggtttaaattgttaaataaatgaatgtgtgactacttttgaggtttctaaatcccctgctcctgtattttaatgtgtcctagatacctaaacagattgtttctaaagagagagcctttctccgtaagatctgatatttggataaagatgtaatagatggaaattatctttcttgagagggtagaagttgctgttgctttacacttccataattttggaaactagcggggtattatactttatttccactgggtttttgacagtgaatgctggtgaaatgttttcacttgcatccagcctccacataaatctgttctgttctgtattcaagaatgctacccaccctttctttttttgagatgggatctcgctcttgttgcccaggctggagtgcaatgatgtgatctcagctcactgcaacatccacctcctgggttcaagcaattctcttgcctcagcctcctgagtagctgggattacaggtgcccaccaccatgcccagctaatttttgtatttttagatggggtttcacctgttggccaggctgatctcgaactcctgacctcaggtgatccacctgcctcgacctcccaaagtgctgggattacaggcatgagccacagcatccagcctgcccatcctttctatagagtctatgctgtgtgtaaaatataagacattttttacaactagtaagcttttatgatataaggtgatttcatatgaagcattcttttttttttttccttcagacaaatgaggcctacatgtaatttgctttacgtagtgagcttggcactgctctagacatcagagataaagaggttaataagacagataagatgctactttttgatttgtaatttcttcatataaggcacagccctggcttaggttctgacacagttactgagatcacctacatcacactgagagaactagtgatatcttttaataatcctgtagtcctttgttcttttgcagtgatgtatatctctcatcaagagacagacaaatacttgattggcattttgcaaatcttgaatttgctaatgccacacctctctcaactctctcccttaagcactgggatcaggtaagtttcccttattgtttattttattgcacatgcctttgagagggattgtaagagaaatagttaattttgtatgtgtgtttttaaacagctttagtaagagacatcatttacatacagtgaaattcacctattttaagtgaacagtttattgatttgccagacttcagtcataagcccccacacaatcagaatatagaacatgcccatcatcctgaaatgttttctcctgcctctttgtagttaatcccccatgctctggctcctggccctggacaaccactgatttgcgttatcactgtaattttgtttattctacagtttcatataaagtgaatcatacagtacatagctttttgtgtgtgatatatttcacttagtatagtttttgagatgtgcatgaagtttttgagattcatcttttttgcctgtatcagtagtttgttccttttaattatttaatagaattccattgtgtggatataccactggtgccttaatgggcatttgggttgtttcccttttttgactgctaatgaacgaagctgcttaagaatgttcatgtctttctcttgagtaaatatttatgaatggaattgctgggtactatggaaagtggatttttaactttataaatcaacttccaaactattttccaaattgccttcccatcagcaatgtatgaaaattccattttctccaaatcctcaccaatcttggtaatgccagtttttaaaatgtcagccattctaataggtatagtagtatttgcatttccctgatgactagtgatgtagagcaactcttcctgagcttatgagccattcatatgtcatctttgagtaaatgtctgctcagatcttttgcctattaaaaaagtctgattgtctgcttgttgatgagtttgaagtttattatgttctttaaattctaggcagaagtcctttgtcagatttatgttttacaaatatttatttccttgtcatctgtggcttgtctttaattttctaaatctgtctcaaagagtaaaagtttttactttaatttttttcttttgagacaaggtcttgctttgttgcccaggctggagtggtgtgatcatggctcccttgcagcctttacctcctgggctcaagtgatcttcctgccttggactcccattcctatttataaaatttttcttttaaaccatgttctttttctatcttgaaaagaatctttgtcttacctgtggtcacaaagatgttatcctgtgttctcctgcagaaattgtatgggtttagctcttatgtttaggtctatactccattttgtgttaatttttatgtttaaggaaaggtaagtgaagggttcatgtttttccatatagttatgtaattattattccagcactatccttttcttcatttgtcttggcacctttgttgaaaattaattggcatgtaagcatgagtatttagggttgtcttttctgttaatttatctgtctatccatatgccactatcatactgtcttgtaagttctccaactttgttcatttttgaaattgttttggctattttaaggtacgtatttccataacagttttagaatcaacttgtcaatttctacaaaaatcaccttctgggattttgattaggagtgcattaaatttctaggtcaatttagggtgaattgccatcttaacaatattgaatattcttatccttaaatacagtatacttctccaaaaatagttttctttcgtttatgtcagtgatgttttatagttctcagtgagcagggctataccatcttttcttaaatttcagtgtgatttactcttcaagtgagaaatcacaaggcttcttggaccaatctctaaatctgagactttggccagaattaagactgtataggctgggtacggtggctcacgcctttttaaacccagcactttgggaggccagagcaggaggatcaattgagtcaggagttcaagaccagcctggccctgtctctactaaaaatacaaaaattagccgggcatggtggcgggcacctgtaatcccagctacttgggaggctgaggcacgagaattgcctgaacccaggaggcagaggctgcagtgagcggagatcgcgccattgcactccagcctgggcaacagagcaagactccatctcaaaaaaaaaaaaaatgtatagaagtaaattattaaatttttatttatatattttagtttacattatacattttcctaataaaaattattttgacaggctgggcatggtggctcatgcctgtaatcccagcactttgggaggccaaggcaggcggatcacctcaggtcaggagttcgagaccagcctggccaacatggtgaaaccccatctctactaaaaatacaaaattagcctggcgtggtggcgcatgcctgtagtctcagctgcttgggagactgaggcaagagaatcgcttgaacccaggaggcggaggttgcagtgagccgagatcacgccactgcactgcagcctgggcaacaagagcaaaactccatctcaaaaaaaaaattattttgacttcttaatctttagattataatctgatagttttagtatttgaagagttggacttgttagagataaagtcttgcagaactaccagttcctttgtggtttttcatgtaaatactaacttaggcccttctagtcattgatttatcatttgatgtttcaatatgtgtctatttgtaatagtattaaattttaaatgagtgatttcagctgaagtagagtgttgctgccagcccagtattttgatctaatttccccaagaatttcatgaaattagaaatccttaccagcttacaaaaaaaatgttacatagaaaaattttcagtaaattcaaagaagtaagatcattttggggatctttaaattcctggtcaattcctgactttttttttactgtatggactgtcttgggccactctttatggtcctagattaccttcatctagtttgactgacttagttttggaaatcttcctcaacttcaaacctgtaaatttaaagaataaaaactgattttgctctcaggtaaaagaaaatgtaatcaggactgtgaccctgatatccttcaagtctgtaatgtattcaaaagccagataaataaacttgaatgatgtttaatcatctgaatttcctgaatcatcattccccctaccacctccctaccctaaccaccatagaagatccggacttagtggtattggactggaatgataaaaactatccagggaaggccgagcgtggtggctcatgcctgtaataccagcactttaggaggctgaggtgggtgggtcaggagtttgagaccagcctagccaacgtggtgaaaccccgtctctactaaaaatacaaaaactagcggggtgtggtggtacatgcctgtaatcccagcagttacttgggaggctgaggcaagagaatcacttgaacccaggagtccgaggttgcaatgagccgagagcacgccactgcactccagcctggatgacaaagcaagactctgtatcaaaaaaaaaaaaaaatccagggacaaaagaaacttccctaatctcactacccgaagatttagggacattttttggtgttttctctttttccttcagtttcctttggtaactgtagctaaatactgagtgatttgttctttagtttgccttaaaatattgactgtttccacaagcttgtgttttcattgttgttgtacagaactaggtgcaaatgacacagattaataaaaggttggaaatatgttcttttctctcctctttaggatgatgactttgagttcactggcagccacctgacagtaaggaatggctactcgtgtgtgcctgtggctttagcagaaggcctagacattaaactgaatacagcagtgcgacaggttcgctacacggcttcaggtatgtcactgctttacaaaaggtaagagagaactctcctgaaacaggactgatcttttgttaggtgcgacctatcaggtacatttcctgatagagtgtttatgacaccataggtaaaaattggcatttatagacagttgagcctatagagtctttggtggttctaaccctatcattttataaactgggaaatcgaagcaagttttagagtttccaatttgtgcatgagctagttggatattactggtcgagcatccctaatctgaaaatctgaaatctctaatgccccagtgagcatttcctttgagcaccatgtcagtgctcaaaaagttttccattttggtgacccagtgagtttggatctagttttgttaagtatattcataaataccaggattttggcccctgggctccactaggacccaccccttatatttcaccatccgcattttggtctttggattcattttggctttttctatgcatttgggctaattcgcttacgtttggttcctagttctggagcagtcctgctaataagttgacttcttcagagatagagtttccctgtgcttgctatggggataggctcaatgctcattattattgctggtttcaggctacatttgatgtaaagtgcagacaactgttggattttgaactcctcaagataactagtcatctccctctctgagaacccatgtatgactatgtaggcatgagaaatggagacatagccatcaatcttaccctgcgctgcccctttccttggagttactgagatcaccacagatgttttggttttttactaacaatcagtgaaacagttttccatttaattttcccatcagaggcagcttgtagttgacagtgctgagaagatctgcagccttgagccttttgcaggcagacggagaacagtgagaatagatgttgtgccattttctcgagttctgcagccatagaaaatgagcatgtactgagctttcatatttattttgagatatataatttcaaaatatatatagtatataaacagacattcattaaaaaacaaacgaggaaaacgatgttaacataatttcagtaccctctctgaggtcagctttgaactcattcatactctgacaagctgagaatcactgtgcattctcaagcatagcacgctccacagttttaggctgcatcccccagatctgcatcacagccttcttgtagcattcttctgttggtcgatagtgagcagctaaccacagtcagaagacattggttctattgggatgagcactttattctttatttttggtctaaatgtacttaacttgagtaagtggtataaggtcctttcattagtctagatcaccagtgtatcaggagggtagtgtggggatgacagttgaggattctgaagttgactacaagggtttgaatcctggcacttattacgtgtgtagccttagatgagttatttcacctctacctcagttttcttatgtgaaacatgaaggtaatgaaaatagaaaaatgagaattgagaaatggatgtccatctgttgtacactaaatgttcagtgtccttatcagtgccatattcatcaccactagtcttttcccacccaacctctgcaggatgtgaagtgatagctgtgaatacccgctccacgagtcaaacctttatttataaatgcgacgcagttctctgtacccttcccctgggtgtgctgaagcagcagccaccagccgttcagtttgtgccacctctccctgagtggaaaacatctgcagtccaaaggatgggatttggcaaccttaacaaggtagcttgccctagacactcctgtctacagatctgatgtacaaatagcagtcttcgttgtttacttggtgaggaggtggccttgcatttttgggcatttggctatgctcccaattgtgacatcagggctgaggcgtgtcagttgattctcttcagtgcctaagtctatcatcaagtgtctgttcatatggacttagtcttatggggtcatttcacaaactcaggcctataaaaaggggatcgtaaatgtcatcctaaataataaggattgctgggcttattttgaaagcagattagaagagactttaaggaagtctgttgaagccagtattatctggcccctgtcactggctcatgtgcttctttcttatggtaggtggtgttgtgttttgatcgggtgttctgggatccaagtgtcaatttgttcgggcatgttggcagtacgactgccagcaggggtgagctcttcctcttctggaacctctataaaggtaaatgccttctaattttaatcttttccatatccttacaggaatatagaatttgaaatattttgggttttctcaatatatatgccttaatttctctctttattaactcaacaaacaattcctgaaataccttctaggtactggggtataaaaatacctgccttcaaggagctcccaacttagtggggatacagtaagcggggaagcaggcttagaacagggcagtaggtggcctgatgggctgaacgcccaggttactggaggtccactcagcctggagggataggcccagggaggcttcctaccaggggaagcttgcgttctcattctcagactgacttgcccctgattctttgattacttctcttactatgtgtttatgaaattcctacctcctgttcagttattttcttttgtaattggacttaactgtatgtagacttgtaatatttgtaccccacctcattccaagaaaaggctgtaaaaataagacattggccttgtcagtgcagacacatcagctaaccgttggcttgctccccatccccagttctttccattactcctcactgcccagtggtgaatggtctttcacaccccagagcctctaacttcacagagggggaacttggctccctgagcacattgctttctgagagcagcagcgtgtcttttcccttccccatccaggctgtcaagtcctgtcagtgctagccttacaatctcttgcaaacctatttacttttttctattgcctacctcccagtccaagccattcttacctgttgcctggacggttaccaatagctactactgctattcctgcttcttttagtgactttctactgctgaaagaaaatgttcaaactccttatcttggcccatgctaaggttcttcattatctagctcatctctacttccttgtccatccccagattccaggcacattcggctgttctcacatcctggaaggcaccatgctgctttctgcctcagagcctctgcgtgtactgtggtctaggcctgggggtgctgcttctcccaccccctcgacccccttccttcccaacctgtcttactcagcattcaggtcttgacataaatttcaaagtatttcaaagacgacttccaggacacatctccactgccccaaatgtaaattaaataccccatattcttttccgtgtagcctacgtttttcttcatagcttttaagttaataattgtctgtgtaattttgcatctgttgctctattggagtaatagtttatatcatattttttatcccccttttctagtactgtgcctaccacctaagtctgttgcataattactcaccggatgggtgactgaagacagtcctgggcttggaggggcctgggatggctaaaagggatgtagtcattgtcatggagctatccaaggtagtcaaggttaagaattctgtgccaaagtaaagcgatgcttaataattcccttttattagcaagatctgaaattatatcttcagaactgctgtattttgccaggttagaagcagtgaggtgcctgagaatcttacttcactctagtctgccagctcctactggctggtgtctggcgacaaagagttctgtatgctgtttcagaaacataatctgtctcttcgcatttgaatggtactgcgtgtgtcttgtcatcagatttcagagcaccaggaataaggtggggcctgataaggaagtttttgaggaaagtctgtaggaaaaccctagaattatcctttctgtttccccagctccaatactgttggcactagtggcaggagaagctgctggtatcatggaaaacataagtgacgatgtgattgttggccgatgcctggccattctcaaagggatttttggtagcagtgcagtacctcaggtaagtaggtaggtggggcaaggagggatctagggttcagactcaaccagggtttaatgtatttgcagcatgttcttggtcaggacagtttaagctagaattgaggtctgtgcttttacatgaataattaatgtttggagttcatggcctaagcgtggggttcagaaaaccccccaggacaagagctggggagtctgaaggctgctagctgcatttctcctccggctttagagtcacaccagatccctgacattttagacaaaatggccaaactccagtgagtatctccgggaagttttcagagaacctcttggtactttttcgtgttctttgaaatactttaaccctttaggattcctttgaagggaaggatattgtgaatttataaaagagaataaaggccaagccctgtgtagatctctggattcatagacaggaaggcaacatggaggggcatccttcctgtctgaagtccttttgtccatgtgtgttttaaagcaggcattcatcacttgatcactggctctcacatgttgcccctctttctcttcacttgcatctccacccaccactgcttttccacctttcaaggattgatttgtgcttggtgtctcgtaatgacttttgctcctggtttttcttttagcccaaagaaactgtggtgtctcgttggcgtgctgatccctgggctcggggctcttattcctatgttgctgcaggatcatctggaaatgactatgatttaatggctcagccaatcactcctggcccctcgattccaggtgccccacaggtgagaagctggcaaactatctgggcttatttgggaagaggccaggatctcatgatgtccctgattttttttttttttttcagattttagtcattccatcttcggaccctttcagataaccaagagcagagttaaaaggatgggcagcatttctgatttctcataatttggttttgtaaatctaggcagtctacattcagaatggaggagtccagagtataagtcaaataacatttttccttattcaggttttctccctaaaaaacaaaaccatttttaattgcacttccattttgtaatggctcataggattgctgtaaggtctcaattactaggggcttccagggcatttctgagaaataaccctgggtccttgtctagacccttatgccagaccccactccaaagagcggtaagaattccttagtgtcatagcccagacctgctgagctgcgaggcttaagtgtccctgatcaccaaatgtcctgtgcttcagggtagcgaggctccctcccagaaggtagttatacatgagggaaggacgctttacaactgggtatctaaactgatgagaacacatgttaagcatcactttaggactgagcctaggtagagttttattgtctcatttctacttgtcaattctgggaaagtgcctactgataagggagactcttcgatagaatgatgaatagtaattgggggggtcagcctttaaaaaggtcaacagcaatttaagtacttagcaatttaagtacaagaataaaggtatatgtgcagcctgccaattttctctttttcccctaaaatagccgattccacgactcttctttgcgggagaacatacgatccgtaactacccagccacagtgcatggtgctctgctgagtgggctgcgagaagcgggaagaattgcagaccagtttttgggggccatgtatacgctgcctcgccaggccacaccaggtgttcctgcacagcagtccccaagcatgtgagacagatgcattctaagggaagaggcccatgtgcctgtttctgccatgtaaggaaggctcttctagcaatactagatcccactgagaaaatccaccctggcatctgggctcctgatcagctgatggagctcctgatttgacaaaggagcttgcctcctttgaatgacctagagcacagggaggaacttgtccattagtttggaattgtgttcttcgtaaagactgaggcaagcaagtgctgtgaaataacatcatcttagtcccttggtgtgtggggtttttgttttttttttatattttgagaataaaacttcatataaaattggccctctcttttgttcctttgagttggagttacatacaagatgggggcattactcctttggaaatgccaagtttatcctatggcaatagtaatacatgttttctccatgtttaaataaggaagaagatgttcatataaaagagaaaaatggtttgatcaggtcagaagataaggtaggggggccggtcctgtagaagcagtggacttcctggtcagtcggactaggcttcctcacttgggtgggggtggagtgtggtggtgtgccaagaacatggttattaggaaactttggatgcactttcaagatagaacacaaaagagctgaaacaaagtctgagcctttgggagaccagtctgcctttattcctgattccctccatgggtatgtgctaaaacttcccaattctactaaaggtggtggtgtacattttgggaagcgcactacataggatcaagggcttaggtaacagctggtttaacagattgccacaaacttagtggctcttaaaaaaacagaaatctattcgaaagttctggaagcttaaagtctaaaatgggtacacagggctgcattcattacagaggctctcagagcagggaggatcagttcatttccttgctcttttcagcttctaggtgtgggaaggctcgtggctccttcctccatcctcagagcacataactccagtttctgcttccatcatcacattgccttctcctgtagtcaaatcttttgtctctctcttaaaaggatactacctgtgattacatttaaggcccacctggatcatctaggatgttctgcctcatcccagcatccttatctgcaaagtcccttttgccatataagatgataaaaacatgttacatgctggttccttcccaggggctcctgactgactgacagatagatgataaacactgttactgcaaatccaagtaatgtcccttaaatgtggttttattctttcttactgtgagttaagggacatcattatatatattggtgatctgactggaagatgaaaacggagaaggcttttccccccctagtcttagaattcgtggcagtaatggaaagaatctgcacaccaggatcagggcagttaatgtttccagtccttgcagtatcagtaattggttaggtaaaatacccaattttaagtattacacaatgaaataaataaatatactagagctgcgccaacgcatagaagacagatgatacacagggatgacattgacaaaactggcatcacagactcgcacagagtatacggaaacgagggagctttattggttacatattgtactgcagagccaacagagagcattcgcgccagaggatacatgcagacaggcagctccaatgatacacatgcacccaaggagccctgagccactgctttgccctggtttccagcgacaggttctggcctccttggtcccatgcttggagctgctgcacctagactctaaggggcaggggtgagagagaccagagcacctgcctgagcaagtaggtgtggaccaacaggctgcccccaacaaaggggcctataatgcaataacagtttatttgagggctactttcttagccctctcaatctttaaaatacaaaaaaatagactttattctcttaaaaatacattccattcagtatatgttctgagctgggaagcagcaggaaaatagggcccctttcctatgatcctatggttgtgaggctttgaggagaaccctgctccccactcggggtattcaaaaaataatccctaaaagcagctctttccaaagcaatcttgtcagagaaataacaaaacctcataacaaggtagccagggacccagcctctgggtccccattcctttattgggaagtggtagcacttggcactgacccactaaatataaagaactaaaactgccccaggacgacaagtccaagaacactatagtgccccctgcatcccgaacactccactgacgggggttatttatgtgcaagcttgcctacagctgagggtggggtggcatccttggccccactgcagatccctttaacccacactgtgactctttctcattgccacccaaaagcaaaaaacagccacagcttctttatccacctgcagctttctctggtttagtatcagagtggcaaaaaaagcagcagcacgtggaagagatcagctgctggtactaagccagcttcacttcctccaaccaagcagctctattgccaggtcccccaactcactaggaaccctccaacaaccatacacctgccagtaaaatttaagagccaagctgcggaagaaaactgtcataaaagtgggtttgttgaccgggggcagtgggactatttggcttgattaaacaactattcaactaccaggtctcccctctacttggaggcttcctccaggacccctgatgatgaggcctgggtccaaacagtcacacctcagttgcttttcagaaacatgcctcccaactttgggatttgagagccagccttgccagccatttgaagcccagagaaacagcctccagcctttacttgctattacaatgttattttctgcaatgctgaggacacttaaaaataaaatctatctagaaagtgtgcagattaaagaaacaaaatatcctgaaataactgttacaagcaaatcctattgcactcagatttcaagatggcagccccagcaaaagggcatcacagctgtccctcttcaacaggacattttgagtagcagcagatgttggtgctgctgaaatgtggaaagatccagactttggcaccaggagctatagcaccagaatccagggctccaacactcaaagacaagaattattggcgagatctttttaggcatggcttggcgcccttctgtttccatcagcagagaagagccacagacttagtttcctaatacctttagttgaccaccacagaggttgattttctttgaactctcaaggttgccaaccagtgaaggagaatggcagggaggctgcaagtgaaggatggcagccttgagtgagctagtttctggccagtaagccaggagaagcagcagtaagagatcttggaaatagcatcttgagcatcagaggtggggatgtggacaggaaaggcaggccacatgacaatgcctttagattggcaaaactctgggaagcagaagtatgagcaatagattcctgtccctgaaagtaaggtaggtgctccccaagcctcctcactgccaaatctgatacagacaaggtcaggatgaacactggttcccatgctgagtgaaggcagagaagacaaattcctctggaggaagtcttgagtcttcctcttgccaggaaattcataggagatgcacaggaacaggagatacacagacttgggtactttccataatacctagactcctagaacgccaggagatactgtgtggcactgggcaaggctgatgccacaaagagcctcagagaccatcccatctaatcccttcacactttgcagattgggaaacaggcccacggagcttctctgagctcatccccatgagattaaaacatacagaaactaaaaaacaaggcccagaaaaacaattgagggcaggagggaagaacccacacggatgataccttccacaagcaaaaatcatcccatactattatagatggtgaaaacaggagaaccttagaataccagatttggtgcccttagagatcatccatttcaaagaactcattttacagacagggaaactgaggctccaagaagacaatgactcacccaaggtcacacagcaaggaagtaaagccatggggaaaaaaatccagcttaccagactggtagtttaatgttctctcattctgagggcaatagtgtctacttcataaaggtagcctttgaaagaggatcccttctttgaattgacagaatgctaaagaaaaagcactgccaagaatatacaattcttttcaacttccccatgtgactggtataaggaacctaaccaatttatttacgtggctttctgaaaagtttgctgcattttgaactatataaagctgaggccctcaatgcgtatgtacgtatcacctttcctccagcgaagtcatcatgatagtcgacttgcagaaatccggggcccacttctgtaggaatgcatcagcttggtaaagtgcgatgcctcctccatgggggatggagaaggaggaacaggagggagtagtctcacagtccatgcctctcatggagctattgcttgtggagtgactaaaggggtctgctttccctcttgctgggcacttcctagaaggcagaggatgctgggtcaggcccagcttagcctagggattttcccaaggtggaaacaatgaagtcagcttga

SEQ ID NO: 6909 - DNA, 170 bp, Homo sapiens
tttttgactcctgctgtgtgctggggactttatcttcccttgtttgggggccagaatggtccaactacttggtggacagggacaaggagagagagaggactcgtgcattggggaaggttgggcctgggtgactgtccagcttgtagtctctgattccctctggccaaatg

SEQ ID NO: 6910 - DNA, 170 bp, Homo sapiens; identical to SEQ ID NO: 6909

SEQ ID NO: 6911 - DNA, 5611 bp, Homo sapiens
ctttattttcatgatatctgtaatcactgctacaatcagctcacctgatcatctgtgaattcaggtgttcagagcctcctggtatgatgttattcaggtagtgtccagctatatgtgtatgtgtgtgtgtacacgtgcatgtacacacagctgtacagtgtgtgtatatatgtatacatatatgtatgtgtatgtgtatatagagagagagctgagagttattctatttattccttttctctcctaatctgaaaatgggtgttctgtattttgggtggaagaggcatagaaggggatgtgtgttgtctcttaagatttctatatcatgtggattggaccaaaaacttctaatcacttatttagaagggttttataagtgtctgtccatgtgtagcctattcgtgcatgttgtgtattatataactaaggaatagatgtagaatgtgctatttctggttgagaaaaatcaccagaatgtttggtgtatctataaggcttttgtgtttgtttttccccagttggctgaagttagaattgcttgactgacacttcattgctatacatgaaggggcactttaaatcaggaaaatctctcagcttcatagaacgggtaactagtgcaggatggggaaatgttcacagacatcatctgtatgtggttgtgcatagaaagtaaatacatggcgtaattaactcagctgttctagctgcagtactgctgcagtgatccacccacatttaggatgtgctgacagataagctctttgcctacaatacatggataattagtgctataattctggatagttcctttttagtactgttttatgaagctttatcaacttggcttcatgatcctcactttgattgattttaagaggatggataacacagttatctctgtaatgttctgtcccagtatgtctttgggtcaccagttaccttcttaaaatatgtgctttaggtaggtgttattacatatctgtagacaattggtatatgaaatatacacatcctgtgccccaatatggtgcattatgaaaaacaaaatcattttctaaaatgcattttttgagcattgctctatagaagggaagggtgatgagagaacagaactggcccctgtacaggtgtcattaatctggttgtatatgggttataatatgtaatacaaaaagctcattaagtatgggactacatggagagggaagacagtttcatttatagctactggggctaccaggacccttgctgactgcagcctggttgtgattagttcaggttactaggtgttctgatggagtgggacagtccaagtccagtaactgacattacgttttatgcgtgtgcagtttggtataacgtggagtcagtgctctaacgacacactatacttctatatgcttttttctgtgaattttccttggtacatgagagaaataagtactctcatcaacttatgataaattggactattaggaataaaacaatctcagagcagctcctaaacaagagaataaaaatgggccatcccagcacttataaggggagcacatcttgtaatgaaagtctgtgcctattgttaatgattaccaatgcaaactgcagaaatcagttgacattgtcccacaaggaaaaagtgatgccagtaaagtgggggaagagatggtaaataattctagaatgagcaaaagtgcttaattagtacagtatactcaaggtcttgcataacccacactccacgaaaaccgcatcgtaaacagagagtgaacagcacctctccattgctacatctccagaatattgttcggttatgttcatgtggttatggagcaataagaatatataccattaatttttaggtctttcaaattgttcaccaagttttgtgtttgatatttatgaagtgatctttaacacatctgcattgttaatttaagcatgcacagaaatttgggtaatgtttgagtagattgccaagcgctactgtgattcatgaatgaatttctcatagtcttctgcctgcagttttatagtttgaggggcacccatatttgtgggttagagttagtaagaatatgaatccagttatcaaagtattcatccctgaggttttgagttttattgtggtggtgattttctcatgagaaggtagacaacacttcagtttttcttgagggggaaaaaatgtacccgctaaccttttttcacccatgatttgagccctaaaacaacagcctttatgttttcagtgcaggatttcttggaatttcttgcttgtatcaatcctgatgatagccatcctgaacagatgcttctggtctgttttcctggaatagcagacatccttttgaacactaatgatgccaggaagagagtaaggctagaggaggagactcattttaaccccagtccagtggcttgtccgacaacaggccatttccctttacattcctccacagacagaaatggctattaaaaatgttttaacctcatgtatgaactgaatttaaaaaaccactaaagtgatactttatacttctgttttactccctagtgggttttctttaatttggatttttgttgggatgtagcttttcctagactgtatttctgtagctctttttctctggtgtattcatggaaagcatctactgccgcacgacactagtactgtgccttctttcactgccctctgctctgcagctctcacccagcttggctgcttcaagtctgtgcagttgacttggctgtactgaaaagtgaacagcatggattaactcatcctgctgctgagggcagtgcaaacaggtgcttattagaggtagtgacttgcttaattagtgacactcctaatttctactatggataatttcaaagtagaatcactctatgcttagagttttggcaccaatgctgtagggcagcagaatctattctcagtaaaataacttatggtttattagatattctgtattggattttaccagcttgacttttactgctcagatgctttctttcccccccttagacgctgtaattctcttgggaagagtaactattcttaaggtttttacagatacccaccttagttgtaaattggatagtttatatttctgggactttttaaatgaaaatgtggaatgttaagttacaaaagacttttcatcagaaaatttcaaacaaagtaaacatggcgttttatagtcctctaaaatctaggtgctcccacccaccaaaggcatatcctgcaaagggctgtgaactatcttggtgaactgtcttgggtcccctttccatgtatgttttcttgtcactgaaaacaaacaacgctgagtttatcaagaaaatttaaattgggggatcataataattccaaccaagtgacaactctgacatcaaggttattaggagctgtacatccaattcaagttttatttgctgctattctgggagaataaacttgtatatggagaataaactaataaacttgtatcgaggaaatccataaagttataaattagcctgaaaaatatttcaggtaatggtgtggattggcctgctttgactctcagccaccaacagaaatctttgtcacctttgttcctcagctaaaagtaattttgttataaacacaaagtgactttaaacaggtaaaaaacccattcctatttttgtacattaccaaaagtttttcatatacctacagagctaactaattacaactgatttaatccactcaagtttagaccagttaaacccataggatcctgtatggttatcaatgtgatgccttgcttttcataaaataggtataattgggtcatacacttgacgagagggtgactgtttctaggggaagaaaaccctttagattgcaggtaactttcacttttttttttttaatatacactttacatttgtataaattatgcagggtactcctaaccctgtagaaatgtatgacctctcacaaagttgagatttgatccaaagagaaatgcaagtataaaagaattagatacttattatcttttaaggtttttttttttttttggtagagatgggggtctcactgtgttgcccaggctggtctcaaactcctggccacaagtgatcttcctgcctcagcctcccaaaatgctgagattacaggcatgagccactgtacccagcctttccttataaaattcaaagagaaaatttctacacctttatccctcaaataaaacaagtgctcagttcttaccgtgcccttgcaaggtctatatgtaaaagaaatctgaaatttagctgtagaataaaacttgataaataaaaagaaaaaacatacatttctccagttggtttgctctttgcttgttgaagtaataaaccgttttaaagagaaaatacttgctgtaaacccccagtgccttcaactcttttggcagaatatttttaaagaaatccagcaagcaaactttgaggtgctaatgaaagtaaaggaaggtggtatttctagttttggcagaaatgaaaagtgtctcacaagagacatcactacccacgtggggtctggctgctttctaccaaagacatttagagaagtgaattgagtcagggtgatggtgaacactacatattttatagatggttaagttgagaattaattatgtttatcatggatggctactaataccaagctcatgattgttgcagcctcaacgtcttaggcagtaaaacttgtctgcagcactaaagggggagaaacccttatattttgcaaactgtccattcgttaaatttattgtaacctaataccaaaaactgccgtttttcatattatttccccacctcctacttttttttttttttttgctacttgtaaaataaccccttctagaaaataagcattaactggaatgtttcaaacaattttgcttcattttactatcagccactagtgaactcttacagagatgtacatttaagataaaattagcttgtgctaagtgttttaaaaacattgtttactgttaaaggggaattgcacattatatttaactgggattgctccctccctcagttctttaaaaaacaagagtcaaggctcacaccaacttgtaggctgtgggagctttgccataggtagatacaatgtagaagtatacttttttaaagcatgaagaagacaaggaacttcattataatgtaccaggtagaggacattattattcaaaggattatgcacagctcagtgaagatgaagttacaatttttctcgcagctttgttgctattattttcttctgcataaatgtatgctcatttcattatgtgccttgctccctgattgtgcaaagctatatatatatatatatatatatagatagatagatagatatatgagagagatatattcagtactactgaggatgtttttctgaggatgtttttgttctgctggattaagttattttccaagttactcttgccagttatgtcagtaaactattgtaatggcttagcacactagtcgtacagtcagtgtaaatgtttttcatttacatgttttcattatatcagcttatcaaatccttaataaaaaaaattcatagatttcatttaaa

SEQ ID NO: 6912 - DNA, 632 bp, Homo sapiens
tggacagtctagtcagcaagtttacaccgccagcagaatcagggtctcccagcaaggagaccctaccacctcctgcagcaccccccaagcctggaaaactcaatctttctggagtcaaccttcctggagttctccaacaagggtgtgtgtcagcaaaagcccctgttctgagtgggcgtggaaaggactccgtggtggaatttccttctcctccatccgattctgattttccaccccctccacctgaaacagagcttcctctgccccccattgagattccagcagttttctcgggaaacacctctccaaaagtggcagtcgttaatcctcaaccacaacaatggtctaaaatgtcagtgaagaaggcccctccacccacacgacccaaacggaatgatagcacccgcctcactcaagctgagatttctgagcagccaacaatggccacagttgtgccacaagtgcccacctctcccaaatccagccttagtgtccagcctggattcctggctgacctcaacaggacactgcaacgaaagtccatcactcggcacggctcactctcctcccgcatgtccagagcagaaccaacagccaccatggatgatatggcattgcctccaccaccccct

SEQ ID NO: 6913 - DNA, 296 bp, Homo sapiens
ccgggtgcggtggctcacgcctgtaatcccagcactttgggaggccgaggtgggtggatcgcgaggtcaggagatcgagaccatcccggctaacatggtgaaaccccgtctctattaaaaatacaaaaaaaaattagccaggagtggtggcagtcgcctgtagtcccagctactcgggaagctgaggcaggagaatggcatgaacccaggaggtggagcttgcagtgagctgaaattgtgccactgcactccagcctgggcaacagagcgagactccgtctcaaaaaaaaaaaaaa

SEQ ID NO: 6914 - DNA, 6248 bp, Homo sapiens
tgccattgcatctggattccattacagcctctcagctgttactgcctgtggacagttacttctgcttactgcctgtagagagttacctaacttctcttctcagttcttcctcaggtcctggctattttggcctcagttgaagggagtcttgctctcatctctgagggttttaagtttgtttgatcccattgttgtcttttctagctttgagcatgtttttcagtattcatattttaacttactgagaacattaaagggaaatgataaactcgtggtggggatatggcagacaggtgcttgtttgtttgagagaagtagcagaagagataaaatacaaagtgctatatgtttcagctggagaggaaagagagagaatttattagattatatacttgtcccatggcataccacgtatatgtttaaatagggacacatctccctatgtttaactatacttataaacaactttgatacacattgcgtcttttattctgtcacctgatattttagtgtatctcaagttacagattacatgtgtccttaaactatttctgaatttggacttagttccatatacagaaagaactttagaaaattcattaatttggatcttctattgatagccataaatattatgtttatgtattctaaaacctctttgtttagttagtactgttcatgaatgtaacaagcttcaatttctcatttgtgagtagtacatttgctttttgtttgtttgtttgtttgtttttgagatggagtctcacgctgtcaccaggctggagtgcagtggcgcgatttcagctcactgcaacctccacctcccaggtgcaagtgatgcccctgcctcagcctcccgagtagctgggactacagacacccgccaccacacctggctaatttttgtatttttagtagagacggggtttcaccatgttggctaggctggtctcaaactcttgacctcgtgatttgcccgcctctgcctccccaaagtgctgggattacaggcgtgagccaccacgcccagccgtacatttactttttaaagcagcagactaggtacactaattctcactcaaatattttcatgggaatgtagttatcaccaagtcctaaagtattatttatgccaaaaaaaatttcattttaaggactacaaaaatgattctaattaaacattttataatcaatagtaggttgggtctttagccattatatgtgtatatatacagacacatatgtatacacttacattttgacagggtcttcattgagtcttgatgcactttaaacccagctggctaccagagatgcgaaggtgggctctttgaagattagcaaaatggacgtttctgtcacttgagaaaaggaaagttctttgcctttaaattacacagttttcatcatgcccacaatctatattattggctggttaaacagcactgccctattagcaatgttaacaaaaatgaaattatttattggcggttatagattatctaattcaggaaatttctgagctcaacttttacagcaactgttatgccttctaatttagcaattgagttatgagtaagttttgtgcttaactcctagaccctattgttgataaccagatcaaatatagtctgtacagaggaaaacactgggaacatttagtatttctaaagcctcctttggagttactactgattgtaatttggaactgataataggtagagattgctaacactgttttttttcctggatcttttttatgccagaaattaaacaggttctgctaactcttttttttctcttggttatcaccagaatgaaaatatttaaagtgatgactctagaaaagccatctgtgcctggttaacattgagtttgagtctcttcaatatatattgatcatgtattgattaatctttattttttcatattttggctagacaaattcagatctatataatggaataccccttcttgagtgaactatactactaatctacatgattatatagtaaggaaaaaagaagaaataactgtaataggcatagtgtttgttgttggttgtcttgtcattcatgtgatactactcatttccaaaattcacacaaacttacatgaggtggattatttgttttgttcattatttagttcctatatgttttttctttagaaacagagtctcattctgtcacccaggctggagtccaatggggcggtcatagttcactgcagccttgaactctttggctcatgtgatcctcccatctcagcctcccacagcaggtgagactacaggtacatgccactgtgcctgactttttaatttttttgtagagacgaggtttcagtttgttgcccaagctgatcttgaactcctggtttcaagcgatcctcccacctcggcctcccaaagtagtgggatttcaggcatgaccacctggcctagttcctatacttttcttaattcttcagacttctcacatttagtatagtgcattcatttcatcttgctgtttattagcaccctttgtggccaagggaaataaaaggtggtaaaattcagttttcagtttagttcttgaaagctctgggaaatggaggaaacacaaaactatgaattaaactagggctgttgatttctgaacccccagataaatcagttgacccacattttcattttaggtgttaggtccaaattagcataatgtcttgcattattattaggttcagtgtgaaactttacagtgctgcatttgaagtttagtaactggttattattaatcatttgggaaaaatgaaaatgtgttgggactttctatgactaggcatttgttgattatttttcatgattgctttttgttttctcattgtgtaggatttgtgaacttgtatattacaggaaacaagatactttgtaaaatttactggggaaaatccatttggagtgcatgacatttgccaggataagaaagcagtaatatgtttgtattataaaattacaccctgccagaaaactttctttcctagtaaggtaaatgtagaagggacttttacagcatagtaagttgattaggagccaaaattttattccagtttttttttgaactaagaatgttttaaattctgtaatgaacttttatgtttacccattactcatgcattctttcacaatatgtttaatagcctgaggaaataggaaagctgtgaagctactaccattctttacttttaataagaataataggaaagaaaagtcaggtcagtaatccaaatccaaatatgtatactgcaaatgctcaagaagtcacattttttgataaattgtattgagtacagaagaacttatatgaatttattatctgttaataacttagttttgacaacagaataacatttggaaattgtgagaataatcaagctgtttttccattaacagtgtaaattcataacatgtccttcaaaaggtgatattctaagctgtcttaattgtctacggttgataacttttaaataaagtacaggactttctgaaagtgtttggcatgttatgctgccaaaaacaatctgtgttttgaaataccaattaatcagttaatttctgaagactttgtataggacttgatatatgagtcagaatctgtctgtactcattctgtacattgtaactttgaacacttatgaaaaactgtatctgttggtgtgttttgattagttagtgtagatttgtttgcgtatttgaattccgattttagtttaggaagactaaaagtagccatttttgtaaagttcatatgctattttttaatgtcatttttgtttttaatatttatacaatagtgatgttactagtaaaaaatgtttatagataacacgtagagctattaactgttcaaaagcctacatgataggcatattttgtatttcgtgttgcactcgttctgtttcatattggactttttacatcccttttttagcaaaaaaaagagacacatttgaattctctttagcataaagctgtgcattggaaactatgtgactgtatccatacggttagcaaaatactctttgccaccaaaggtaaatgaaactgtaaaatacctctggatatttgtgccaatgaacttttcttagcatattaggattaaagcaaaaataatcttttcagtatgtttcatctaggacttacaataaatgtttaaaccatgaaaacttatatttcataccctaatttttctttgaaaatattcaagatttgtagcctagtgtgttctattttgtgtgattgcttgaatgttttctgattttattgggtaaaagtttgcctagtaatgatctttcagcaattcattgaaataattatttgaagtaatcttgcttcagatttaatttgtgatgtacattgttgtacaagccattttagtacaggtgtctcatttatgtagttgaaaggtgactgtggaatttcttttgttttttatgtatttccattcagtctctttatatagtcacatgtttcacaggggaacttgtccactggaacctaacatagtacaaccttttaatatgcgtatcttaaaggaaaatattataaaacaagatattaatactaaagtgttaacattaatatgttgttctcatggaagaaaagtagaaaatgtgataggcttagaaattattttttatcagcattaagtgcttcaatttctccccataaagattctaaggaaatttcagttcctcatattatagttttccccataatttaatattactaagtatttctctgcccagtaatgttgatgcagtttgcataaatagccttggaagtaaggaggcaggacagaaagccaaatatcgaaatctctggccttgatttagtgacagtttattctaatggggaccataggtgttattagtaaaaagatagtgtacaaggcctaagttcagtttacattgttctttgaaatgagttcatcttttgtgttgaataattgtattctaagtaggagatgcctgtatttaacataatcatgctttctatataatcaaatatgtatttgttggaatactggtagaaataaccttcccttcctccactgtgcagtggaaaaaaaactcccgatttatactgtatataaattaggaaattatgttacatatttacatttttaaaaatataaaaatgacatattattttgaagtgattgtattatagtttctgaagcttatgactggctataaatataacaacatacccatgagaaaccagaccaaaattgaatatatatcatcactgtgaccttgaacttatagtcatttgggataaaacagagtgtgccttgaaatgataaagagtgccctgcaattttataactgtacattttattatgggtggtcctctcaaattggccccaaatccttgtcttcgaggttggtgaaataaaagtttaaaataaaagttgactggtatttcctttagtatttccagaactattgctgtagaggcctcccttaattttcagagttctcattttgaattaaagtagacttacgctacatagatgtagaaaattaggtttggcttaggtttctgaaaaaatattctaggagaaggtggtagcattgttctgaacttaccacacttggaaaaactaatcttcaaatgtaattttttgtcttattaatgagtaatctgtcaaagacatgaattctttgacttgtgctcattctttctgaacttattgaggcttatatatatcaaataaggttaatttacacaataattatttttaataattaataaactcattcatgtagtatattttaaaacattatttcctctcatttttccttctcttttttcttcctatatatttttaaggcttcaagagaaaacgggcttcagtttttaaaaaaatgtagacttgcatttttactgtgcttatttaaaataatggatataatttatattaaggtccaaattattttattcacaggataatcatggtctctgataaaagatgcccacatttctgtgtactcacagttgttgtatatttttcaatttcaattttgaaagtaaactcaacacattgttttcccattttacctccactacctactcgccagacaaaaatatagatttctctaaaaacacatacaaagaaaatgtctttccttaaaacatgatcttattgacatgaaggtagtttgagcaagggtatgtaataaaataaatggctctcaac

SEQ ID NO: 6915 - DNA, 306 bp, Homo sapiens
caagcattctgctcatttcatcaaactttttttcacaaaagtaggttattttgaatttgctatagtttacctattaagaaataagtctttaaataactgatgaaatttatagctgtttggtttctcaaaggttaaatagccacagaaagcctttggttagtttttggcagccaccatgaacaaagtggatcttgtcttcttacatctatgaaaatagagctttgaatggtaaggagatatgttttcttggtaaccaatgcaagattgatgggtggaaacatgattcaaacttacacaatttttctt

SEQ ID NO: 6916 - DNA, 357 bp, Homo sapiens
cttgctgatctttccatttaaacatgcatgatctccagtactttgtacaatgtatagtatattaaatacatttatgtgtaattttgtgtgtatttttatatggtataattaaaattattacatttatgtgattgtaattcacaaaaagtactacttactatattctgtagagtgtgttgtgaatgtttttacctgtgtttgagcattatggtgtaggtttaatagatgaatatttgccttcagtctctgctcaggtattaatgtgtagtaatttttggtgctttctttttaatctgtgataatctggtgttctgaatgttcaaaaataaatttggttgaatacgcacatggtaaaaa

SEQ ID NO: 6917 - DNA, 1041 bp, Homo sapiens
agcactgctgggcctgcaggtctctgtccagctgcagacaaagatctctcttctgcaggatggggtttgttaaagttgttaagaataaggcctgctttaagagataccaagtgaaatttagaagatgacgagagggtaaaactgattactatgcttggaaacgcttggtgatacaggataaaaataatacataacacacacatacaggatgataatttgtgtaacagagatatcatttgtcagattgcttatgcccttatagagggggatatgatagtctgtgcggcatatgcatatgaactgccaaaatatggtttgaaggttggcctgacaaattatgctgcagcgcattgtactggcctgctgctggcccgcagccttctcaataggtttggcatggacaagatctgtgaatgccaagtggaggtgactggtggtaaatacaatgtggaaggcaatcttggtcagccacgtgcctttacctgctatttggatgcagaccttgccagaactaccactggcaataaagttttgggtaccctgaagggcgctgtggatggaggcttgtctgtccctcacagtaccaaacgattccctggttatgattctgaaagcaaggaatttaatgcagaagtacaccggaagcacatcatgggccagaaagttgcagattacatgcactacttaatgaaagaagatgaagatgcttacaagaaacagttctctcaatacataaagaacagcgtaactccagacatgatggaggagatgtataagaaagctcatgctgctatacgagagaatccagtctatgaaaagaagcccaagaaacaaaaaagaagaggtggaaccatcccaaaatatcccttgctcagaagaaagatcaggtaactcaaaagaaggcaaactccctcagagctcaggagcaggctgctgagagctaaaccaaacaattttctatgaggatttttcagataaagacaataaactgatggatagcaacaacaacaacaaaaaacagaaatcaaaaaaacaaaaaac

SEQ ID NO: 6918 - DNA, 98 bp, Homo sapiens
ttttttttttgagacagagtcttgctctgttgcccaggctggagtgcaatggcacaatctcggctcactgcaacctctacctcccaggttcaagtgat

SEQ ID NO: 6919 - DNA, 3524 bp, Homo sapiens
ccagtgttactaactgtaattctatcctgttcttcactggggaaaagcttttccagtgtgctgagacagttttggttatgtaactgttaaaatgatgacagtcgtgtggcctgcggatagcactatgattttctcacagtgagttgaacctggcaggtgttgccactcacatctgaccacatttataacactttctgtactcgtatcttgtgccagtagtctgctagtccagattcatgttcctttttctcttttgaaattaaactcatagcctccaaaaatttgcatttgccctgttttgaggggggagaagtggagactattcatgatgctcaatatatcatagtattaaaatatacattgcaaattcctttgtatttatgcccttttgaaataaaaatgaatgttcttagcaaactcaaagttcttgaactctgtagtttacacatccttagaacagcactaccttgtatgtgatattcaagagactgactttctaaagagtcttagagccaagctttaaattctgatctgttaatatatatttcagtagttgctaataatgccatacctcttcttcactatgctgatcccacacacagctttctttaggagaaggaatacctgtacatatgaatgagaaaactgtagaaataatagttcggacccttttcaaaattgtattcggaattgctagtttagcctctactaaaccatacttggttcctgggcctagtgaagatttgatcatttaatttcgtgaaagccaatacattctagcagcatattgatattaatggccgttgtgaatattgtccgcatctgtgtttcgtatggcatacagtgaacaatacaaataatttcaagaagtttgattttgactactatggactttcattttctagttgttttctttttttcttatcattttcctttcctttttcttcatgttggaaatctttcttctgctgccttcctctgtcaattaaaaggaaaatcccacctaaacggtaatctttctgttgaatacattctaatagcattattttatattaacattataagtgcagttttttacttataatttaaaaggtttttttgttttgtttttttgtgaaacagagtctcgctctgttgcccaggctggagtgcagtggtgcgatcttggctcactgcaacctccacatcccaggttcaagcgattctcctgcgtcagcctccccagtagctgggactacaggcacgtgccaccattcccagctaattttttgtatttttagcagagacggagtttcactgtgttagccaggatggtctcaatctcctgacctcatgatccgcccacctcagcctcccaaagtgctgggattacaggcgtgagccaccgtgccccgcctattttagatagatcttttaaaaacttgagaccgaatatacttgcaaagcaaactgtttatataaaaggaatattgaagattaatcatataaattataaataatttagtagaagatattttatccttttaatataactttacaatttttaattttttttttctccttaaccctagcccaccaagaaaacacattgtggagcgctatacagagttttatcatgtacccactcacagtgatgccagcaagaagagactgattgaggatactgaagactggcgtccaaggactggaacaactcagtctcgctctttccgaatccttgcccagatcactgggactgaacattgtaagtgaacttctaggtatcctaatggatgaatgtttttttgccccagagagtggcattgagactgattggtagttgtcagaaaacaaccccgagacagtttgcttttaaattatgctgtgcataacatgggtaatataaataagaccccaggccgggcacagtggctcacgcctgtaatcccagcgctttgggaggccgaggcaggcagatcatgaggtcatgagttcgagaccagactagccaacatggtgaaaccccgcctttactaaaaatacaaaaattatctgggcatcgtggaagccacctgtaatcccagctacttgggagcctgaggcaggagaatcatttgaaccggggaggcagagattgcagtgagctgagatcacgccactgtactccagcctgggtgatggaggggctctgtctcaaaaataaataaataaataaataaataaaacaccagcccaggagagtaacattgaaaagtatagatgtaatagtagttgtactaactatagtttatggccaataacaggctactatggaattcgttttagtggctccatggaagttgaacatttgatattgattggtgcaggtaattgcttaagtgattttgaagttaaacaaaacaaactaatattggatattgcttattatatttcagtgaaagaatctgaagccgataatacaaagaaggcaaagtaagttctctatctttttgacaattgaatgttttcctttcacgaatggtctcaatttagtttttcaaattgtcaagtataatggtatggcatttcgtctttgcagctagaagctaagcatttaactttggtgccttttgtgtgacctaaatgtacaacttgcagattttaaaagtagtagatattgtctggattttaaggcttgttttccctagtattgaaataagaagtgggcagaagggtatatttcggggtgctttgctaacaatacatatgtctgtgaatgagctcgtgtgttgtcttgcagtcactttattttgaacataaaaatgtatgtttccaagagggatctgtggattaattgctatatttctaaaaatgctctacccttaaaatttttgccacttaataaaacagctatgtgaaattaagcttttataaggcatgttttctgcatgatggaattagtctagaacctttttccttctatttcttatgactcttctatcactctttttttttttttttttttgtatttccacagggaaaagataccccttcacgtctttagtcccaaatacacaaaattacgtgactggcaccatgaagtttcagcacgtgctcttaacgtacagtgatttatgagccttgccccccaagcagccagcacataccttttcatttactttttttttttcaacttcatagcaaaatctgtattaaatttgccttatgaaaaaatagaactttttctatacttttctaacaatttcctattgttgtgagaaaaggaagatgaacatgttttgtgctagttggtagctcacaaatgtaaaaccaaaaaaaaaaaaaaatagaaaattaagggactagatctatttggggatttgtatctgtttttgttgggattagggtagtaatcttggaaaacgaattattttcataagttgaatttggttagttggttggttgaagcagaggataatgagcaaataaagtccttgtctaatttggaaaatactttctttatattattaacatctcccaagattactttttaagttcattattat

SEQ ID NO: 6920 - DNA, 4226 bp, Homo sapiens
ccagtgttactaactgtaattctatcctgttcttcactggggaaaagcttttccagtgtgctgagacagttttggttatgtaactgttaaaatgatgacagtcgtgtggcctgcggatagcactatgattttctcacagtgagttgaacctggcaggtgttgccactcacatctgaccacatttataacactttctgtactcgtatcttgtgccagtagtctgctagtccagattcatgttcctttttctcttttgaaattaaactcatagcctccaaaaatttgcatttgccctgttttgaggggggagaagtggagactattcatgatgctcaatatatcatagtattaaaatatacattgcaaattcctttgtatttatgcccttttgaaataaaaatgaatgttcttagcaaactcaaagttcttgaactctgtagtttacacttccttagaacagcactaccttgtatgtgatattcaagagactgactttctaaagagtcttagagccaagctttaaattctgatctgttaatatatatttcagtagttgctaataatgccatacctcttcttcactatgctgatcccacacacagctttctttaggagaaggaatacctgtacatatgaatgagaaaactgtagaaataatagttcggacccttttcaaaattgtattcggaattgctagtttagcctctactaaaccatacttggttcctgggcctagtgaagatttgatcatttaatttcgtgaaagccaatacattctagcagcatattgatattaatggccgttgtgaatattgtccgcatctgtgtttcgtatggcatacagtgaacaatacaaataatttcaagaagtttgattttgactactatggactttcattttctagttgttttctttttttcttatcattttcctttcctttttcttcatgttggaaatctttcttctgctgccttcctctgtcaattaaaaggaaaatcccacctaaacggtaatctttctgttgaatacattctaatagcattattttatattaacattataagtgcaattttttacttataatttaaaaggtttttttgttttgtttttttgtgaaacagagtctcgctctgttgcccaggctggagtgcagtggtgcgatcttggctcactgcaacctccacatcccaggttcaagcgattctcctgcgtcagcctccccagtagctgggactacaggcacgtgccaccatgcccagctaattttttgtatttttagcagagacggagtttcactgtgttagccaggatggtctcaatctcctgacctcatgatccgcccacctcagcctcccaaagtgctgggattacaggcgtgagccaccgtgccccgcctattttagatagatcttttaaaaacttgagaccgaatatacttgcaaagcaaactgtttatataaaaggaatattgaagattaatcatataaattataaataatttagtagaagatattttatccttttaatataactttacaatttttaattttttttttctccttaaccctagcccaccaagaaaacacattgtggagcgctatacagagttttatcatgtacccactcacagtgatgccagcaagaagagactgattgaggatactgaagactggcgtccaaggactggaacaactcagtctcgctctttccgaatccttgcccagatcactgggactgaacattgtaagtgaacttctaggtatcctaatggatgaatgtttttttgccccagagagtggcattgagactgattggtagttgtcagaaaacaaccccgagacagtttgcttttaaattatgctgtgcataacatgggtaatataaataagaccccaggccgggcacagtggctcacgcctgtaatcccagcgctttgggaggccgaggcaggcagatcatgaggtcatgagttcgagaccagactagccaacatggtgaaaccccgcctttactaaaaatacaaaaattatttgggcatcgtggaagccacctgtaatcccagctacttgggagcctgaggcaggagaatcatttgaaccggggaggcagagattgcagtgagctgagatcacgccactgtactccagcctgggtgatggaggggctctgtctcaaaaataaataaataaataaataaataaaacaccagcccaggagagtaacattgaaaagtatagatgtaatagtagttgtactaactatagtttatggccaataacaggctactatggaattcgttttagtggctccatggaagttgaacatttgatattgattggtgcaggtaattgcttaagtgattttgaagttaaacaaaacaaactaatattggatattgcttattatatttcagtgaaagaatctgaagccgataatacaaagaaggcaaagtaagttctctatctttttgacaattgaatgttttcctttcacgaatggtctcaatttagtttttcaaattgtcaagtataatggtatggcatttcgtctttgcagctagaagctaagcatttaactttggtgccttttgtgtgacctaaatgtacaacttgcagattttaaaagtagtagatattgtctggattttaaggcttgttttccctagtattgaaataagaagtgggcagaagggtatatttcggggtgctttgctaacaatacatatgtctgtgaatgagctcgtgtgttgtcttgcagtcactttattttgaacataaaaatgtatgtttccaagagggatctgtggattaattgctatatttctaaaaatgctctacccttaaaatttttgccacttaataaaacagctatgtgaaattaagcttttataaggcatgttttctgcatgatggaattagtctagaacctttttccttctatttcttatgactcttctatcactctttttttttttttttttttgtatttccacagggaaaagataccccttcacgtctttagtcccaaatacacaaaattacgtgactggcaccatgaagtttcagcacgtgctcttaacgtacagtgatttatgagccttgccccccaagcagccagcacataccttttcatttactttttttttttcaacttcatagcaaaatctgtattaaatttgccttatgaaaaaatagaactttttctatacttttctaacaatttcctattgttgtgagaaaaggaagatgaacatgttttgtgctagttggtagctcacaaatgtaaaaccaaaaaaaaaaaaaaatagaaaattaagggactagatctatttgtggatttgtatctgtttttgttgtgattagggtagtaatcttggaaaacgaattattttcataagttgaatttggttagttggttggttgaagcagaggataatgagcaaataaagtccttgtctaatttggaaaatactttctttatattattaacatctcccaagattactttttaagttcattattatgttacattcaaagttgattgtaaattattctaaataagtaaatataaggaggcaagaataaacaaagactttattaaagaagagtgcgtgcattgtagatttaggtatcttttaaagtaggtactattcaggatggctctatgaagaggaggaggtccagatttggctcctgaaaaaggaaagaagagaattttacccctatttgcaatggagaaatacagtattctttggtttggttggatttgcaaatcctatttcctatcaaaggaaatatctctagtggatatttttagaatatagacaatttctaggtattaactaataagatatggaaaagatagctttgctttttttaatcagaagaacataaaataaattacaatatgaatgattgtgagacatcagagaaatattttacttagtgacgtaaactactgtgcactgctgctattcctaggaagctgtgttttgggcaatacatggaagctaaatatatgaccagaaatgctttctgccttgtaatatagtgtattatatattagagctaaatttagtaataaatgcattttgaagtttggaaaagtattgtaataaagttgcctttaacttagctttgtacttgttctgtttccttgaggctagacacagtgccatccaggacttattacagtataactgggtaaaataaacaattctctgaca

SEQ ID NO: 6921 - DNA, 102 bp, Homo sapiens
agtggaaggtcttttagatgttttacttgtggaatcatgatattaccatattaccataagttatagtattttttatgattttttgcataaatgttactgatt

SEQ ID NO: 6922 - DNA, 106 bp, Homo sapiens
aggctgaggcaggagaatcgcttgaacccgggaggcgaaggttgcggtgagccgagattgcaccattgcattccagcctgggcaacaagagcgaaactccatctct

SEQ ID NO: 6923 - DNA, 102 bp, Homo sapiens; identical to SEQ ID NO: 6921

SEQ ID NO: 6924 - DNA, 3179 bp, Homo sapiens
gggacatcggaaaatccaaatgtggcttttgtattaaatttggaaggtatggtgttcagaactatattataccaagtactttatttatcgttttcacaaaactatttgagtagaataaatggaaactgaattccatttgtgcccgttaaacctcctaaaggatgaaattgcacctattttacacttatattttcacagttaattgaacatatttttaaacaactgtagttttgggcaacttttcactttgtggtagacttcagaagtgtggaaatcttcgggtttctataggaaactagttttttttttttaagaaatactttcatttatgtttgctagaaacattttctaaatgatagtgattagctggttagccatcttcctgttatttggaggagttctgccatcttttattcggtagtgacagctgtaatatggtcttcatgtttatcagtgacttgactacaagtaaagcagaaaacagttggcctgtaatcacagaaccagccacccttcggcgtctacatgcattgtcttagctctgaggttaatttaccatttttaaattttattgtaaagaagtgtaatgactagctctctgtggatctatgccaaaatcatgggccatcttttctaagtgtacttctgattaatgcaaggggaaatttttatactgaaaacaaacaaacaaactagcagctactaaaatagagaagaaattgagggcaaagtaatatgtctccaaaactgaactgattgcttgttgagattacctagaaagcttttggaaaaaaatagagcttttctgcatcctactccagatacactgaatcggaatccctagggctagagcctagaaatctcactttttaaaatgcttccaaggtaagtctgatgcctaccctaggttgggaaccactctttcaaagtaaacagtgatgacacagcatttgctaaagtaacatctgtaggttttggtttccacctatttaaagtcagatttatagactcgaggagacagaaactgaatcccacacctggtgcaattagaagcataattagaagcagaagaacaaaatgccacgtaaccaaagcatcagagccatcattgcacgtgtctttttttcttttttcttttttttttttcaagacagggtctcgctcttttgcccaggatggagtacagtggcatggtcaaggctcactgcagcttcaatcttctgggctcaagtaatccttccacctcagcctcccatatagctggaactacagttgtgcactaccacacccagctaattttttgatttcttgtggagatgaggtctcagtatgttcccaggctagtgttgaactcctgagctcaagaaatcctcctgcctgagtctctgaaagtgctgggattacaggcgtgagccaccacacatggcctattgcacaagtcttgacaaacaacatatattttctaaaactatccagatttcattatcagggaaaagtttgcttaggtttattacagcagtccttggcatttgtatggtaatttgtactttacaaatactttgatatattataactctattggtctttgaaacaaagcgatacagtgtaggtggtatcattctctttctcactcagtgtggcccagagttgctcagaattggagcagagcctgagacgtatctgcagatcctgtcatcagctggcaagtccaggagactgtgtcatttagagactgtgttgttagttatccctcaacatcttctaaggtggcaggaaataatattggaaataacattttaaagtaaaaattttaaagtttaaagaagagttttgccacttaaacaggggagctttgtctggaaaatacactgagttgaaacacttcatccttggaaggattatataagatgaacagttgtgataaatgtgtagattagagggatgtgaatgggcagttagtccagtgccctcatttaagaggccaagatcctgattcagaggaggcatcctttgcccagagctgcttagctaatctgaccaaatgttgggaaaaatgtctcacctaacccactattccttaattatggattttgtgaaaaacaatagaacatgttaatgagtaatttatattagttcgatgtattacaattttttagctttaaattacagttttcttataatgttgaaatgttttagaatcctttgaatctaagtatttgtttcctaaatgaaacatttgtacaacatttgatgtttttacttatgaaatattctcctcccccaagaaaatttaaactttttctctctatttaaaagctaagaaatgttttaaaggaaaaatgaaattatcttcctttagcttatttttaaggtaaaacagctttttactctgttattgtggtaatggacagaatattacatacaaaaatattctgggagagctttttcctagttggttttaaatcattgtgccacctgaaaggtttttagattttataggagctaatttgtccaccagcattaatgtaacacagtgtagttatgaaaatatattgaaggacaggaagtggacacgaagtgatttttgtaacctgagcagttaatgaatgtgccaacattttctaggaagggacagcaagaatattctgctctgtagttaaaatactggctggcttttgatgtcttcatgcttaattgtgatcactttcttgcactgtgatgtttttacgtgaatatgttgaagtagaagtctaccatattattttataaaatgttttctgtatggcaataaactgaaaacatggatcaacccttcttttgaaaataaactgagtcaatttagccttttaaaaatatagtcatctcttttaaatagaatcctcttccaccatcaaggctcaacattttgtaagcatccaaaaaattggtaattagggggcttgcactaaatttcactatcttcagtagagaggaactgtttggaacttagatttccaatgtgtatattctaatggagaaagcaagaggtagagtttgtatgtttgacttaccttagatttttattttccatacatactgcaaatgattgacttgttgcataaatgaagatcttctgttgtgtgcttttcaaacactgtaaataaatttgaaatttgaataactttccacagtataactgt

SEQ ID NO: 6925 - DNA, 6223 bp, Homo sapiens
ggctggttttggttatggattgcccatatcacgtctttacgcacaatacttccaaggagacctgaagctgtattccctagagggttacgggacagatgcagttatctacattaaggtaatagctgtagtcttcttgatttaatatttcttttgatgataagaacagatgtccatacttaactgtaatgaaatttaactctaccacatgctgtttaaatagaaaaaaactatggttttttgctggggatctcacccattttgatagatgatcccctaaaactatggggaaagagatttgtatcctggagtgattaggactctgtctattaataggaaaaaaattgggttaaagtagagaatcataagttatatatcatacaagtttaattttaacataaaacacatgaatggacattgataacgccaaacttttgatgtactgccaaggctttttttttgtatatgggtctgcagattggagtgtcacattgtcttttttgcaaaagctgtactgacagtgcatcattttagtttctttaaaccaacaagtgcatactctttttggacttttatgcagtccttaacagatacctcctgactgatttgacagcaagttttatgtgactttccttcatgagtctttccagaacattcatcttagttttcaagggaacattcccctttttattctttgcttatgtaataaattttgtaattatcatgacagaattgtacaaacagatttgggaacaagcacaagtgactcttggtaagcatatagcttacctaatggacacagaagcacttagtctgcttgcctggagtgttcaatgcattaaggagggttccacacattttacatggtggaaaaacactaggttccatcattccccttcttcggctaactggtggctgtttatgcctgatttagtgactctagtttcttgttctggccactagatggcatctattttataggaaatgttgaagaatttatattggaaaaaatatctgaaaagactaaattctttctagatggtattttttgtttttttaaccatgtcaattgcgagggaaaagggcaacatcaatgcaatgtttttcttttttttttttttttgagacggagtcttgctctgtgtcacgtaagctggagtgcaatggcatgatctcggctcactgcaacctccgcctcccgggttcaagctgttctcctgcctcagccttccgaatagctgggattacaggcgcctgactaattttgtatttttagtagagatggggtttgaccacgctggctaggctgatctcgaactcctgacctcaggtgatccgcttgccttggcctcccaaagtgctgggattacaggcatgagccaccacacctggcctagtgcaatgtttttatgacaaaatgtaacattttgatctagcccaggagtgtccaatcttatggcttccctgggccacagtggaagaacagctgtcttgtgccacacataaaatacactaatgatagctgatgagcttaaaaaagattgcacaaaaaaaaatctcataatgttttaagaaagtttacaaatgtgttgagcttcattcaaagccatcctgggccgcatgcagcctgtgggctgtggattggacaagcttgatctagcctgtagatcaagaaattctggaatatttagagaaatatggaggtgaaaggttttttgttctaccttagggaaaatagaagataagaagtcttagagaatcattaaaattgtcaacatcaaagactttagcattatcagaatgagattttcttgttcagggtgttctgcatcttaggaaatgcctttggcctgggatggaaatactactgaaaaatcctaacttgaagaagataactagaaatgtagtttatctcaggttccagtgacttataggaagctgaaatacaatggagaattactggtaataatatatggaaaactgaaatcatgcatgatgcagaaatcttgtgcacagtgactgaaattggaggccggagaagacacagattcaaacccagggccaataaatgttcacgaaaaagctaagatgccttagacatagatttctatttattaataatgttataatgagtttttaaatttttatgtatttatagagtcaatatcttgctttgttgccaggccggagtgcagtggtacaatcataattcactacagccttgaacccctgggcttcaagtgatcctcctctctcagtctcccaagtagttaggactacacccatgtgccaccatgtccagctgatatttttattttttgtagagacaggatcttgctatgttgcccaggctggtctccaactcctgagctcaagcaatcttcctgtgtaagcctcccaaagcactgggattataggcataagccaccgtgcctggcttgtgatgagttttttttaaagcacagtgactatgctgaaaaaaacactatttcttctagtaaataattaaaatagagttcattaaatttatgtgcatctattaagatacatatatcgatttgtatgcttttacatttaaccaacttcttcagttagccaactctgatctgggtcatgttttgtgtaaaatttcagtccagcagcttccaggatggctggggaattactgtaagcaacaaactcagtcaacctgcacatcagtcagtgccatagatttcataaataacacgtttcaaatatacataccatttaaaagtatatttaggtggtataaggattaataagatactaatagaatattatttaatttgtcgtaacctttttgccattgtctattttctcaaataatgaattctaaaaaatgccagacttaataggtcttaggtttttctttttcaggctctgtcaacagactcaatagaaagactcccagtgtataacaaagctgcctggaagcattacaacaccaaccacgaggctgatgactggtgcgtccccagcagagaacccaaagacatgacgacgttccgcagtgcctagacacacttgggacatcggaaaatccaaatgtggcttttgtattaaatttggaaggtatggtgttcagaactatattataccaagtactttatttatcgttttcacaaaactatttgagtagaataaatggaaactgaattccatttgtgcccgttaaacctcctaaaggatgaaattgcacctattttacacttatattttcacagttaattgaacatatttttaaacaactgtagttttgggcaacttttcactttgtggtagacttcagaagtgtggaaatcttcgggtttctataggaaactagttttttttttttaagaaatactttcatttatgtttgctagaaacattttctaaatgatagtgattagctggttagccatcttcctgttatttggaggagttctgccatcttttattcggtagtgacagctgtaatatggtcttcatgtttatcagtgacttgactacaagtaaagcagaaaacagttggcctgtaatcacagaaccagccacccttcggcgtctacatgcattgtcttagctctgaggttaatttaccatttttaaattttattgtaaagaagtgtaatgactagctctctgtggatctatgccaaaatcatgggccatcttttctaagtgtacttctgattaatgcaaggggaaatttttatactgaaaacaaacaaacaaactagcagctactaaaatagagaagaaattgagggcaaagtaatatgtctccaaaactgaactgattgcttgttgagattacctagaaagcttttggaaaaaaatagagcttttctgcatcctactccagatacactgaatcggaatccctagggctagagcctagaaatctcactttttaaaatgcttccaaggtaagtctgatgcctaccctaggttgggaaccactctttcaaagtaaacagtgatgacacagcatttgctaaagtaacatctgtaggttttggtttccacctatttaaagtcagatttatagactcgaggagacagaaactgaatcccacacctggtgcaattagaagcataattagaagcagaagaacaaaatgccacgtaaccaaagcatcagagccatcattgcacgtgtctttttttcttttttcttttttttttttcaagacagggtctcgctcttttgcccaggatggagtacagtggcatggtcaaggctcactgcagcttcaatcttctgggctcaagtaatccttccacctcagcctcccatatagctggaactacagttgtgcactaccacacccagctaattttttgatttcttgtggagatgaggtctcagtatgttcccaggctagtgttgaactcctgagctcaagaaatcctcctgcctgagtctctgaaagtgctgggattacaggcgtgagccaccacacatggcctattgcacaagtcttgacaaacaacatatattttctaaaactatccagatttcattatcagggaaaagtttgcttaggtttattacagcagtccttggcatttgtatggtaatttgtactttacaaatactttgatatattataactctattggtctttgaaacaaagcgatacagtgtaggtggtatcattctctttctcactcagtgtggcccagagttgctcagaattggagcagagcctgagacgtatctgcagatcctgtcatcagctggcaagtccaggagactgtgtcatttagagactgtgttgttagttatccctcaacatcttctaaggtggcaggaaataatattggaaataacattttaaagtaaaaattttaaagtttaaagaagagttttgccacttaaacaggggagctttgtctggaaaatacactgagttgaaacacttcatccttggaaggattatataagatgaacagttgtgataaatgtgtagattagagggatgtgaatgggcagttagtccagtgccctcatttaagaggccaagatcctgattcagaggaggcatcctttgcccagagctgcttagctaatctgaccaaatgttgggaaaaatgtctcacctaacccactattccttaattatggattttgtgaaaaacaatagaacatgttaatgagtaatttatattagttcgatgtattacaattttttagctttaaattacagttttcttataatgttgaaatgttttagaatcctttgaatctaagtatttgtttcctaaatgaaacatttgtacaacatttgatgtttttacttatgaaatattctcctcccccaagaaaatttaaactttttctctctatttaaaagctaagaaatgttttaaaggaaaaatgaaattatcttcctttagcttatttttaaggtaaaacagctttttactctgttattgtggtaatggacagaatattacatacaaaaatattctgggagagctttttcctagttggttttaaatcattgtgccacctgaaaggtttttagattttataggagctaatttgtccaccagcattaatgtaacacagtgtagttatgaaaatatattgaaggacaggaagtggacacgaagtgatttttgtaacctgagcagttaatgaatgtgccaacattttctaggaagggacagcaagaatattctgctctgtagttaaaatactggctggcttttgatgtcttcatgcttaattgtgatcactttcttgcactgtgatgtttttacgtgaatatgttgaagtagaagtctaccatattattttataaaatgttttctgtatggcaataaactgaaaacatggatcaacccttcttttgaaaataaactgagtcaatttagccttttaaaaatatagtcatctcttttaaatagaatcctcttccaccatcaaggctcaacattttgtaagcatccaaaaaattggtaattagggggcttgcactaaatttcactatcttcagtagagaggaactgtttggaacttagatttccaatgtgtatattctaatggagaaagcaagaggtagagtttgtatgtttgacttaccttagatttttattttccatacatactgcaaatgattgacttgttgcataaatgaagatcttctgttgtgtgcttttcaaacactgtaaataaatttgaaatttgaataactttccacagtataactgt

SEQ ID NO: 6926 - DNA, 212 bp, Homo sapiens
catatgggtaatcagggttgagttaggtagtttgcaaacatgacttttgctggaggaacttttaatcatgtcttattaatttctggtcccaataattaattttcttacagtcaaacccaatgcacttgaaaaataatataattaatactgtgtgaagaattttttgcatgttaaaaaaagcaaaccactagtttgcttagttctggcattca

SEQ ID NO: 6927 - DNA, 212 bp, Homo sapiens; identical to SEQ ID NO: 6926

SEQ ID NO: 6928 - DNA, 3981 bp, Homo sapiens
aatcttaactgtttattgatttggagattgtatctcattggtaaagaacagttacttccttcacagtctaaagacaaattgtgtattattctgtgttaaatagcatggcactgttgatcaggagtttacttctgtctcattacaatgtgaacttgttgcccataaaataattctcttaagattgatacatcctgactatgtactaacatgtcatgtcagtttattattttaaatagaatgtgctaataacatatcattttaaggtttatgtgaactatttctctgaaagaataaaaatttgtcactgtataattgaacatatattgcactttgtattcacaggtttgggggaggcagatcagacatgtaaactatgtacttcttgctaattgaaattatttctacattaaacagacttgtagaatttacttatacatgcttgactttttaattatcttttttctccttttcttaaagatgatacttgttgatgccactgttatcatcctcctagcagaagatagtcctactgagaaaatgagcactttgatcattcagtctttgaactttaacctttgactggaagtgacctataggcaatgaagactacttccttttactgcatttttactcgtgtgcattctgggcgcatgttgatcgctggttcagtccaggcaactgacatgcttttattagtcatacagtattaatgcaggtgtcaggaaatgtcaaatataattccattttttatttttatttttttaagcttttggaaaagctccaggtcctcatgtattgtgcaataacaatgacttccttggcggttttggtacgttcattgccggcaatgggcgttgtaacaggaaaagttttcattaactcctgccattcaatgattaatgcatgatagggcctatgaaatgaacttactggttatagtgggaatataaataaagtgagggatccaacattactttaaaagtcaccccaactgtttatatttggattctatgcactgtgatcctaaggttaacagcatgaattaacatgcgtctttaaaggactgtaatgaaagatcattgcatatttattgaattgtttatatctactgtcaagttgttttgacatggaagattttcaagtaacattggcagagaggtacagtatgttatccctatggtgaaaataaattaatttgttgtatatagttcctcaatctctgaagtaaaggtatgagtaatatagggtatgaatggtttaatcaaggctttattttggaagtaagaaaaatggcagtgatgattaaattgctgcagtccataatttgggcttgttatttgtacattaaagattttttccaagtaagttacactctgttaacttcctgctagccatcagcatgagccctactgcctaaacactatttcatttatttatgtttggaaaccccgtaaacatttttgtttgcaatcttgtttcttttgttataagtcaagtttgaatgttacaatacttttattgaaacttttgttaagttttttcttgtaaattttctttacttgtgagtatcatcttgtcctttaatcctgtaccctaaaataagaaatacatttttgacagaggcttaatgttttaacaaaagagtgtggacatttttattttaaaatttaggcaaaagtcactatcaaatggttgcttatttgtctcacacagccatatagtttttcctggagggttttgttttgttgttgttgaaaagactttgcttacagctagatgaaactttctatagaaaaaaaaaattgttgaaaggtccagttctcagtaccatgtgagttaatgatactacaactaagttctttttaaaaagtgattaatgtattttataaattaccttttcacatatgcaaaatctgtttctactacaatgttatttttactaatgccttattgttgcactctttttgaaatatcctgcagtgaatatatgaatcaatttgggcttaaaactgaaagccagttggctgaaaggtttgaaatacgtaccccagtaaaaccattcaatcaataattggtaaataatattttaaaattgtttttaatctgtatagatgacattttgtagctttgtacatgttgttaattaagggcatataattttacactcaaagtataattgctgaactcaggggtgggtagacttcaaaaatatgtctgctatagaaataacttgaaaaaaaaaattaaaaccgtggccagccaccaaattgtggacactgtttatatactgctagttaacaattaccacttttaaaaaattataaccgtttttgttctatcttgactagataaattctcacaatgatctctgtcagttttattagttggcctgtttaaccaagacagaaagtctttgaattactcatagttttaaactgcttttaatatgaaaattgcagctgtaaattatgtattttcatattttgcgtaactgctctacactactgtttgacttgatcttcttctgggggttagggagaaatctgtctccatattgctggttctcttaccaaaatgcttttataaagaaatgaccggtgacatttattcaccaaaggaattaatatactgagtcaaagattaacaatgctatactatagagtaataggtcatatatagcctcaattgagttttttatgacaatattttaacatacctctctctctacatataaataccataaagtaaactaaaatgacacagaggaaagtagaggaaaatgaaataatttcggtacatcttatggtttaaagagtagaaaataagatgaaatatcctaaaatataggagcacagacatttaaaattcataatcaggctaacaacactctcttgaatttaggaatcattgaaaactccttgcacttagatttaatttatatgttagttacattattaaaagtcataaggcatttatctgagtcattgctctacagagagcaattaatggcttgtaataataaaaagaatatttctctgtaatgcattgttgaaagacaaccagaatatcaagaaaatgtatataggaatatgctacttgcctcctccctgcatttcctcgtggggcactatttgcgacataggcctacagaattagactttcatacttagaagataaggtacactcttcttcttttatttatttatttatttatttttaggccattcttctggtttgccaaattctattaagacagtgatacatttgcttccttatttatgcatgcttagatcatgaacatgatgcccttcttttttttttttttctttggtcaagtagggattaatgccataggtttagagagaaggattgttttcagtttttaagagaattttttaaaaatacattttatggttctcttaaggaattaatattcacttctgaaggacttacttgtaatatataatttatcattttagccagcagggaaataaatcatttttaatccccagaagaaagtgctggaaatagcttctatatagtcagcagttcacctggagaaagatcttaattccttgttgttttgactaggaatatcaatatttggtataaaataactagaatagtttattaccttttccctcatgaaattttaaatatatgcaaatatatatatcattagattcctgtggtggataataatttcttcagattctaaaacaggtgtctagtgactgcttaattgtttccaagttgcatcaaagatgaattggtaaataatggaaatgagtagtgatatgaaaatggttatgtaactacatattacttgtttctggtaatcaagtcttattttttaaaagcctattgtttttcagaattgagatatttaaaacttgttataacttcttcctaaaaatagaagagaagaggaggtactgtgtgttacaaaaatttttttaaataaagaattcagtgtcacta

SEQ ID NO: 6929 - DNA, 624 bp, Homo sapiens
agggatctgcccccatgacccgaacacctccccattaggcccctctccaacatgggggatcactcatttcaacatgagatttgaaggggcagatatccaaaccatatcagtctgtaaaatattttgactaggatttcagaattttttccttgagtgctttcacaactcttggccaccagtcttagtttctttatgtagcttccttctgaagaataactcatcctcagaataaatctttcagatatgttttgtgaaataaattttgtaaaataaataatcctaaagttgtctgtgttacatatatatgtgttgaggctaccagaagttattattaaataatttcatgagttttttaatgaccccatttgcatatgtatctatacttgctgaaagcttattttctttttttttttttctttttttttttttttatgagacagagcctccctctgcctctcaggttgaagcgattcccttgcctcagcctcctgagtagctgagactaccgatgtgtgccacgacgcccagctaatttttgtatttttagtagagggagggtttcaccatgttggccaggctggtctcaaaacacctgacctcaagtgatccgcccgcctcggcctc

SEQ ID NO: 6930 - DNA, 1072 bp, Homo sapiens
catgcctcgtctgtttgccgatttaagacaggtttatgtacatcattatcattagaggcacatagaatctagacatgtacttgaaacttagctctctatcctgaaagttgaagttagggttctttgatcctggtgagatgttaattgtaattttaattttcatatgttaatattgtgacttgtattttgtgatgagtctctagaatgattaaatgactatttttttatgaaaaattttttgttaataaaatatctgagggtattttgagtatgtggaaggaatgcctgaatagaagctgatctatcttaacatacctcaagaactccagttttaatatggtgagtgaggagttgactgggaaaaggagagatccaattcttgttctagtccttggcacatacactctctgggttttgagaaaaggatggtcctacaacgattctaagttgttttctcattggtcctacaacaattctaagttgttttctcaaaggcaaaagcatgatttcaaaatgacatcacttgtcagattttctggtgtatggaaagatttaataatcctgcctcttttgaagcctgaaacttacaatttaaagcctgaaatctaccataaggaacttggtaaattgtgtcagataccatgaaaatgcatcttttcatagttaaccacagattgtttatgtaaaggcaaattggtggtcaggttcaaggtaaaatggattattgggttgattagtagccaaaaactaaatgcatgttcaggtcaaaatgaatttgtttgttttagttggtgccattttccttttattattcagaactacagagtgtgcattttattaataggaatgaaagctcatgcttgaggatttgaatagggtggatgtatatattttataaactcaagttgcaaaatatgtaaagtcactactttttaaatagaatataaatgttaaaacagacaaatctatgttatatattttttaatacatgtatcagacttgttagttgaatgcagattactttgctttatggaatttcataacttttaataataaagcagttgttattgga

SEQ ID NO: 6931 - DNA, 24079 bp, Homo sapiens
ggagatttaacatgagaatgctcgtccctggaaggcctgtaaaagatgctaccccaccaccggtgcctgcagaaagaccatcttacaaagaaaaatttattcctcccgaacttagtatgtgggattattttgttgcaaaggtaaggagtgtgaggaatgcaagctttaagagaagtctatcatctattttattaactcttgcatgtgtctcacataggaatgatggggtagcttttggattgaatcaccatagtttagacgtttaatttattaagtccagaaactgaatagtcatagtaaattcgaggatgatcagttacctgatgatgtaggagacaaattaaaatcacatgggagttatgtataaattagaagtcagcttattacataatcagcaccatctttttcgagtgactggaatacttgtatctaccacctagacacccctcttctaattatcagtggctcccttggtaagcatggaattagaatagaaggagatggatggacatttggcggttttatcaggccatgatgaggccccatgatacatctctgttttcccagcgcaaaggaaacttctcaggggatcagaatactcatggtgactagatctggtatagccccatttcataccatgctgggtgcatgctaatgtttgcttttctgcactttgctcttttgagctcatgattctccttctgttggtatgtttccctctttacatgtgttaactctgttgttaccttgctgtgcatacacatgagggaatacatctccagagtcatgcctcttcccatttttagatttttattagatctcagagttattgaggcgctgatcccgctccgtttttttgtatgctaagctgatccttaaaaagtctttcaacatgagtttggaagctttgttttgttatctaaagactctgaggccaggtgcagtggctcatacctgtaacctcagcactttgggaggttgaggtggaaggattgcttacatccaggagtttgagaccagcctggacaacatagaccatgtctctgccaaaaaaattttaaaacgtaggtgcagtgctgtttgcctgtagttctagctgcttgaaaggctgaggtgagaggattgcttgagtccaggaggtcagcgtggcagtgagccatgattgtgccactgcacaccagcctgggtgtcggactgagacagtgtctcaaaaaaaaagactttggttacgtcagtggttctcaaagtgtggtctcagaaccggcagcatcggcattccttgggaacttgtttgaaatgcagattcttgggtcttccctcagacccctcaatcagaaactctgggagtgagaaccaacaatctatgtcttaacaagctctccagatggttctaatgtgtgctgaagtttgagaactatgagcttaggcacattgtgagtgcagatttccaggtttacactctatcagggtccgagttatacttccagagtcattctggcctatcccttaaggctgccaattgagttgcacttagttgtatttagctaataaaccagggaaataataaagtactcttaaaaatgtataggcagttcccactcctacctttttaaaatttttatttgccacgaatgaaagctcattgcatcattaatgtgagtgataacaacattaagatttgtaaatggtaatgtgctaaatttttgtttttcaaaaatgtttcctcctgatatatgttctgaaaatttggaaaatgcaaaatattataaagaagggaaatagcactcatctgtgcaacaaagataactgttaccattgtggccaatttactattaatcttttttcctcagattaaaaaaatgtataattggatcagtatatgtagttttttttctgttaacattaacaaggtaaacagtttttatgccattaaaaacttatatagctgtcattttaaaaacttcagtgtagaaaacttccaacatacacaaaaggagagataatagcatatgaatcttttatctaccatcatgtagcttcaaaaattatctactcatggacagtcttgtttcatttatacctctccccactactttgtttggaagcaaatccaaacatcatgaaatttcattcaaaaatatttcattatttatttttgaaaaaaaaaaaggattttaaatagatctacattagtgttacacccacagaagcacacccacaattctttaatattatcacatattcagacagtattcacatttcaccagttgcatcttaaatgtttttatatagttgatttgttcaaatcaggatctaaaatatgattcataccttgcaagtggttgctatatcttcagtctcttttaatctataggctccacctctctctctctctctctctctttttttaacttaactcccacctttttcgtttgccctgaaagaattttgacctttagaatttttcaatggattttgctgatggcatcaccatattttgttcctctgaatcttgtcaagtgaaaattaaatccaatttcattctgattggataggaagagggagtacaggattaacttcataggtggttttgtatatttctgtcaggaagctttttatgattttagttgatctttgcctacatttattatttcagtgaaagttttaaattatgataatataatcctgtcattcatttttcatgtatttgctggaatgtctcttcatcaacctattcaattaccctgaagtacattttgagtcggaaagacaggataaatgctttattcttttgcttttgtgtaccagttttcaaaatgatgagttggttcccaagcatccttcagaggaggccagtgagttttgttttgctttcagctttgttatgaacttatagatttaaacatattttatatgttttaatctattgcagttatttttttctcatggggactcagattatccatctttgccagtgagagcctcttccacaattggctccgaatctttttgagattattccactagtgtttgagtttgcctgctttctagttttattctaggctaatcatgtatatttcctgcccgtgactgagaacaatcacttttttgaaataacctggttcctttttgtgagaaattatatttagaaactacagacagatgctggggtgctcgctcttacttggttgatcattgtttctagataagcatcaattatagtgaccatgtaacttttcactttgttagtgatttgatgtttaaaatgccaagaatagtatcttttaaaatatgtcttgttcatgagcagattatttccttaagaagtactaggtcaggcccggcatggtggctcacgcctgtaatcccagcactttgggaggccaaggtgggcagatcatgaggtcaggagattgggaccatcctggctaacacggtgaaaccccgtctctactaaaaatacaaaaaattagccgggcgtggtggcaggtgcctgtagtcccagctactcgggaggctgaggcaggagaatggcgtgaacccgggaggcggagcttgcagtgagccaagatcgtgccactgcgctctagcctgggcaacagagtgagactccgtctcaaaaaaaaaaaaaaagaagtactaggtccaaggctataaacttaaataaggcttttaatacatattgccagattattttccacattactaatttgtactctcttgagaatagtgagaggatgcatctaactttacccccttattagcattaagtattcctttttcatttttgttaatttgatagattaaatgatttttattttctgttagtgacattaaaattttaatgatcttattgccatttgattttccagtttgaggtattgactgttcatattcttacctaaattatctgttgagattatggtatttttcctttttctggatactttatctagagatattattaatttatcttgttaagctttttctagtttatttgctttaaaattttgtttattatgcatttgaagttttaaaaagtttatcatgcacagaaattttaaaaagtttaaaaattagatctatccatacatttccttattgattacattgtttttcagcagaagtcttttccactaataaatgtgtacatttattttaccttccttctctgtttcctcctgttctttttctttctcctcctccttaacttttaattctcttatttatctagaataaagtgaggaacagactggatcagacttcatctcccattcccacacttagctaactagttgttccattattatttattaaataatctttctttttctcccactgacttaagatgttacctttgtcagattaacttcttatacgtgtatgatttttgtattatatttttgcatcaatctagactacatttttcttacttagtttaatatccactaaaaaaaatgggattttttttatttaaaaaaaattccccagctaatctcatctattttttcttctctacgaacttcagaatcattttaaagttccaaaacaggaagagaaattcacagggagatttttattgaaattacttaaagcctgtgtaaattaacttataaagaattacagtttttacacatttcagtccttcccttcatataattttataaagatttataatttccttcacaatagctctctcacagctttcatagtttgtccttttgtatttctttagacttttctaactatttattgctgatctataagaagaaaactattgattaaaaaaaatttcacatctagctattcagttattgaatatgagagttttaccttgtcatcttgacttttgtagatgtagcattatctgcaaaagaaaatttttacttatgctgacaccatttaaaatgtttacttttatgttagaacaaaaataattatatactaaaaatattttctatattaaatatataatacatgttatataaaatatattttatatgtttatgaaattataatctttaaaaaaataattttaccttttattgcagccatttcttcctttgtctgatagtggtgttatatatgattctgatgaaagcattcatagtgatgaagaagatgatgcctttttttcagatacacaaatacaggagcaccaagatccaaattcctataggtaaataagacttttctttctctcattttttttttggcttttctttttgtagaaaatatcaatgttattaattttaaataacattattatcctgaatttatataagaaatgacttatgtttccaggttacaaattctacacctttgaggtcaatgtctacatagtgttttctccacctccaaagactagcttttatggagagtgcaaacacaagcatctttagtgaggaaaaaatatgtaactcatggatatactattagagtttaatatataaattattggtatactattaggtttcatgtgactatgtggttaatctttttccacgaggtaattttcagcaagtgtaatatagtattgcaagttttttgtattcagtgaccacagaggtgccatttttgcatagtaaatttcaatgacagctttttttctgggttggagagtgggctaaacagttggcagggaacaccactctgtttctcccatgattttatttttcacttaaagactctttttgcccctccttgaacagctgggctcttctacatttgacaatggttaaactagcacttcacaatgtcaagaatttctttcctattgctggactggaattctctggtgagtttggaatttaaaaattaatgttattaagtataataaattgccgtcaagtttctctttacaaaatctatatataaggtcatttggtacttaaaaaatagtgcattagatattttataaagtcttgtttattttaggctccaatctgtgactttatttttatttttttagatagagtctcgctctgttgcccagactgtagtgcagtggtgtgatcagagctcactgcaaactccgcctcgtaggctcaagccatcctcccacctcagtctcctgagtagctgggactatagatgtgctaccatgctgggctaatttttgtattttttgtaagagacaaagttacatcatgttacccaggctggtcttgaactcctgggctcaaacgatccacctgccttggcctcctaaagtgctgagattacaagtgtgagccaccacacctggcttcagtctaatactttagtttatatcaagaatcactctctacacagaagattgagaaagagcagaaacccacttctgttttgttgaaagcattaagaatctaaactgtattacattaacatttgcagatttatttgtattttcagaagtattatctctgagaattcagattctataaatatttgggtgatgatcgatattttttattaaaataaataacatattctgtcaccttgtagagctgcctgtaacatcaccattaggtattgctgtgattaaaaacttggagaactgggaacagatcttgcaagagaaaatggatcagtttgaaggtccaccccctaactatatcaacacatatccaactgacctttcagtgggagctggaccagctattcttcgaaataaagcaatgctagaacctgaaaataccccattcaagtaagaaagctcttataatgctgataaagagcgtagcttaacttttctggaagacagtttggctaaatatgccaatatactttaaaacattcataattttgaacctgcagtcctatttttagcagaatacgcttaagaaaaatatcagaaatttgaatagaatttttcccagtattatctgtaattcatagacattccatttacataaaggaaaaagtctttattgtattaatttccggtgtggtgttttttgtttgtttgtttgtttgagacaagagacaaggtctcactctgtcacccaggatggagagcagtggtgcaatctcagctcactgcagcctcaacctcctgggctcaacccatctttttcacctctgcctcctgagtagctggaacaacaggcgagcgccatcggctaattttttttgtattttttgtagagacagggtttcaccatgttgcccacactggtctcaaactcctaggctcaagcagtccctggtcttggcctcccaaagtgctgggattacaggcatgtgccactgcgtatggcatatttatgttcttattgtcagaactcttacagaatttttttctaacaatctatatatgcaaataaggtgcttctgacttttgtcagtaatttaacagtaaacacattacaggtttttaactgatgttttgatcttttacctgccaatctaggtcccttttgataagcagcatgcttttttttttgaggtagtggaccctgattaatagtttttactattaaaataagcttgaaagaacaaagctttttagcttgttaggctgttagaatcggtatctatgacttgtattcattgttgatatgctttaaccaagagaaccaatataaagtataatttaaaaagagaataataagagattcatttgactctcagcttaactggttcattcagtgtaattagagaattagttgctagatgaaatgatttttaggagaactaaaaattaaaagtaaactgtacagttttgttgagcttaatgctgtgtcttctttgcaatagattatgaaggttttaaaaataaatatctttgcaatagattgtgaaggttttaaaaataaatatctgcaaatataaacatattttctatagactaaagtagtgtgatatgttaattttttttaataggtcccgggattcttctgcatttccagtcaaacgactttggcatttccttgttaaacaagaggtccttcaagagacatttattagatatattttcactaagaaaagaaagcagagtgaggtattttgagaaaaatattttctattgtaatttttctttagttttctttaacatttctaaggaaatcagtgcttgatttattctgaaattttctttctggttgggtaatagtcaaagttcactaaactaccgtgaactacttttaagataaaaccttataattttcatttcatagcaatgaaacaacataggtactttgataaattacatatattcaagtgaaagttggtactttacagtatttgtcattaggtttttacacataataaacattgtgatggatggcttgaggaatttaatatataagcttactctataatattctccaaatatgtacttaaaatataaaatagccctttaaaagcattttctttacttagcacttagaaatgaacagaatgatgatttgaagcaacaaattcaggatacttttgtgagagaataaactacagaaatagcaaatacaagatgaaggaagattgctcttacaaagcaagacagaggttctgcattgcatggttatttttaagctaatacaattagtaatgtaatagcagacatggttcaagaagaattagcagtttgggagattggcaagtgacctcttccttataaaagtgggaccttttatatgagcatttcagtctgtttggctatttagtgaggtaattagtgagggaatgagcagtttgaagagtattcagagttgagcgtctgatgtaattaaagatttggcaaacatggccgggcacggtggctcacacctgtaatcccagcactttgggaggccgaggcgggcagatcacctgaagtcaggagttcatgaccagcctgaccaacatggagaaaccccatctctactaaaaatacaaaagattagccgggcgtggtggcgcatgtctgtaatcccagctgctcgggaggttgaggtaagagaattgcttgaacccgagaggcagaggttgcagtaagccaagattgtgccattgcactccagcctgggcaacaagagcgaaactctgtctcaaaaaaaataaagatttggcaaacacaatcaatgagaagagaagaaatgaattatatttcgcttagaaaagtgaaaacagagagagtccatacggctcaatttcccgagataaagtataaaattgcttctcagtttttcctcatgcccagggcagtggaacctaccatacttgttctttttcccactcacccacttacctgaatggtaattgtggtcagcccttatgaacagtcatttgttttctctatggatttaaaaattatatacttaaatgaggaagtagaagaatgaactgtagagaccttttgagtcctagttataagctttttcataacaaaagacccttatggcattgaaattattgatgtgactttgttagggaaatcagaggcaaattatttgcctctgtcatttaaaccactgtgtatagcatttcctatagtgatgctgagtccaaattccataaactaaaatataggaatctaagatagtgatttaaaataaaagattttagccaggcatagtggctcacacctgtaatcctagcactaggtgggggatctcctgagctcaggggtttgagaccagcttggcaacatggtgaaaccccgtctctacaaaagatacaaaacaattatccaggtgtgatggtgtatgcttgtaatcccagctacttgcagggctgaggcaggaggattgcttgagcccaggaggtggaggttgtagtgagctgagatcacacaccactgcactccatcctgggtaacaaagtgagaccctgtcttaatcaataagatttctggtcaattaggggctctgttattcacagaaaaccagttcattgagtgatcaattttctgagtgttttgttcttcaaattattaaaattaatgatttatcacaagtatgttttaagtattggtaaggttgatagcagcttgactggttgacttgtcagagtgtagagtgctgtgggaagccaggtgtctgggtttcttggaccctcccattctcgtcttgcccttccccacgagtttgcttcttccttaactaattctccccctctccgccccttagtctcccttccattatgcccctcagtctctgtgtgttctatttttcttccagcagtgggtccccatgaacagggaagtaggacagagataaacggaatgtttcttaaagtgctatataagcatcagttggctccaaggaagggaagtacatggctgggagttaggatggaagaatttttatcatgtacccttttaattttaaaacattgaatggaattactgtcttgtccagtactgtcccatagaactttctgtgatgatggaaatctgtatctgcatagtccaacatagtagtcaccagccacatgtggttactgagtacttgaaatgtggctagcatgattgagaaactgaattttaattttaattgatctaaatttaaatagttacatatggttagtgattgctgttttgaatagctcagatctgaaaaaaaaggtgttttattaagaaaaaaattatgaataaaacattaaggctgttaggacaaaataaaaactcgtcgttaggctcagaaatatgcaaaacttactaaaactctacccaatccagtaagagtgcttacatctttaaaattgtcaaataggattttggtaatcactaaatttggcaaattcagaaaattgaccaataaaattggcaggctaatcctaaaaatgctgggtgcatttaaaaaaaatccctgagaaatgctgaagttatatatttataagaataagatcttttattcactgaagatattacaggaaaatatttcacaaaacaagtttttgggaaacagattggtgaattcagctagttaagacaaatagattcttcagcagtttggccttcactgagttagctgtgccacacattgaccattccttggaagttttcttggatgcatctttatcagctgcagcagccataggggagtccctggaggcatgggcagaaaatttgaatggcccttcgtgatgaaaggaaggcagtcacctgaaaaggtatgaggaagagtttgtttctctgatcaaaccttcagagtttccacagcagagcagaaatataacttctgattgcagccatccttaggaccctgcatcaacccgggagcaaattactgagttatttctttttccgtgcctgattttattaaacatttatttacttagagaaaaatcatcatattccttataagagtgaaataattatcaatattttgaatctatgtttagaaataaatattttaatttgtattttaaatcaacccctatagggcaggaatttatgtagcatcttctgcatctgcttatacaaatgggctttaattttatagattaccagttatgtaacttagatttcttaaaactgtatacagataactaatttttattttgaaatagcttttatgttcttgtgtttatgtaatagtcacattaattttgctcttttggctttgtgttgtgtttatttgatgactgttttattcggtttaattttttcttgattttgcaaattcatttttatcatctttaagtggtggagtggccatttcagcttgaaatatttcactgtctttataatttcattccatgcatgtgttttgtgtttgtgacggtgtggtggtatttagtctatagaagaacatgtggagcaggtcaaccaaaactgcatagcagaagattgccacatcaaggtagtattccaagatcttgtatttagctcattctttaaagttcaaggagctaacgcctcatctctgatactaaccatgacctgcccaactggctaactactcagagaactcatagtactcccataccacttcagtggcacaggggaggagatgcttcactgtatctggcttgctctgtcttgcccttggttcttctctttcttgctccctgtcccatcttcacttgtcactttttctgttttaagcatggctgtttcatcttcttgattctgccttttctttccttcccatcaccaaccctaagccattgcatcttcctctcatcagtctcttttattcctttcgaagtatccctctttacaacttttccttatttctgtctcaccacccttacttcaaagggtggtttctttgcggttttctatggctttttactccactctgtgcctcttaatgtatacacattcttattgcagaatatttatgcacttttggaagagctaagagagacatactactgtataaattactaataaaaatatattagccatgttttataattaatcagtatcttaccatcacagtggaaattggggtgattacaggacatcagagaatttaagcaaattttccaaagctagttttcaacacattaaagttactcttacccttttttcttgctgctgctgctgctgctgctgctacattttcttcttatcctacatttaaatcttatgggatgtgcataactctaaatagagctgtgctgcagcaactaaaactgctgatgaatgttttctaggttgaagctgatctgggctatccaggtggaaaggcgaaagtcatccataaggaatctgatatgatcatggcattttctgttaataaggtaaaagctctcatcattatacacagtgtatttctccttagtgaaattgcttaaatcatcgattctgcctttgctttataggcaaattgtaatgaaattgttttggcttcaacacatgatgttcaagaacttgatgttacttctctactggcctgtcagtcatacatatggatcggagaagaatatgacagagaatccaaaaggtttgtctcatagtcacttttacatatagttttctgtaagaagtacccaccaaatggttatgcacatgatttgaattatttcaaaaggtatacgtgtatctccttcatttgggtaggtgacaaatataattggtttagctgccagtgaaagtctttgtctacattaactgaatgaattacacttccattaaaccctacactattgataatatttcaataaggataatccctaacacttggcttcatgatattcagtaaattaatctgatctggataattaaaacagtagacacaaatatgttaattacactgagtcacatttaccgagtaattttgcagtgtttcttcttatcacctgataagcataccttttcttaaacataaaaatgtagacggctttacttttcattgaagctatggacactgcaccaagagtgttttgccattcttacctattttgaggtttcttctttgtggtttgccttccctcctgcttttctccagactcttagaaattgttcatgcttgaggatggtgccatgatagtttctctcctcattttgttgaattcttttttttgttagtatgtgatataactaggatttaatatcacatttcagagtagatataaccatgtactatgatacaatccatcccaacaattactttcacattttatatgtcttactccaagaaatctttaaactcaaatttctttaaacgtgttaatttgatactgagctatctgtacttgaagagaacataatatttttccatagataacaacaaacttttgtttcaacttgtgcagcaataaagttgtccccaaacaacattagactaaatttacattttgccaaaagggaaaaaagttaaccagtattaacattggcgattaggacttgtacctaagtttttctcatggctacttagtttttaaaataaagattgtcctatgggtacataagaagatttttagttggaatttgtgttaagagaaaagggaatgttcacagtaacacatgaatgtttttcacagttcagatgatgttgattatcgtggttccactacaactctttatcaacccagtgcaacatcctattcagcaagtcaggtgcatccaccttcatctctgccatggctgggcactggacagactagcactggagctagtgtggtatgttatttacttataggtatcatttctggatttggactctgaaaaatcagttggaatctctttgacataggaatgatcctaaatttcagggacaaacaccagtagataggccatgataatgacagctgacatttattgtggcttttttatttggtgacagggtctggctctgtcgcgcaggctggagtgcagtggtgcaatttcggctcactgcagccttgacctcctgggctcaattgatccttccatctcaacctcccaagtagctgggactacaggtgcatgccagcgtgcctggctaatttttgtattttttgtagggatggggtttcaccacgctgcccaggctgttctcgaactcctgggctcaagtgatctacccgcttcagcctcccaaggtgctaggattacaggcatgagccaccacactggcctcatatgactttcttagtgtcagatacatgctttttctcacaacaatcctaggtggtaggtgctattattaccctccattatcattttacagatgaataaacagatacaaaatggtaaagcaaagttaaaggggaattcatgtctacttctaagtgcttgaaagcatgtcagtaacattcttgtcactgtagctggaggggtcccattcttatgttctgctctgaagcatctggaggtgctcctgaatatcctcagggaggggcacttgaagaagagttcctttattatgagatgaagctccttggtaacctcacaggccagggctataccagcaagtgactgtgcttcctcaccctcttcagacaagtgttctatgtagtggttcagaacatccataacaggctttatctcagtaataagcaaggtgtaagagaataaatgtcagaatttatcctgaagcatatccttcctcatcttttctgcatacacaaaataaaatttttaaaattttcttttaaagcttatgaaaaggaatctacataatgttaagagaatgacttcacacccagtccatcaatactgtaagtatttatgacctaataattgtaagtgtcctcatttggaggttgatttatagaatagaaaatattggaactctttaatttcttatttcctgctttttctcttgtgtttcagatcttacaggtgctcaggacggcagtgtacgaatgtttgaatggacgcggcctcagcaacttgtctgctttcgtcaagctggcaatgcaagagttactagattatattttaattcacaaggcaacaaggttagtttctgggggctactgctgaattcatctgaaaatagttgtggatatttaggagtaagtgataaaagtgcatcgaaaaatgaattcagtgaccctggatttaaactgagtagacagtttgttggagtctattcatacactctcttttcttccaatagaagcaaaaatctacaaaatttagtatggattaatcatctatttaaagatactaaatatactgtgagagtaaaaaaactgcctgtgttgagtgtgttggtgattcctgtaagcacagtaaagttcttgagagaaacctagtttcttactaaatttcatcagtaagaggttagaggaaaacagtgaaacaggtaagcagttaagaagtaatggaagggccagtcacagtggttcacacctgtaattacaacactttaggagcccaaggcaggaggattgcttgaactccagcatttgagacaacctgaacaacaaagggagaccacatccctacaaaaatttttttaaaaagcccaggcatgtgcctctagtcctagctactcagaaggttgaggctggaggatcccttgaacccaggagtttgaggttatagtaagttataattgcactactgcactccagcctgggtaacagaatgagaccctgtctctaaaaaaatttaaaaaaaaagtgacagggaattttttagcacttggactttttgggaatgacagcaacagaaacatagttagaggcagaatgtttatttagtagggccttagtgaatcttccttccatgtttttacctttgctgtggatgctaagaacatgtgtttagtagttatactgttcttacagtgtggtgttgcggatggagagggttttctgagtatctggcaagttaaccaaactgcatcaaatcctaaaccttatatggtaagtatcactaaatgttcccagggcgcatatacacaacactttgttcatgaagtgtctgtttcagacagtgaatctcattggtggtcctattgggaaaaggatgatttttttcagcaatcccagcctgacagcagcacccatccttaccctagttttagactgaaatgacctgaaaaacaaaaagccttgcttttcaccttgaagtacagtttatattttaaaaattttgggggctttccctgtgtgtggtacaacttgggttttttttcattattattatactttcatccattttgaaaactctatcttcttaatatacacatgataaaattctgtcattaagaatcaggttctgccgggcacggtggctcacgcctgtaatcccagcactttgggaggccgaggcgggcagatcacaaggtcaggagttcgagaccagcctgaccaacctggtgaaaccccctctctactaaaaatacaaaaattagccaggcatggtgacacgtgcatgaagtcccagctactcgggaggctgaggcaggagaatcgcttgaacccaggaggcggaggttgcagtgagctgagattgtgccactgcgctctagcttgggcaacagagtgagacttcgtctcagaaaaaaaaagaatcaggttccaaacatctgttccaatttgttccagaattgtgcttaccagattataaaataaccaatcccaatgagccaccttaatccaaattggattacaaaatagttggtgatgaagataagtagatctttacctgatggagatatggtgggggaaaggaacatgggggagggtggaaggtgatgctgtcctgtgtgaaacttcaggcttcacatatatggagggaggttcagaacgccttgaacctcctgggaccagatagattacccaaatactttttaaaatttttctaaactatacatatgttcttaattatgtgtataagataattctcttaaattaggacactatagactgtaccttgtctatgcagaaatggaagtaatcttgaatttatacttttgtcttcagtcagatctgtaccactataattccagacagaaaaacatgcattatattttaaaataccttgacatcctaagactagttgggtctgtaagcatttcctttgtgactgttaaagtttattacatgtatttgagatcattagcactaaaattgacgggtcttaggtaggttcatgtactttgatgtcctattcttacataatctgaaaaacatgacctttaattctgtttttaccaactccagttattaaaaattattggacagtagccaaataatatacacatgacagttaagcctcatactatcacttattcttttatcctagaccgagtttttaaaaactatttttagctcatgcatatagtatgttattagcagacatgtatgttggtactgtatcaaattttatccaatggtaaaataacatcagttgcactttgtttttcgtagagttggcagtgccacagtaaagccacaagtgactttgcatttattacctcttcaagtctagttgccacatctggacactccaatgacaataggtaggttgacagaaaagcaaagtaagaaatataaaaacgttagaaatccatacctttagcaagaatacttttctattagtagggtttttccactctaggcattaaaaaaaaaaactttgttacataattcttatttcagagtgttttttcttaccaaaaagagaaaagcaaaaatgaaagttattcctaatatatgtaatttttattttaaagctattcagtcttttttaaactactactgttaacactgttagtttctctaggactaacaggcatctgatattgtctccatcattctcaacatttttattttattgcagtaggtttgggggaataggtagtgtttggttacatggataagttctttagtggtgattgctgagattttggtgcacccatcacctgagcagtgtacactgtacccagtgtgtagtcttttattcttcaccctcctcccacccctcccaagcccccagagtccattatatatcattctgatcctttgcatcctcatagcttagctcccacttacaagtgagaacatacgacatatgattttctactcctgagttacttcacttagaataatggcctctaactccatctgggttgctgcaaaatgtgattatctcattcctttttatgaagtattccatggtgtatatgtaccacattttctttatccatttgttggttgatggacatttaggttggttccatagttttgcaattgtgaattgtgctgctctaaacaggcatgtgcaagtgtctttttcatataatgacttcttttcctctgggtagatacccagtagtgggattgctggattgaatggtagttctgcttatagttctttaaggaatctccgtatactgtttttcatggtggttttactagtttacattcccaccagcagtgaggtgtccccttttcaccacctccatgccagcgtctattgttttttggttttttaattatggccattcttgcaggaataaggtggtatcgtattggagttttaatttgcattttcctggtaattagtggttttgagcattttttcctgtttgttggccatttgtattttgagaattatctgttcatgtcctttgctcgcttttgatgggattgttttttcttgttaagttccttgtagattctagatataagtcccttgtcagatatatacattgtattttctcccactctgcaggttgcctttttactcttgctgtgcagaagtgttttagtttaattaggtcccatttatttatttttgttgcatttgcctttgggttcttggtcatgaattctttaagtcaatgtctagagtagttttttttgatgttatcttctagaatttttatggtttcaagtgttagatttaagtttgacccatcttgagttaatttttgtataaggtgagagatgaggattcagggactaacaggtatttgacactgtccccatcattctcaacatttattttgacctcacatggttttcattagcaacacatgcccatgaataacatcttgtttccctgcagtggctaccacctggggatataaaagcattccttatactcaggaagtcatatcagtttcctggagtggcaatggaaaggagatggggtagaggatgcagagacgggcaggaccatgtgagatggaactgtgtagtttgaccctacccccatcctagttgggaatcactactctctataggtgtgagtgaacaaaaaagataagaatgaataagcaaaatatttgactgaaagacaggttgtccctgatgacgacttataacaatcatttatgatgtatttttgttattgtgtttctttaaaagaaatgtttgcctctgggacacattaatatcacccggaaacagcctcattcatggtgagttaaggtctatgatttttaaaaatataccatgaaggaataatacaccatgaaggaatgctttcttggttttaattagtgaatccagtgagtgtttattgacaggttgaaaatggagaaatatttagaatgaatgactaaaaatttggaaagttaattagcatatctggcttccttgctgagttaaagatatatggtctcagaaatccaaaatagtctttatattctattcagaaaatatggtatggatagtggtactactaacaaggctatttaagaaattagttgcaaagtattcattgagcttaatagaaaataacatattttaaagaattaaacctcatcataaaatactttttgtctttttttcctttttgtggagatcaaggtcatgctgtattgctcaggcaggtctcaagctcctagggtcaagctatcctcccacctctacctccctaagtactgggattacaagcatgagccaccacacctggccctaaccataaaataaaacaaaggttaaccttattataatgactagaaatgtaaacagtgccatttaaatattattccttttaagacaatacttgccaaattagtgtcctaactctgtcttccacatagtaccacccaaaaagtgctccatgctcaagtaagtttggttaaatgaagtagattgtcagaaagacagaaagattctcagtcttttaatacactgatatgcattttgaaatatgtagttaattctcaattttattgcagaattctgcaaacagtggttaacattgcttacagattttctgcatgttaatttgaatctttaatcatattaaaatgcaaatactcctgggaaggataatgaacttcttaacttgtaactgaaaacattcacacattttctcatagtgtcgttgtttcaattacttacctgaaaagaactttttgtacggtacagcacttggctgggttaatactcaccaactttgagaaggttggtctctgctcttctgtatactttttatgaggcagtatcacttagggcttaaggtttaaactttctttttctctctgtgttcatttcatattgagattatggataaaaagtttgttctgacattgcttaacatttttctttaatcatgtgattacagaaattcaatgacttacaaaacaataaatgtaccttagaatgaaaaatgcatcagtaaggtctgtatttaaatgtggatgtagacatcataattaccaagacaagaaattgttttgagaaattctctgatgtttttcttcttcaggtttcacgtgccacgatcatggtgccacggtactgcagtatgcacccaaacagcaactcctaatctcggggggtaggaaaggacacgtctgcatttttgacatcaggcaaaggcagctcattcacacgttccaggcccatgactcagctattaaggctctggccttggatccctatgaggaatattttaccacaggttcagcagaaggtaacataaaggtgagtcagtacaagaggttggaatgtgctaaagactgattggaaagagaaaaaacaaaaactccacattctttgaaataaagcttcactttatttcacttgggctactgcatggagatactgcatatctcaacactctgccgcctccccatgctcctgtatggttctttctaaactgttatggtcaatgagattatcaaactcattggactcaggccattagaaagctttaaagcattctattttgagtaaagtgtatgagtttaatgcatgaaattttttgatgacattagtttggctccttagaagcttctcccctctccctcagtactcttgtgtgtggtggaggtgacgtttccagtaagtgagctagtgcagatgctccttgactttatggtgggattatgtcccaacaaacccattataagttaaaaatattgttaaagttgaaaaacatactttcaacttaatattttcaacttactatgagtttattgagactaacctcaggataagccaaggagcgtgctgaatgcgtattgctttcacactgtcataaagtcaaaaagtcttgtcaaaccatcgtaagtaggggactgtctgtaccacactacttttacatagccttaggacctagctcagcatgaggaacacatttaactgaattaactcaaatagttaattgaattagagatgggctacatatggttaatatgaagccacaagaggatgtgaaggaaaatatggaaggaggacagtaaatgaatcgtgggagtggtgttatcatttcccacttagataagctcttaggaaagaggcagtgggtgggaaggttgggctttagtgagatcacttgggccaagggagcagaagggccatgtttttgcttttggtcttttcgtaatatatttttaactccttttgttttgcactaggtttggagattgacaggccatggcctaattcattcatttaaaagtgaacatgctaagcagtccatatttcgaaacattggggctggagtcatgcagattgacatcatccagggcaatcggctcttctcctgtggtgcagatggcacgctgaaaaccagggttttgcccaatgcttttaacatccctaacagaattcttgacattctataaagattggggttttatttttatatacatttcagttaaaaggcacactacagtcatcactaggcaattctgctttctaagcagttgtattgaaaacagagaatctctgtgtagaatttgaatatgacccaagctgagtattatctaaacaggttggtggaatgaatgcgcatgtaccttattatgctgacatactaaaaaaaataaaacctagtattgtatgaaggatagctattctttacagcatttagcaaacctgattcagaaaacatttgagattagcaaattagtaacttgaaataatgaaaaggacgtttataccaaattaaggaagaaaatgttgctgatttgggtttttcttcctgttcttaccactgactgaagcatgcctgcagtctcctcctctgttgaatgaaggataatcataaggtgtttgttaggagcgctagaccacctggaaaactttcttagctgtggagcagtgcgcagtgaccagttctctgctgtgagaggccgtttccattctttcctgctgaatatttttcctgttagtgtttatactgagctagtactgtaacttgcaaatgagtgcaaatttaaatgcaatgttttactcacaatttgcacattcacattttttggactgctagtttttctatttaaatatttgccttcatgttaggaatgtactatgtgaacatgacatatttgtagttaaccaaacacaccttcttagtccagtttagtactttttcttttcgtgtattcaaggttaaacacccaaacatttaaggatatgttgaaactacaccaatagagcatttcatatcataattaaaatgaatgttaggcttcttgtggccagttaatagttgatgagattggtgacattatttattgccacagcctattgtataaactatgcagagttaaatatttgcttgtaaaatattagccaatgttgtcattattttgatgtatttccttggttatgaccaaaaatatgttgagatactgaaactaatgtctgtgtgtttaaatgtttaccagcaaattgtcttatcatgttaatgagaatgttcaatgcctgtgtggtaaatagtaaatacaatggcataaaagtaactttctctgaagatgtgatgttcaggctgtgaaatatatatgtaaaagaaaaataaatgttatttgttagagtttttagtttgatactgtttttgaccattgagatttttaatttgataaaatgtttaactgttagagaatttgcaagctatttggcagtctattcattcataagtaagtatttactgaataccttctataccaaaagccattctaggaaatgggatacagtggagagccagacagagaaagcacacaatgttgagatttagcggggcaagagctaacctcactataccttctccagacagatttgaagtttattgaatgaagtactaacctcgtacccaaaactcaaatctgagtcttggctatttgcttgctcctaagtaagtaagggaagtcagaatatgcccactgataagaagagccaggaaaataagcttgtgagtgacatctcaatgcctaaagcaaaactgattcaaaggagctttcagaaaaaagggaagagaactttctctgtcaggtaaaagcagtaagagactctagattcaccttctagcttgaaacaactaaaa

SEQ ID NO: 6932 - DNA, 17595 bp, Homo sapiens
gagctgcctgtaacatcaccattaggtattgctgtgattaaaaacttggagaactgggaacagatcttgcaagagaaaatggatcagtttgaaggtccaccccctaactatatcaacacatatccaactgacctttcagtgggagctggaccagctattcttcgaaataaagcaatgctagaacctgaaaataccccattcaagtaagaaagctcttataatgctgataaagagcgtagcttaacttttctggaagacagtttggctaaatatgccaatatactttaaaacattcataattttgaacctgcagtcctatttttagcagaatacgcttaagaaaaatatcagaaatttgaatagaatttttcccagtattatctgtaattcatagacattccatttacataaaggaaaaagtctttattgtattaatttccggtgtggtgttttttgtttgtttgtttgtttgagacaagagacaaggtctcactctgtcacccaggatggagagcagtggtgcaatctcagctcactgcagcctcaacctcctgggctcaacccatctttttcacctctgcctcctgagtagctggaacaacaggcgagcgccatcggctaattttttttgtattttttgtagagacagggtttcaccatgttgcccacactggtctcaaactcctaggctcaagcagtccctggtcttggcctcccaaagtgctgggattacaggcatgtgccactgcgtatggcatatttatgttcttattgtcagaactcttacagaatttttttctaacaatctatatatgcaaataaggtgcttctgacttttgtcagtaatttaacagtaaacacattacaggtttttaactgatgttttgatcttttacctgccaatctaggtcccttttgataagcagcatgcttttttttttgaggtagtggaccctgattaatagtttttactattaaaataagcttgaaagaacaaagctttttagcttgttaggctgttagaatcggtatctatgacttgtattcattgttgatatgctttaaccaagagaaccaatataaagtataatttaaaaagagaataataagagattcatttgactctcagcttaactggttcattcagtgtaattagagaattagttgctagatgaaatgatttttaggagaactaaaaattaaaagtaaactgtacagttttgttgagcttaatgctgtgtcttctttgcaatagattatgaaggttttaaaaataaatatctttgcaatagattgtgaaggttttaaaaataaatatctgcaaatataaacatattttctatagactaaagtagtgtgatatgttaattttttttaataggtcccgggattcttctgcatttccagtcaaacgactttggcatttccttgttaaacaagaggtccttcaagagacatttattagatatattttcactaagaaaagaaagcagagtgaggtattttgagaaaaatattttctattgtaatttttctttagttttctttaacatttctaaggaaatcagtgcttgatttattctgaaattttctttctggttgggtaatagtcaaagttcactaaactaccgtgaactacttttaagataaaaccttataattttcatttcatagcaatgaaacaacataggtactttgataaattacatatattcaagtgaaagttggtactttacagtatttgtcattaggtttttacacataataaacattgtgatggatggcttgaggaatttaatatataagcttactctataatattctccaaatatgtacttaaaatataaaatagccctttaaaagcattttctttacttagcacttagaaatgaacagaatgatgatttgaagcaacaaattcaggatacttttgtgagagaataaactacagaaatagcaaatacaagatgaaggaagattgctcttacaaagcaagacagaggttctgcattgcatggttatttttaagctaatacaattagtaatgtaatagcagacatggttcaagaagaattagcagtttgggagattggcaagtgacctcttccttataaaagtgggaccttttatatgagcatttcagtctgtttggctatttagtgaggtaattagtgagggaatgagcagtttgaagagtattcagagttgagcgtctgatgtaattaaagatttggcaaacatggccgggcacggtggctcacacctgtaatcccagcactttgggaggccgaggcgggcagatcacctgaagtcaggagttcatgaccagcctgaccaacatggagaaaccccatctctactaaaaatacaaaagattagccgggcgtggtggcgcatgtctgtaatcccagctgctcgggaggttgaggtaagagaattgcttgaacccgagaggcagaggttgcagtaagccaagattgtgccattgcactccagcctgggcaacaagagcgaaactctgtctcaaaaaaaataaagatttggcaaacacaatcaatgagaagagaagaaatgaattatatttcgcttagaaaagtgaaaacagagagagtccatacggctcaatttcccgagataaagtataaaattgcttctcagtttttcctcatgcccagggcagtggaacctaccatacttgttctttttcccactcacccacttacctgaatggtaattgtggtcagcccttatgaacagtcatttgttttctctatggatttaaaaattatatacttaaatgaggaagtagaagaatgaactgtagagaccttttgagtcctagttataagctttttcataacaaaagacccttatggcattgaaattattgatgtgactttgttagggaaatcagaggcaaattatttgcctctgtcatttaaaccactgtgtatagcatttcctatagtgatgctgagtccaaattccataaactaaaatataggaatctaagatagtgatttaaaataaaagattttagccaggcatagtggctcacacctgtaatcctagcactaggtgggggatctcctgagctcaggggtttgagaccagcttggcaacatggtgaaaccccgtctctacaaaagatacaaaacaattatccaggtgtgatggtgtatgcttgtaatcccagctacttgcagggctgaggcaggaggattgcttgagcccaggaggtggaggttgtagtgagctgagatcacacaccactgcactccatcctgggtaacaaagtgagaccctgtcttaatcaataagatttctggtcaattaggggctctgttattcacagaaaaccagttcattgagtgatcaattttctgagtgttttgttcttcaaattattaaaattaatgatttatcacaagtatgttttaagtattggtaaggttgatagcagcttgactggttgacttgtcagagtgtagagtgctgtgggaagccaggtgtctgggtttcttggaccctcccattctcgtcttgcccttccccacgagtttgcttcttccttaactaattctccccctctccgccccttagtctcccttccattatgcccctcagtctctgtgtgttctatttttcttccagcagtgggtccccatgaacagggaagtaggacagagataaacggaatgtttcttaaagtgctatataagcatcagttggctccaaggaagggaagtacatggctgggagttaggatggaagaatttttatcatgtacccttttaattttaaaacattgaatggaattactgtcttgtccagtactgtcccatagaactttctgtgatgatggaaatctgtatctgcatagtccaacatagtagtcaccagccacatgtggttactgagtacttgaaatgtggctagcatgattgagaaactgaattttaattttaattgatctaaatttaaatagttacatatggttagtgattgctgttttgaatagctcagatctgaaaaaaaaggtgttttattaagaaaaaaattatgaataaaacattaaggctgttaggacaaaataaaaactcgtcgttaggctcagaaatatgcaaaacttactaaaactctacccaatccagtaagagtgcttacatctttaaaattgtcaaataggattttggtaatcactaaatttggcaaattcagaaaattgaccaataaaattggcaggctaatcctaaaaatgctgggtgcatttaaaaaaaatccctgagaaatgctgaagttatatatttataagaataagatcttttattcactgaagatattacaggaaaatatttcacaaaacaagtttttgggaaacagattggtgaattcagctagttaagacaaatagattcttcagcagtttggccttcactgagttagctgtgccacacattgaccattccttggaagttttcttggatgcatctttatcagctgcagcagccataggggagtccctggaggcatgggcagaaaatttgaatggcccttcgtgatgaaaggaaggcagtcacctgaaaaggtatgaggaagagtttgtttctctgatcaaaccttcagagtttccacagcagagcagaaatataacttctgattgcagccatccttaggaccctgcatcaacccgggagcaaattactgagttatttctttttccgtgcctgattttattaaacatttatttacttagagaaaaatcatcatattccttataagagtgaaataattatcaatattttgaatctatgtttagaaataaatattttaatttgtattttaaatcaacccctatagggcaggaatttatgtagcatcttctgcatctgcttatacaaatgggctttaattttatagattaccagttatgtaacttagatttcttaaaactgtatacagataactaatttttattttgaaatagcttttatgttcttgtgtttatgtaatagtcacattaattttgctcttttggctttgtgttgtgtttatttgatgactgttttattcggtttaattttttcttgattttgcaaattcatttttatcatctttaagtggtggagtggccatttcagcttgaaatatttcactgtctttataatttcattccatgcatgtgttttgtgtttgtgacggtgtggtggtatttagtctatagaagaacatgtggagcaggtcaaccaaaactgcatagcagaagattgccacatcaaggtagtattccaagatcttgtatttagctcattctttaaagttcaaggagctaacgcctcatctctgatactaaccatgacctgcccaactggctaactactcagagaactcatagtactcccataccacttcagtggcacaggggaggagatgcttcactgtatctggcttgctctgtcttgcccttggttcttctctttcttgctccctgtcccatcttcacttgtcactttttctgttttaagcatggctgtttcatcttcttgattctgccttttctttccttcccatcaccaaccctaagccattgcatcttcctctcatcagtctcttttattcctttcgaagtatccctctttacaacttttccttatttctgtctcaccacccttacttcaaagggtggtttctttgcggttttctatggctttttactccactctgtgcctcttaatgtatacacattcttattgcagaatatttatgcacttttggaagagctaagagagacatactactgtataaattactaataaaaatatattagccatgttttataattaatcagtatcttaccatcacagtggaaattggggtgattacaggacatcagagaatttaagcaaattttccaaagctagttttcaacacattaaagttactcttacccttttttcttgctgctgctgctgctgctgctgctacattttcttcttatcctacatttaaatcttatgggatgtgcataactctaaatagagctgtgctgcagcaactaaaactgctgatgaatgttttctaggttgaagctgatctgggctatccaggtggaaaggcgaaagtcatccataaggaatctgatatgatcatggcattttctgttaataaggtaaaagctctcatcattatacacagtgtatttctccttagtgaaattgcttaaatcatcgattctgcctttgctttataggcaaattgtaatgaaattgttttggcttcaacacatgatgttcaagaacttgatgttacttctctactggcctgtcagtcatacatatggatcggagaagaatatgacagagaatccaaaaggtttgtctcatagtcacttttacatatagttttctgtaagaagtacccaccaaatggttatgcacatgatttgaattatttcaaaaggtatacgtgtatctccttcatttgggtaggtgacaaatataattggtttagctgccagtgaaagtctttgtctacattaactgaatgaattacacttccattaaaccctacactattgataatatttcaataagggataatccctaacacttggcttcatgatattcagtaaattaatctgatctggataattaaacagtagacacaaatatgttaattacactgagtcacatttaccgagtaattttgcagtgtttcttcttatcacctgataagcataccttttcttaaacataaaaatgtagacggctttacttttcattgaagctatggacactgcaccaagagtgttttgccattcttacctattttgaggtttcttctttgtggtttgccttccctcctgcttttctccagactcttagaaattgttcatgcttgaggatggtgccatgatagtttctctcctcattttgttgaattcttttttttgttagtatgtgatataactaggatttaatatcacatttcagagtagatataaccatgtactatgatacaatccatcccaacaattactttcacattttatatgtcttactccaagaaatctttaaactcaaatttctttaaacgtgttaatttgatactgagctatctgtacttgaagagaacataatatttttccatagataacaacaaacttttgtttcaacttgtgcagcaataaagttgtccccaaacaacattagactaaatttacattttgccaaaagggaaaaaagttaaccagtattaacattggcgattaggacttgtacctaagtttttctcatggctacttagtttttaaaataaagattgtcctatgggtacataagaagatttttagttggaatttgtgttaagagaaaagggaatgttcacagtaacacatgaatgtttttcacagttcagatgatgttgattatcgtggttccactacaactctttatcaacccagtgcaacatcctattcagcaagtcaggtgcatccaccttcatctctgccatggctgggcactggacagactagcactggagctagtgtggtatgttatttacttataggtatcatttctggatttggactctgaaaaatcagttggaatctctttgacataggaatgatcctaaatttcagggacaaacaccagtagataggccatgataatgacagctgacatttattgtggcttttttatttggtgacagggtctggctctgtcgcgcaggctggagtgcagtggtgcaatttcggctcactgcagccttgacctcctgggctcaattgatccttccatctcaacctcccaagtagctgggactacaggtgcatgccagcgtgcctggctaatttttgtattttttgtagggatggggtttcaccacgctgcccaggctgttctcgaactcctgggctcaagtgatctacccgcttcagcctcccaaggtgctaggattacaggcatgagccaccacactggcctcatatgactttcttagtgtcagatacatgctttttctcacaacaatcctaggtggtaggtgctattattaccctccattatcattttacagatgaataaacagatacaaaatggtaaagcaaagttaaaggggaattcatgtctacttctaagtgcttgaaagcatgtcagtaacattcttgtcactgtagctggaggggtcccattcttatgttctgctctgaagcatctggaggtgctcctgaatatcctcagggaggggcacttgaagaagagttcctttattatgagatgaagctccttggtaacctcacaggccagggctataccagcaagtgactgtgcttcctcaccctcttcagacaagtgttctatgtagtggttcagaacatccataacaggctttatctcagtaataagcaaggtgtaagagaataaatgtcagaatttatcctgaagcatatccttcctcatcttttctgcatacacaaaataaaatttttaaaattttcttttaaagcttatgaaaaggaatctacataatgttaagagaatgacttcacacccagtccatcaatactgtaagtatttatgacctaataattgtaagtgtcctcatttggaggttgatttatagaatagaaaatattggaactctttaatttcttatttcctgctttttctcttgtgtttcagatcttacaggtgctcaggacggcagtgtacgaatgtttgaatggacgcggcctcagcaacttgtctgctttcgtcaagctggcaatgcaagagttactagattatattttaattcacaaggcaacaaggttagtttctgggggctactgctgaattcatctgaaaatagttgtggatatttaggagtaagtgataaaagtgcatcgaaaaatgaattcagtgaccctggatttaaactgagtagacagtttgttggagtctattcatacactctcttttcttccaatagaagcaaaaatctacaaaatttagtatggattaatcatctatttaaagatactaaatatactgtgagagtaaaaaaactgcctgtgttgagtgtgttggtgattcctgtaagcacagtaaagttcttgagagaaacctagtttcttactaaatttcatcagtaagaggttagaggaaaacagtgaaacaggtaagcagttaagaagtaatggaagggccagtcacagtggttcacacctgtaattacaacactttaggagcccaaggcaggaggattgcttgaactccagcatttgagacaacctgaacaacaaagggagaccacatccctacaaaaatttttttaaaaagcccaggcatgtgcctctagtcctagctactcagaaggttgaggctggaggatcccttgaacccaggagtttgaggttatagtaagttataattgcactactgcactccagcctgggtaacagaatgagaccctgtctctaaaaaaatttaaaaaaaaagtgacagggaattttttagcacttggactttttgggaatgacagcaacagaaacatagttagaggcagaatgtttatttagtagggccttagtgaatcttccttccatgtttttacctttgctgtggatgctaagaacatgtgtttagtagttatactgttcttacagtgtggtgttgcggatggagagggttttctgagtatctggcaagttaaccaaactgcatcaaatcctaaaccttatatggtaagtatcactaaatgttcccagggcgcatatacacaacactttgttcatgaagtgtctgtttcagacagtgaatctcattggtggtcctattgggaaaaggatgatttttttcagcaatcccagcctgacagcagcacccatccttaccctagttttagactgaaatgacctgaaaaacaaaaagccttgcttttcaccttgaagtacagtttatattttaaaaattttgggggctttccctgtgtgtggtacaacttgggttttttttcattattattatactttcatccattttgaaaactctatcttcttaatatacacatgataaaattctgtcattaagaatcaggttctgccgggcacggtggctcacgcctgtaatcccagcactttgggaggccgaggcgggcagatcacaaggtcaggagttcgagaccagcctgaccaacctggtgaaaccccctctctactaaaaatacaaaaattagccaggcatggtgacacgtgcatgaagtcccagctactcgggaggctgaggcaggagaatcgcttgaacccaggaggcggaggttgcagtgagctgagattgtgccactgcgctctagcttgggcaacagagtgagacttcgtctcagaaaaaaaaagaatcaggttccaaacatctgttccaatttgttccagaattgtgcttaccagattataaaataaccaatcccaatgagccaccttaatccaaattggattacaaaatagttggtgatgaagataagtagatctttacctgatggagatatggtgggggaaaggaacatgggggagggtggaaggtgatgctgtcctgtgtgaaacttcaggcttcacatatatggagggaggttcagaacgccttgaacctcctgggaccagatagattacccaaatactttttaaaatttttctaaactatacatatgttcttaattatgtgtataagataattctcttaaattaggacactatagactgtaccttgtctatgcagaaatggaagtaatcttgaatttatacttttgtcttcagtcagatctgtaccactataattccagacagaaaaacatgcattatattttaaaataccttgacatcctaagactagttgggtctgtaagcatttcctttgtgactgttaaagtttattacatgtatttgagatcattagcactaaaattgacgggtcttaggtaggttcatgtactttgatgtcctattcttacataatctgaaaaacatgacctttaattctgtttttaccaactccagttattaaaaattattggacagtagccaaataatatacacatgacagttaagcctcatactatcacttattcttttatcctagaccgagtttttaaaaactatttttagctcatgcatatagtatgttattagcagacatgtatgttggtactgtatcaaattttatccaatggtaaaataacatcagttgcactttgtttttcgtagagttggcagtgccacagtaaagccacaagtgactttgcatttattacctcttcaagtctagttgccacatctggacactccaatgacaataggtaggttgacagaaaagcaaagtaagaaatataaaaacgttagaaatccatacctttagcaagaatacttttctattagtagggtttttccactctaggcattaaaaaaaaaaactttgttacataattcttatttcagagtgttttttcttaccaaaaagagaaaagcaaaaatgaaagttattcctaatatatgtaatttttattttaaagctattcagtcttttttaaactactactgttaacactgttagtttctctaggactaacaggcatctgatattgtctccatcattctcaacatttttattttattgcagtaggtttgggggaataggtagtgtttggttacatggataagttctttagtggtgattgctgagattttggtgcacccatcacctgagcagtgtacactgtacccagtgtgtagtcttttattcttcaccctcctcccacccctcccaagcccccagagtccattatatatcattctgatcctttgcatcctcatagcttagctcccacttacaagtgagaacatacgacatatgattttctactcctgagttacttcacttagaataatggcctctaactccatctgggttgctgcaaaatgtgattatctcattcctttttatgaagtattccatggtgtatatgtaccacattttctttatccatttgttggttgatggacatttaggttggttccatagttttgcaattgtgaattgtgctgctctaaacaggcatgtgcaagtgtctttttcatataatgacttcttttcctctgggtagatacccagtagtgggattgctggattgaatggtagttctgcttatagttctttaaggaatctccgtatactgtttttcatggtggttttactagtttacattcccaccatcagtgaggtgtccccttttcaccacctccatgccagcgtctattgttttttggttttttaattatggccattcttgcaggaataaggtggtatcgtattggagttttaatttgcattttcctggtaattagtggttttgagcattttttcctgtttgttggccatttgtattttgagaattatctgttcatgtcctttgctcgcttttgatgggattgttttttcttgttaagttccttgtagattctagatataagtcccttgtcagatatatacattgtattttctcccactctgcaggttgcctttttactcttgctgtgcagaagtgttttagtttaattaggtcccatttatttatttttgttgcatttgcctttgggttcttggtcatgaattctttaagtcaatgtctagagtagttttttttgatgttatcttctagaatttttatggtttcaagtgttagatttaagtttgacccatcttgagttaatttttgtataaggtgagagatgaggattcagggactaacaggtatttgacactgtccccatcattctcaacatttattttgacctcacatggttttcattagcaacacatgcccatgaataacatcttgtttccctgcagtggctaccacctggggatataaaagcattccttatactcaggaagtcatatcagtttcctggagtggcaatggaaaggagatggggtagaggatgcagagacgggcaggaccatgtgagatggaactgtgtagtttgaccctacccccatcctagttgggaatcactactctctataggtgtgagtgaacaaaaaagataagaatgaataagcaaaatatttgactgaaagacaggttgtccctgatgacgacttataacaatcatttatgatgtatttttgttattgagtttctttaaaagaaatgtttgcctctgggacacattaatatcacccggaaacagcctcattcatggtgagttaaggtctatgatttttaaaaatataccatgaaggaataatacaccatgaaggaatgctttcttggttttaattagtgaatccagtgagtgtttattgacaggttgaaaatggagaaatatttagaatgaatgactaaaaatttggaaagttaattagcatatctggcttccttgctgcagttaaagattatggtctcagaaatccaaaatagtctttatattctattcagaaaatatggtatggatagtggtactactaacaaggctatttaagaaattagttgcaaagtattcattgagcttaatagaaaataacatattttaaagaattaaacctcatcataaaatactttttgtctttttttcctttttgtggagatcaaggtcatgctgtattgctcaggcaggtctcaagctcctagggtcaagctatcctcccacctctacctccctaagtactgggattacaagcatgagccaccacacctggccctaaccataaaataaaacaaaggttaaccttattataatgactagaaatgtaaacagtgccatttaaatattattccttttaagacaatacttgccaaattagtgtcctaactctgtcttccacatagtaccacccaaaaagtgctccatgctcaagtaagtttggttaaatgaagtagattgtcagaaagacagaaagattctcagtcttttaatacactgatatgcattttgaaatatgtagttaattctcaattttattgcagaattctgcaaacagtggttaacattgcttacagattttctgcatgttaatttgaatctttaatcatattaaaatgcaaatactcctgggaaggataatgaacttcttaacttgtaactgaaaacattcacacattttctcatagtgtcgttgtttcaattacttacctgaaaagaactttttgtacggtacagcacttggctgggttaatactcaccaactttgagaaggttggtctctgctcttctgtatactttttatgaggcagtatcacttagggcttaaggtttaaactttctttttctctctgtgttcatttcatattgagattatggataaaaagtttgttctgacattgcttaacatttttctttaatcatgtgattacagaaattcaatgacttacaaaacaataaatgtaccttagaatgaaaaatgcatcagtaaggtctgtatttaaatgtggatgtagacatcataattaccaagacaagaaattgttttgagaaattctctgatgtttttcttcttcaggtttcacgtgccacgatcatggtgccacggtactgcagtatgcacccaaacagcaactcctaatctcggggggtaggaaaggacacgtctgcatttttgacatcaggcaaaggcagctcattcacacgttccaggcccatgactcagctaattaaggctctggccttggatccctatgaggaatattttaccacaggttcagcagaaggtaacataaaggtgagtcagtacaagaggttggaatgtgctaaagactgattggaaagagaaaaaacaaaaactccacattctttgaaataaagcttcactttatttcacttgggctactgcatggagatactgcatatctcaacactctgccgcctccccatgctcctgtatggttctttctaaactgttatggtcaatgagattatcaaactcattggactcaggccattagaaagctttaaagcattctattttgagtaaagtgtatgagtttaatgcatgaaattttttgatgacattagtttggctccttagaagcttctcccctctccctcagtactcttgtgtgtggtggaggtgacgtttccagtaagtgagctagtgcagatgctccttgactttatggtgggattatgtcccaacaaacccattataagttaaaaatattgttaaagttgaaaaacatactttcaacttaatattttcaacttactatgagtttattgagactaacctcaggataagccaaggagcgtgctgaatgcgtattgctttcacactgtcataaagtcaaaaagtcttgtcaaaccatcgtaagtaggggactgtctgtaccacactacttttacatagccttaggacctagctcagcatgaggaacacatttaactgaattaactcaaatagttaattgaattagagatgggctacatatggttaatatgaagccacaagaggatgtgaaggaaaatatggaaggaggacagtaaatgaatcgtgggagtggtgttatcatttcccacttagataagctcttaggaaagaggcagtgggtgggaaggttgggctttagtgagatcacttgggccaagggagcagaagggccatgtttttgcttttggtcttttcgtaatatatttttaactccttttgttttgcactaggtttggagattgacaggccatggcctaattcattcatttaaaagtgaacatgctaagcagtccatatttcgaaacattggggctggagtcatgcagattgacatcatccagggcaatcggctcttctcctgtggtgcagatggcacgctgaaaaccagggttttgcccaatgcttttaacatccctaacagaattcttgacattctataaagattggggttttatttttatatacatttcagttaaaaggcacactacagtcatcactaggcaattctgctttctaagcagttgtattgaaaacagagaatctctgtgtagaatttgaatatgacccaagctgagtattatctaaacaggttggtggaatgaatgcgcatgtaccttattatgctgacatactaaaaaaaataaaacctagtattgtatgaaggatagctattctttacagcatttagcaaacctgattcagaaaacatttgagattagcaaattagtaacttgaaataatgaaaaggacgtttataccaaattaaggaagaaaatgttgctgatttgggtttttcttcctgttcttaccactgactgaagcatgcctgcagtctcctcctctgttgaatgaaggataatcataaggtgtttgttaggagcgctagaccacctggaaaactttcttagctgtggagcagtgcgcagtgaccagttctctgctgtgagaggccgtttccattctttcctgctgaatatttttcctgttagtgtttatactgagctagtactgtaacttgcaaatgagtgcaaatttaaatgcaatgttttactcacaatttgcacattcacattttttggactgctagtttttctatttaaatatttgccttcatgttaggaatgtactatgtgaacatgacatatttgtagttaaccaaacacaccttcttagtccagtttagtactttttcttttcgtgtattcaaggttaaacacccaaacatttaaggatatgttgaaactacaccaatagagcatttcatatcataattaaaatgaatgttaggcttcttgtggccagttaatagttgatgagattggtgacattatttattgccacagcctattgtataaactatgcagagttaaatatttgcttgtaaaatattagccaatgttgtcattattttgatgtatttccttggttatgaccaaaaatatgttgagatactgaaactaatgtctgtgtgtttaaatgtttaccagcaaattgtcttatcatgttaatgagaatgttcaatgcctgtgtggtaaatagtaaatacaatggcataaaagtaactttctctgaagatgtgatgttcaggctgtgaaatatatatgtaaaagaaaaataaatgttatttgttagagtttttagtttgatactgtttttgaccattgagatttttaatttgataaaatgtttaactgttagagaatttgcaagctatttggcagtctattcattcataagtaagtatttactgaataccttctataccaaaagccattctaggaaatgggatacagtggagagccagacagagaaagcacacaatgttgagatttagcggggcaagagctaacctcactataccttctccagacagatttgaagtttattgaatgaagtactaacctcgtacccaaaactcaaatctgagtcttggctatttgcttgctcctaagtaagtaagggaagtcagaatatgcccactgataagaagagccaggaaaataagcttgtgagtgacatctcaatgcctaaagcaaaactgattcaaaggagctttcagaaaaaagggaagagaactttctctgtcaggtaaaagcagtaagagactctagattcaccttctagcttgaaacaactaaaa

SEQ ID NO: 6933 - DNA, 640 bp, Homo sapiens; identical to SEQ ID NO: 6036

SEQ ID NO: 6934 - DNA, 125 bp, Homo sapiens
acctcgcccggctaatttttgtatttttggtagagatggggtttcaccatgttggccaggctggtctcgaactcctgacctcaggtgatctgcctgcctcggcctcccaaagtgctgggattacc

SEQ ID NO: 6935 - DNA, 640 bp, Homo sapiens; identical to SEQ ID NO: 6036

SEQ ID NO: 6936 - DNA, 640 bp, Homo sapiens; identical to SEQ ID NO: 6036

SEQ ID NO: 6937 - DNA, 640 bp, Homo sapiens; identical to SEQ ID NO: 6036

SEQ ID NO: 6938 - DNA, 654 bp, Homo sapiens; identical to SEQ ID NO: 6044

SEQ ID NO: 6939 - DNA, 640 bp, Homo sapiens; identical to SEQ ID NO: 6046

SEQ ID NO: 6940 - DNA, 640 bp, Homo sapiens; identical to SEQ ID NO: 6047

SEQ ID NO: 6941 - DNA, 640 bp, Homo sapiens; identical to SEQ ID NO: 6036

SEQ ID NO: 6942 - DNA, 639 bp, Homo sapiens; identical to SEQ ID NO: 6050
  SITE (88): n equals a,t,g, or c

SEQ ID NO: 6943 - DNA, 648 bp, Homo sapiens; identical to SEQ ID NO: 6051

SEQ ID NO: 6944 - DNA, 624 bp, Homo sapiens; identical to SEQ ID NO: 6052

SEQ ID NO: 6945 - DNA, 654 bp, Homo sapiens; identical to SEQ ID NO: 6054

SEQ ID NO: 6946 - DNA, 654 bp, Homo sapiens; identical to SEQ ID NO: 6044

SEQ ID NO: 6947 - DNA, 50498 bp, Homo sapiens
gcactctgcggcggcctctgcgcctcgggcgggcgggagagagaggccgcggccgccagcgtggggatgtctaggagctcgaaggtggtgctgggcctctcggtgctgctgacggcggccacagtggccggcgtacatgtgaagcagcagtgggaccagcaggtcggtgtcacgtgaccgtctcttccgggcccgcgcgcgcggcgtcgacctggggcctctcgtggtctctgcccgctcggttcctcagctcctcttcgtgtctttcccccgcggtggcgcggccctgcaccccacgcgtttgcggctgcggccggcggccgctctgctgggctccgggcgctgcagctcccggcgggcgtgtgcagcccgcagattcaggacgacccggctgcccggcttagcgcctttggagctccgcgctgaaggggccttgctccgcacaggcacggcacgcaagcttttggggtgcccagtggctctgttttcaagtcacagccggcccgcagggtgcggacctttccacatctcacttgggccgctagaaaatagaaggtggggaaggagtttcttggggtgcattctgcaagctaccagcctccctcctggcccaaggttggggttaaagcctaatgtgttttacgtgctattgattttatcccatggtaagggagccccccttccccgtactcactctccatgcctttgaccaagataatttggtgagatgtttgcacttctcgtttaaatgaacagtttgctatggaaactagaatctgggaacgatagagataacagtctccagatttttttttttggtacttttatttcaggaaatatccgtgacctgctgatcagcagtgactattctgtcctctcagttcatattttctttcttattcaagttgacagacctttaatgggtgattactgtgtggaagctacctcactaagcaccttgggaatacaaagataaggaaactccactcttccagagtctatcagtgattcacgaccttgctgagaacagggtcattggtgaattttcagaaaacaacttggcagtgattggggttgaacctagttcaccaagggtgaaaataatggactggatgaatcaagagtaaacagtcttttcttgatttgcctacccagacctttggactgtgctatgtgcttgatatacagagatgaagtggatgaggtctttgttcttggtgttcacagactgtggaaattagaagagaggaagcatgtgatggtacaagaattttgacgaggggttgagatgacttaacaatgaaagggcacaggagagatcagagatttgggattaaaatgtgctcctaaggggctggcttttggaatagaggcagaagacttccgcctcttacaaggaaaagtaaaagatgttgatcctgggaaaacttgagatggagtaaaatttagtatgacagatgatctgacgtcagtgaagtgatgtttgaagggtttgggtagggatggattagagcttggctttggaccctaactgaacatcaaatgttcccggaaagtttttacaatgtgactaaggcttggtccccaccccagaccatttaaaccagaatctcctggggatggggacctggttcaacaatgttttaaaagtaacccagagaattttaacacaggactaagcaccattgtgttacagagtggaaaagtggttatttggaagttagagctgaagaaccaaaataacgtgtgtgtgtgtgtgtgtgtgtgtgtgtgtgtgtgtgtgtgtttattttttttccttttatgtccggttcttcattaggggcttacattgtattaatagcagtgggaaagactaggacaaatgattagcacagtggatgtgtcggaaggttcaaggaagcaagaaattaaataatgaatattgattcctgaccgtctaccacataccaggcagtgtattaagcactttatgtatatcatctgtaatcctcacagtaacctagcaaaaattaagcagtgctacatgaggagccagagttctaggtgttagggttggaagaataaagaggtctttagtgattagtaaggaaagttgttagaaaggtagttcagtgagggtcacaggaaggatgtgtgaggcaatcagcatagaccttgaaacctagaggaagatagcaaatgatgggatggagagccagatcataagcacacgtgacatctctgagaaggaagggtaggatctgggaggcaggtgtggaaggaatgattctggtgaatggtgtgggcttgggagggtgggtatcggtgtgtcatggtgtaagaagcacaggacaggaagacctgcagttgggggagtggaataagcacctccgtttttgtctcagtggtgatcttgccaagggtgcatggttcaagacagttgtgtttcagttgagttatatcaatcccgggactccttcaaatccctcataatgaagctgtaggcctggaggaggtccagcaagtaggtattatattaggtgagtttttaaaaataggtaaaataatttggaaaaaaccccacaaacatacgcaggccctgggccccactcccattaattctactctatatagccactattaaaaaccatttattggccaggcacggtagctcatgcctgtaatcccagcactttgggaggctgaggcaggcagatcatttgaggtcaggagttcgagaccagcctggccaacgtggtgaaaccccgtctctactaaaaatacaaaaaaattagccaggcctggtggcgcacgcctgtaatctcagctactggggaggctgaggcacaagaatcgctttaactcagaaggtggagattgcagtgagctaagatcgtgccatggagccaagatctccagcctgggtgacagaacgagactccttctcaaaaaaaaaaaaaaaaaaccaataaaacaaaacaaaaaaaaccctatttatttattttgagatggggcttgttctgtcacccaggtgggagtgaagtggcacaatcttagctcactgcagcctgtgcctcccaggctgaggtgatcctatcacctcagcctccggagtagctgggaacacaggcacacaccaccactccctgcaatttttttttttttttttttttttatttttatttttgctagagatgggattttgccatgttgcccaggctggtctagaacttctgagctcaagcagtctgcctgccttggcctaagattacaggagtgctgggattacaggagtgagccaccacgcctggcctaaaacctttagagtattttgtgagcaataaactataaaatgttagttattagtaatgactgatgtttttaaaagtctcttcttgggtgccaggtccacgttctgaagtgctgtggttttttagtgcttactaaggtaactaccattgatgagcatttattttttccgctggtagtagcatccttctttttcttctttctctgttatataattaattaataattctgcatgatttttacattgttaactttacatgctagaagccaagttgagattttagtaatctgcattttttctgttggtgtttattgttcagctaggataagtgctaacagaagagtagtttagagtgttactgtagtaactcgccaagtttttaaagcattacatatcaattaaactttaaaaatttaacattggccgggtgcagtggctcacgcctgtaatccggcactttgggaggctgaggcaggtggattacttgagatcaggagttcgagaccagcttggctgacgtggtgaaaccccgtctctactaaaaatacaaaaattagctgggcatggtgatgcacgcctgtagtctcagctactcgggaggctgaggccggagaatcacttgaacccaggaggtggaggttgcggtgagctgcggagtgcagccactgcactccagcctgggcgacagagcgagactcttgtctcaaaaaataaataaaaaaaaatttaacatagtgccagttttttttttctgttatttcccattaaattttctgtactaaatgttcaggaatttcttaaaatatgataagaaatcatttcagtaataacatttagcacactaccaaatttatttgatcgtttattacattttacatttgtacagaaaattaaaatagtaactgggtatttggaatctgaaagttttaagtatattttggtaacactgttatttggatttgaatggcacaaggatggggaccacctgttcgggatgttactgaaatctgtttcttacgtttttagaggcttcgtgacggagttatcagagacattgagaggcaaattcggaaaaaagaaaacattcgtcttttgggagaacagattattttgactgagcaacttgaagcagaaagagagaagatgttattggcaaaaggatctcaaaaatcatgacttgaatgtgaaatatctgttggacagacaacacgagtttgtgtgtgtgtgttgatggagagtagcttagtagtatcttcatctttttttttggtcactgtccttttaaacttgatcaaataaaggacagtgggtcatataagttactgctttcagggtcccttatatctgaataaaggagtgtgggcagacactttttggaagagtctgtctgggtgatcctggtagaagccccattagggtcactgtccagtgcttagggttgttactgagaagcactgccgagcttgtgagaaggaagggatggatagtagcatccacctgagtagtctgatcagtcggcatgatgacgaagccacgagaacatcgacctcagaaggactggaggaaggtgaagtggagggagagacgctcctgatcgtcgaatccgaggatcaggcatcagtggacttatcgcacgaccagagtggggattccctcaacagtgatgaaggagacgtgtcttggatggaggagcagctgtcctacttctgtgacaagtgccaaaaatggataccagccagtaaggagcttctcaattcctttgatttgtcaattcctgtgtgaaggtttgtttttccaacctgtgaaagaaacgtgaatgtaaaagagacctaaataaaaggataattatatttattctctagttgatcagctataaatttatataaaacataggcatgtttgtactaatgaaacgtactgtcaacctctatcacattgttaaattaacacttttggtggtaactcaataaaattgagaaaattggaaatcctgtgttacttaaagaattagccatatttttctaacaaggtcacagagatttagggccaaattccagtcccagtgttgaattcatgttcaagtttataaaaattactttgttaatatttaacttacgtggagaactcctgctattgtatactgaaaagaggttagaattagcagattgaaggtgttttttgccctttttctaggaccagtctttttttccattttcctttttttctgctggcaagagatacctcatacacactccctgattgcctcaatcttgagattttcttttctttcttttttttttttgagatggagttttgcttttgttgcccaggctagagtgcaatggcatgatctcggctcctgggttcaagcgattctcctgcctcagcctcccaagtagctgggattatagtgtttgccagcacacctggctaatttttttttttattttattttttttttttgagacggagttttcctcttattgcccaggctggagtgcaatggcatgatcttggctcactgcaacctccgtctcccaggttcaagtgattctcctgcctcggcctcccgagtagctgggattacaggcatgcgccaccatgcccggccaattttgtatttttagtagagatgaggtttcttctccatgttggtcaggctggtctcaaactcccaacctcaggtgatccatccgcctcggcctcccaaagtgctgggattacaggcatgtgctactgtgctcggccctgatcttgagattttcaatggccagcttcctggcacctgaggagtatggcttgccagccatcatatggtttataccgaaacaggattttcccattaggcaagagactagtaaagatataggtacttgaggaatgcctttgtgtaatataatttgtaaccaagtcagagaaatacatatataactgtgaagagggtcattttctggcatgtggaaatgtttttcttaaaatgggttcaacttcaaatttagtcactgttaacaaattaatagtaacattttcacaggaaatgcagaatttactagttagctggtttttgcttctgagcggtctctgttattgatttcaggttctgcctgaattctcagtggctttccctttgtcctgttgaggacaaattttaagctaccctttgtggtcaggaccctgctaactgtagtttctttgattcccacacaactttgcagttagggtgaacttattcttcacaaacaattcttatccttagggctttgcacagtttttttcttctggaatatgcatctccacagcctccattctccctatacacaaagagaccccttttcacctggccaatttctaatcctaagcctccccctaatataggttgggcctccttttatttaccctcacactgccctgtggtacacagcacattccattccttatgtgtcacagagcatcagcatcacctgagggactaagaaatgtaactcctaggctctgcttcagaaattgatgcattttatctgggctagaatcaagcatatttagaaaaccaagaacaacttgggtgattccaatgcactgtgagcatggagaaccactgtgttgttgtgatcacctgttttctatgcagccctcagggaagtgcaaacctgtgagatcaggcaccattatctgtcttggactttgtattcccagttcctagcccagtgcctggtatgcagagggagctcatattttttgaaagaatgtgtgaagagacctgcctctgggagtcaggaatgtgacaattgggaaatccagcaacaatacctgcttttccagtacctttctcctaaaagttactggatcctacagatcttagtgggcgtatacttggtgttagaagaatagaaatctttctaattcccttccttttccccattttgcaattgtgggttggctgaagaaaagaagacaacatgggaaaggaaaatctgggtgataaacggattaaacctttaggttaccgctgctctagataaacccatgatgtgactttttgtttttctcctaggtcagctgagggaacagctcagttaccttaagggtgataatttttttaggtttacttgttcggattgctcagcagatggcaaggagcagtatgaaaggctgaagctgacatggcagcaagtgagtaaaaagcccttccccaaatccatgagggtggttcccccaggagtttgttggaacgaatatctagaaacttagggatgagcttttgagttgtttggaggggcactttttatttcgcaatgaaattagataccgaatatgtggagaagggagtgaaaaatactcgctgtaatcccagcactctgggaggccaaggcgggcagatcacctgaggtcaggacttcgagaccagcctggccaacatggtgaaaccccatttccattgaaaatacaaaaattagctggctatggtggtgggcccctgtaatcccaactacctgggagactgaggcaggagaatcgcttgaacctgggaggcggaggctgcagtgagcccacaccgtgccactgtactccagcttgggcgacaaagtgtgactccttttcaaaaaaaaaaaaatatattcactgctgacttggtgaattgggcttgagaggcttgagaatctcatgatttcttttatatgtgataccaagctctgattataattgaaaatgaaattctcattttcctggcagccattttaagaacaataaaactatttttttaaagtggaaagatggctatgttgaaaatagatttggaagaaggaaggtgactgattgcaaaaaccaacataacccagcttttctgcatttgaactcggagatgtttgaatttttgtttgctgaaatacttgttcctttttaactgtctctaatatcagcaccctaatctaagtcagctgtatcctaaacaatagctttttgctgatctccaggttgtattaaattgttttagttttgtttctatgtcaatatgttaatgtataatatgaataataaggcatcagtgtatactttttagttcaaaaaccagatgaaaccagacatggtggctcacatctgtaatcccagcactttgggaggcggaggcggccagatcacctgagctcaggagacaagcctgggcaacgtggtgaaaccccgactctataaaaaacaggccaggcgcggtggctcatgcctgtaatcccagcactttgggaggctgagggaggcagatcacctgaggtcgggagttcgagaccagcctgaccaacatggagaaacaccgtctctactaaaaatacaaaattagctgggtgcggtggcacatgcctgtaatcccagctacttgggaggctgaggcaggagaattgcttgaacccaggaggcggaggttgcagtgagccgagatcgcgccactgcactacagcctaggcaacaagagtgaaagtccatctcaaaaaaaaccaaaaaaacaaaacaatacaaaaattagctgaatgtggtggtggtgcactcctgtggtcccagcttctcaggagactgatgtgggagggttgcttgagcctgggaggttgaggctgcaatgagctgtgatcgagccactgtactccagcctgggtggtgacagagtgagaccccatctcaaaaaaaaaaaaattatatattacttagtttttatgttcattcattcattcaacagatactgagtacctgttatgaaccaggtgctgttctaggcctgagactactgtggtgaacgagacagctaaggcctctgccccaagacagctgacattctatacttaattttgataataaacagatcaacaagataattacccacagcactttttactttgaaggaaatagagtaatgagaaagattttaaattacaccattttagccacttatggtgttccttgtaaattgtagttgccttagcagccttcgtctattatcttaattatcagtgctttattaggacagctgatgaaatctgtcagtgttgaattaggaagccttttctttgacttgcctgaaaaaaatgtaagtagaaaatgaagagaagtttgtattgaggatagagccttatgaatattataactgggacatttttctcaagtgtacatgggatactgtgtgtaggcaagatcttattaatagattattgtgatatgtgcacacaggtagatttgtatttgtcctgcaagttgtttctcataaaagctgtaaaatggaagaagagcaaatatatgtaaattttcaaaaatgtgagttttctgtagtggttctttttaaaagaaaagctggcttttgcttattttgctcagagtatgtaatattggctcactttgcatatttatttattctttttaaaaaaaaattttaaatctttttgaggcacagtctcactctgttgctcaggctggagtgcagtggcacaatctcggctcactgcaacctccgcctcccaggttcaagcaatcctcctgcctcagcccctctagtagctgggattacaggcatgtgccaccatgcctggctaattttttgtatttttagtagagatggggttttgccatgttggccaggctggtctcgaactcctgacctcaggtgatccacccacctcggcatcccaaagtgctgggattacaggcgtgagccaccgtgcccggccactttgcatatttaattagactaacataacttgcagattattttttcacttccaaaatacgtattgatggtggatactaacctggtagggtgaagtgataacttaggttgcacatatgtggttcttagcaaacaactgaccagtatttctagttgcatctgaaaaagcccatctctcactgaagacctgaaagagaatcagttggtcttgaatggactccattgatgtagccacattcttagtatattgaaatgtgggttttccgtctttaaattttaaactttgaaagatttaccaaagaaatatgtagaaatgcttgtaacacaaatagcattttgtttgtattataaaatacttacagtaaagaggtctgatctcctgattaaaaagccccttcttgccacactccctttctgtgtcctctcctcttccttggtgactcctgtgaatagcagttccatacgtaggagaaactttatcaaacatttgggaaggatagggaagtttttgcattcttttcctggagactcattcttatggcacaagtaaagatactatgatcgatctttgcttgttatttttctagtgttcttcagcatatactgagtacctgccagctctgagctaggccctgtggatacattggtccacaagatcagcctcattactgatgagcttggtctggtaacatgagagcagaaaactaaactggggttcatttttttttgtttttttttttttgagatggagtttcactcttgttgcccaggctggagtgcaatggcgcgatcttggctcactgcaacctctgcctcctgcattcaaacgattctcctgcttcagcctcccgagtagctggaactacaggcgtgcgccaccatgcctggctaatttttgtatttttagtagagacggggtttcaccatgttggccaggctggtcttgaactcctgacctcacgtgattcacccacctcagcctcccaaagtgctgggattacaggcgtgagccaccatgcccggcctgggattcattcttttagatcataaattccaggagagaaggaaaaacaggtcctttatatattagtttatagtttgcctagtaaagattaagtgataatagaaaaagttattttcaagtaaatatgtaagctttttagggtcataaaatgtctcaattatacaaaaaagtcatagaaatactttatcactgagattatcagcaaatacatatttctgagatactcttctgagagtgggcaaagctcgttctatgattttcttaaattatttattgagcaataattattttttaaaattgtgatgaaatatgcataacatatagtttaccattttttagtgtacagtgcagtggaattaagtacattcacattgctgtgtaatcaccaccaccatccacctccagaatttttttatctttacaaaatgaaactccgtgcccattaaacactaacttcccatgaatattgattgtttaaaggaaggtgtttgttggctgatgtagaccagatgcagatataactggaagacattttttaaaatctgttcatggggttaattgtttttagactgtctgcaagtattgcaagtttaagaatgggggaaattgaaacttggttagtgaagggtcagaattactgggcccctttgagtggtgtagatattgctctttccgtaagactgctggggatttaatgctgtgaatacagatgttgggggcattaactgcaatttactacactccttacagctacaggatgctctttatagaaataaggattaggctgggcgcagtggctcacatctgtaatcccagcacttttggaggctgaggcgggcaggtcacttgaggtcaggagtttgaaaccctgtctctactgaaaatacaaaaattagccaggagtggtggtgcgcatctgagatcccagctacttgggaggctgaggcaggaaaattgcttgaacccaggaatcagaggttgcagtgagccgagatcgcaccatcacattccagcttgggcatcacagtgggactcttgtctcaaaaaaaccaaacaaacaaatacaaaaaaacatctatatgagtatctgagtatagatgcaaagaaaaatgtctgaaaggatgggattatttcttgatggtggatttcaagtgatttttacttccttcccatttggggccatgaattcctcatctgtaaaataagagtagattagattaggagtttgcatcctgagctctggggttgtcttggagcgctctgaaaatgggctgagtggctaggcctttcagttccctgtttcttctctaatgctgatttcatttgaaggaggggtttgacaggtaaaaatggctaagtcaccgagtagatagatggcatgtagcattatttttagttctgaaattctgagtcttgtttttgccatctaagagcttagagaaatatatacaagggtaattttcaagatatttgataaagggtagtgccgttggtcagaaaatgctggctggagtaggcacctggaggcctcctgctggccagaaggtaccccttgatttaggactacactgtgtagggtgcgggatccttgggacaatgcctgtttatcagctgattcaggggcatctctgttgtagccatcagttcagccacacattagccctgcatgtgtggcacctaaggattagatgcttagttctgcacataattaagtggattagtgataatctaacgaaagtaaaaaaggaagtaaattctaccctgggaatattccaagataccgtccgtcctttgttcgctctgttccccaccattcctactcagaatataaaacagaagaagcttttcccccctcaagattaacatccctaaccgtgctgttctcccacctcttgtttcaattgtgtttcaggtcgtcatgttggcaatgtacaacttgtctctggaaggaagtggacgtcaaggttatttcaggtggaaagaagatatctgtgcttttattgagaaacattggacttttttactagggaataggtaatgtgtttttaaaaaatcttatacttcaaggaatatgtaaagaatgaagtatacaggatttgagacagcctaatgtagacttgttagagatttattttaatttttttgagatagagtctcccaggctggagtgcagtggcatgaccatagctcactgcatcctcaacctcctgggctcaagtagtcctcctgcatcagcctcctgagtagctgggattacaggtgtgcaccaacatgcctggcttatttatttatttatttattttttggaggcagagtcttgctctctcccccaggctagagtgcagtggcgtgatctcggcacactgcaaccgccacctcccgggttcaagcgattctcctgccttagcctcctgagtagctgggattacaggcacctgccactatgcccagctaatttttgtatttttagtagagacggggtttcaccatgttggccaggctggtcttgaactcctgaccacaagtgatctgtctgcctcggcttcccaaagtgcttggattacaggcgtgagccactgcgcctggccttatatttttgtagagacaggggtctcgtgttgtctcaggctggttttgaactcctgggctcaaacagctctcctgccttagccttccaaagtgctgggattatggtgggtgtgaatcaccgttccttaccttgttagagatttagagtgtttacttgtggcaattacgaaaatttttgaattccagagaatatttttacttttttaagattaaaaaaaaaacttggctgggcgcagtggctcatgcctgtaatcccagcactttgggaggccgaggtgggtggatcacctgaggtcaggagttcaagaccagcctcgccaacatggtgaaaccccatctctactaaaatacaaaaattagctgggcgtggtggcaggcaactataatcccagctactgaggaggctgaggcaggagaattgcttgaacccaggaggtggaggttgcagtgagccaagattgcgccattgcactccagcctgggcaacagagtgagactccatctcaaaaaaaaaaaaaaaaagatgtttgtttcaactgaacatgacgttttttgaagaaattcttagaatgttaaaaaataagagttgtattacatgagactgttcaagagttggataagtcaatatttcacttgaggagatagggttattatattcttttaagctgtgtgtggtggggcatgcctgttgtcccagctactcaggagaccaaggttggaggatcactcgagcccaggagtttgaagccagcctggacagtatagtgagacccccatctcttagaaaacaccaaccaggctgggcccggtagctcaggcctgtaatcccagcattttgggaggccgaggcgagcagatcacctgaggtctggagttcgagaccagcctggccaacatggtgaaaccccatctctactaaaaatacagaaattagctgggcttggtggcgggtgcccgtaatcccagctactcgggaggctgaagcaggagaatcgcttgaacctgggaggcggaggttacagtgagctgagatggggccacttcactccagcctgggtgactcagcgagactccatctcaaacaaacaaacaaccaaccaaaaaaagaaccaaaacagagcagtgccttctaggaggacaagacaggaaaaataatggcagttactgactgcatctatttaggttgcccttagttaatagagttttgtattactagtatttgtttttaactctgtaaagtagacactcttttttatttttaactatttttcatagtgcttagcaaagtctgggcacatctgcatgtggcttgttcattggtcactgtgtttatcattgcgctttgagtttgctgctgtgtgctctccccagtggctgctttggtgcattagactcggggatgccgatgcacagaccttgcgaccatatattttcactaaatgtccacgtggatctatcaagacttttattgctcttgggtacttgtgagtttgctaccacactggtgaatttttgtttgagattctgattgttagttgctgtctgaagtcctgtgtgagattcatgaatcttacataatgaggttagtttagacatgacaaagtctttgatcacttcaggtcagggcagggagttcatgcctttcctcacttggggttcactgcagcctctgtttcttcagaagctgaggaatcacagctttgctcatgttactgagagtacgggagggtagtcagaaggagggtgacctgcaggctgctgtgagaaaatggaatagactccctacatttttgcaaaaggggttattttagttcttgagctatttattggtgctaagaaaagaatcgacactataactggttctttctcataaggaaaagaaatctgttgtttagtttaatgatttagcactatttatggaccttaatgtaccccatttataagggataagaaagggaaaaaactgataaaattggatcttggaatgttttcatgatcttcgagtgctgtcctatttagtgggttatctcctggaaaaaattagatttagattgcctgtttttaaaaatattgctggattttaacagaagttgtttaaatgcttcatttgttcatttctagagcatgttctgagaggaatcagctgagccttatttctttttaacatgccaatgaaaggcattaattactctccagtttctgtgtagtttatttagtgtgttggccatattggtatatcaccggaattattatttatttgatcttcctatttaaatcaagtcacctgaaaaatacattaattttaaaaagaaacttaacatcaccatggtaagtgggaaacctatataaattgtcataagtagaatgtaacaataaaaataaaacaatgctgttaaattgtagctggatcccatggcatataatggcaagccatggctttcttttccagtcaaaaagggaggctgctacaagtgttaatgagaatttaaagcagtaaactttcttttgatctaaccagaagaagcaaaagagaattagaaatcactttatgattcttgccacccggtttcatgctacagtgctgctcttcactttgggaactccacttgaaatatcagtgattggagaagtcccctgaaaccactacccctgggtagttaccacttgctcagacatttctgtgtatgaatgttaacaagattaccgtaccccagagaagctgtctgtaaagagcatttatatttaaggtacacttttttcatagctactaaagattttcattctgctatccataggacgtactttatttatttacttacttacttatttttttgagacggagtcctgctctgtcgtccaggctggagtgcagcggcgtgatctcggctcactgcaacctccgcctcccaggttcaagcaattctccggtctcagcctccggagtagctgctactgcattaagaactaaaattgaccagtattaaccgcagtctactgtctatgccttcccttggaaaccacaagcctttattagactccagagtcccaaaatagttccatcagtcagattctgccagtgcaactgctgtccaggcaggaaggcaaatgcttcctatctgccaccttcccagaatcctcgtaaagttgattgaagtgtagatactatgaatgtgtactatcatatttcatcaattctaagatccattaactttaagatacaccattttgtgtacaaataagagctaactaccaattaaattatgacatatcagtaactataagatgtatctagctgtcagagatgtcaaaatttgcaaaattacgtatcttaaaatcagtaaaatatggtagtagaagaaaatattcaagctattcttcactaatcaaaactataccttctggaagaattcaaggccaggactgtaaaagcagattaaatgaacaaatactaggcaattattcagtaataactaagttttcatatactttttaacttgtttctacaatggtacataaaattatttaggttagcacaccccaccatgcacgactaatttttgtatttttcgtagggacagggtttcaccttattggtcaggctggtcttgaactcctgacctcaggtgatccacccgcctggcctcccaaaatgctgagattataggcgtgaaccactgcacctggccaggacatactttaaattcttaaaaattgtaaccatttctcatttgtcacaagatctaagagaatgctatacagtgtaatgaagttctgaattttctttcagatgtttacaggtttttcttttatgcctttaatatgttattaaagtttaaatgtaaaaaggtgggggtttttttggtgctacccatcccccttctccagccactaggaagaaagctgtgtgtgtgttcctggagtggcttacacacagcttgtagcatccagggtgggcaaaaataagcctgttttccaaatactgggtatttgtgctctgatcactgattgctgcttctaatcatagaggtgaaaagagatggcagccattgttgttatagctcccctcattgcaaaaatgggtaaaggcatttaatagacacttcttcaaagatattaaaatggccaataagcacatcaaaagatgctcagcatcactaatcattagggaaatgcaaatcaaatctataacacgataccacctcatgcctcttaggatgacaattatcaaagaaacaaaacaacaactgtgggcgagaatgtggagaaatgggaacccttttgcagtgttggtgggaatgtaaaattgtacaatcgttgtggaaaatggtgtggtgtttcctcaaatagttaaaaatataatgatcatatgatctggcaatttcacttctgggtatatactcaaaaggactgaaagcagggtctcagagatacttgtatatccatgtttttagcagcattattcacaataactgagatgtggaagcaaccaaagtgtccatcagtagatgaatggataagcaaaatgtggcatatacatacagtggatatcattcagtcttaaaaaggaaggacattctggcacatgctgcagtgtagatgaaccttgaggacattatgctgtgtgaaacaaaccaatcacaagaaaacaaacactgtgtgattccacttatctgagatacttagggtagtgaaaatcacagatacagaacgtagaatggtggttgtcagcacttggcggggagggtggaattgggagttgtttaacggatatagagtttcggttttgccctgtgaaaagtgttctgaaagtggatggtggtggtgattgtaccatataaatgtacttaataccactgaactatactgttaaaaattgttcagatagtaaatgttatgtatattttaccacaataataattttgggggaaaactattgaggccattcataaatactgtgtttgtatatgtcctggcaacaaatttattccattccatacaaatgtctcattatgtgttgtgctgtgatttagctggctatattagtttgctaatgatgctgtaacacaaactggatggcttaaacaacagaaatgtattctagttctagaggctggaaatctgaaatccaggtgttgataggattggttccttttgaaggctgtgagggagagagtattttatgcctctcccctagcttctgttagccacaggccttccttggcttgtagatgacgttctccctgtgtcttcatgcatcttccctctctacacgtctgtctctgtgtccaagtttcccctttgtgtaaggacaccagtcatattggattagtgttcaacttaatgacctcatgatcactgtttgcacataaggtcacattcacaagtactgggacttccaacatcttttgggaggatacgatgaaatctgtaacactggccgataattttataaacatttatgttatttccagtttttctgtgtttaagttagccttgtggggcatattcttgtatatatatcctttgtgtttttgtgattagaagtagatttgcgaggtcagaggatacacacaattttgctgtacattatgaaagtaacctccagaaagtatatgcccatttatagtcccactgtcaatgtacaagtacgcacccgttttcgacacagtaaataacacattggtttttaaaatcttttgagtctttgtcagtcttttttattgtttttgtttgtttgagatagggtttcaccctgtcacccaggctggagtgcaatggcacagtaatggctcactgcagccactacctcccaggcacaagtgatcctcccacctcaacctcccaagtagctgggaccacaggcacgtgccatcacacccagctaatttttttatttttatttttttgtaaaaatgaggtctcactatgttgcccagacttctgtttgtttattgcagtaaaaacagtgaaaatttaccatcttaaccagttccaagtgtacagttcagtggtgttaagtatgttcacgtatttgaatatagattcacagatggccagaactcttctcagcttgcagatctgaaactctatccctattaaataactctccattctcccctccccacagctctaggcagtcaccattctactttctgtgtctatgaatttgactactctaaatacttcatatatgtagaaccatacagtatttgtctttttgggactggcttatttcacttagcataagtgtcctcaagggttatccacattgcagtatgtgataggatttcctttatttttaagactgaataatattctattgtatgtgtttatgctacattttgtatttattagagaggatttggaaagattagaaaaagataagaatgtaggagaggtactttggaaccaaaagcttgggggtttcattctctccatctcagatagtgctttttttgagacccagtttcattcttgttgcccgggctggagtgcaatggtgcagtcttggctcactgcagcctccgcctctcgggttcaaagattctcctgcctcaccctcccgagtagctgggattacaggcatgtgccaccacacccagctaattttgtatttttagtagagacggggtttcaccctgtcagccaaactggtctcgaactcctgacctcaggtgatccacccgcctcggcctcccaaagtgctggaattacaggcgtgagccaccgcacccagcctcagatagtgcttatgcctactatagctgagcttatttgttttgtttattttctgagttttctattaatattacgtctctgttcctcagaatggttttcctttgccttcccagcaataccttccaactgttagactggtcttcttgtgaaagactgtcttctaggatttccggggattgatgtatcttttcaaggtggaaatagaacagtcgccttgaaagaatttccgttagggaacccggatagttggcattttgcatgttttgttattttgttgtgcagtaggtgctctctgtgtttgtggagtataccacatagttttgttaccactctagtgcatcgaggcagataggatcagattgagagatgtgtgctactcctcgggtaaaatgaggtatttactggagccagttaacttctatcacaaaatgcccagccttggagttacactttttgtatgctttattcttgggagctgtgcttaattcacataacaaagcaacttaattaaaattagcctgtagaattccataatcgtgatgattgtgatgagaagtatttcacgtgctttgtttgaattattgcatttaatcctcacagcaaccctgtgaggtaagttctattatcctgattttacagatgaacaaaccgaggctgctagaagttggtagcgccagggtttgaagcaggcgaactccagagcctctctcctgcctctcgtgctctgctccttcagtagctggaggtgccattgcatgttgcaggccaggagtcacagtatacacagactgtcttttctgtataatgagcaaaagtgccaatcatttttaaattcttggactctttaggaaaaagacgtctacctggtggagcaccgtggcaggttgcctcagcgtgggaagtcccatgtacttccgttcaggtgctcaggaatttggagagccaggatggtggaaacttgttcataacaagcccccaacgatgaaacctgaaggagagaagttgtctgcctctactttgaaaataaaaggtactgttgtgagaacagtacaaaagttgctagtcagaccagagccaagcaggtgtgagcccaggagacgctcctgcttccactgggcatggctcgcaggcctctctggagctactctgtttaacacttctgtgatgacacttgtgtgtgtgctagaaataaatgccacataaaaacattttatcacttcctaatcaagctatcagttttataaatttcccagggtatctgaaaggttcaatgttttccatctggtttttgtttttaaacttctcacaaaggtgaagagatattttaaaattcccgtaataaataacatgatgaattcccatgtaccttccacctcactttgacattaactcctgacagtctcattttatctaaatcctcagtacttttccccaaccttccccattcttacaattggattatttagaaacaaatcccaggaatcaacatttcattcctaaatatcttagtatgtatctctaagagatcaggattctttcctttttgcagcctgaccataatgccattttcatatttaaaaagatgttaacagtgacttcttactatcacatattgatctggttttataatctaaaaagcttttaatgagcttttaaatttttatatttatttgtttgcttgtttgtttatttatttgaggtacagtctcgctttgttgcccaggctggagtgcagtggtgcaatctttgctcactgcaacctctgcctcctaggttcaaatgattctcgtgcctcagcctcccaaataacatgccaccatgcccagctaatatttttgtatttttattacagacggggttttgccatgttggccaggctgatctcgaactcctgacctcaggcgatccacctgccttggcctcacaaagtgctgggattacagggtgagccaccggatcaggctgatgagcttttaaaattttaaaaatatgattgggaagaaaatcaaatagtacttaagggtgtaaagtatgaaagttcccccacctgcctatggcctgcaatttcacttcccagagtaaccactgttgtcttttgtgaatactttcagaaagatctctgcagatttaagcattttcttagttttttaaaaaagtaaaatggactcgtactattatgagttttccatttttgccacacttaccagtatgtcttggacatctttccatgacagtacatgtagatttaccctattttatttcattacatccattatataattatgtgataatttgttaaaccattctcctgttgatggacattttggttgtttctacctttttgttgctattttatttatttattttttaattaaaacatttttaaaaagtaatagagatagggtctcgccatgtttcctgggctggtcttgaactgttgggctcaagtgatcctccagcctctccttccaaaagtgctgggattacaggcatgagccatcatgcctgaccttttgttactttaaacagtgctacaattctacaaatttgtgtacatgtgaaaatgtgataaattcctggagtttctacatcaaagggcatattcattcaaaattttaatcaggattgccaaattatcctccaagaaactgtaataaggccgggcatggtggctcatgcctgtaatcccagtactttgggaggccgagacaggtggatcatctgaggtcaggagttcgagaccagcctggccaacatgatgaaaccccatctgtacaaaaatacaaaaatcagccgggcgtgatggcgcatgcctgtaatcccagcttctctggaggctgaggcaggagaattgcttgaacccgggaggcggaggttgcagtgagccgagatcacaccactaacattccagcctgggtgacagagcaagaccctgtctcaaaaaaaaaaaaaagtacccattgaaatgcccatgaaaatgcccatttccccatacatttactgagctttatcaaactttttttttggctcactgcagccaccacctcccaggctcaaaatccacccacctcagcctcccaaagttctgggattaagaggcgtgcaccaccacgcctggctaaacttttaatgtttgccagttccagtaggtgaaagatagtatttatttgtttaaatttgcagtataacttcttttttctcaagagatatctaagtcttttttagtttagggcattcattgaacatttctctttattgaacatgatattactcataataataaattagcaaaagaaactaaagttgagtagttattttaaaatttagatatgggttgagcaatccaaatctgaaaatccaaaatcaaaaacactccaaaatctgaaactttttcagcactgacataacgctcaaaggaaatgctcatttgcagcatttcggattttgtatttctgggtttgggatactcagccaataagtaaaatgcaaatattccaaaagccgaaaacatctgaaatccaaaacatgcttgtgcccaagcatttcagatgagggatactcagcctgtatttattctttcttagcagcctcaaaaccaactttagatcccatcattactgttgagggacttagaaaacgagcaagtcggaatcctgtggaatctgccatggaattaaaagagaaaaggtctcgaactcaggaagcaaaagacattagaagagcccagaaggaggccgctggctttcttgacaggagcacatcttctacccctgtaaaattcataagccgaggccgcaggccagatgtgattctggaaaaaggcgaagtgattgacttttcctccttgagctcctctgaccgcaccccgctgacaagcccatctccttctccttctctggatttctctgcccctggtacacctgcctctcattctgccacacctagcttgctttcagaagcagatctgattccagatgtgatgcccccacaagccttgtttcatggtaagagtttgtttgctttgctcttttattttgggtatgggccatggtataaatgtacaagttttcaccccgtgggctgtgtgctctgcatttcttccttcctatgtcttgatgacactgttttgtactctgcacagatgacgatgagatggaaggcgatggagtcatagacccagggatggagtacgtcccaccccctgctgggtcagtagcttctgggccagtggttggggtcagaaagaaggtcagaggccctgaacagataaagcaggaggtagagagtgaggaggaaaaacccgacaggatggatattgacagtgaagacacagattcaaacacatctttgcaaacaagggctagagaaaagaggaagcctcagctggagaaggacacaaagccgaaagagcccaggtatactcccgtgagcatctacgaggaaaagctgctgctcaagaggctggaagcttgtcccggtgctgttgccatgactccggaagctcggagactgaaacgcaaactgattgtcagacaagcgaaaagggataggggattaccactttttgacttggatcaagttgttaatgctgctcttttgttagttgacgggatttatggagccaaagaaggaggaatttccagacttccagctggacaagccacgtacagaaccacctgtcaggacttcagaatccttgaccgataccaggtgaatgcaagcacttgctgtaaagcccttgggggcaggagtggaggtggggcaggcagcactaggcattggacatggttatgctgtgaccttttaaatcctgagtaatttgggaagagaaaagtaaagtgcaagggaaaaaaatacaaaaatcgctgggctttatttttcagaattgttcattgtaagtacacctgaatacatctgagtttttcttttcctttaggcattcaaacataacctataagttttcttcatctgtctctcttgtctctctctctctgaggatagatatgcatggtttgtgtcgtagctttgacaaatttgttgaggccatgacggtgtctctgacactgtgttgcagaggatctgaaggtgtgtagacatctgcgaaggacaacatgaagaaatagcagccaagggatcagtgtggtatcagtgttgctcaaaggatggtcggtggaacccaaattttgtggatgcttctgggaacaattaattccacttagaactacctgtatatactctcccactgggaggaacaagaggccttattccctttatctttgctagcacttgacactaaccagcctttaagttttgctaattggctggctgtaaagtgaaatcttgttttttatttatatttctttggttacaggtgaggttaaatttcctggttgtttctttgtgaattgcctgtttggagtctgcatgtttttctctcttctctggaagctagtgggatctgctcttcattgctggtgttctggtattattcagtgatgtgccgtatgtagggcttatgtctttccttgtgctggacatgtggtgtgtgggccctttcaatttgaaactttctttcctgagtatggaaaagtcttgatttcctatcttctattttttctgttctctcattttagaactccccattatttggatattggaccctgtagattaaaagttggcaaactttatctgtaaagaaataagtatttctgccagatagtaattattttaggctttgccggccacaaaatctcattcggaactcttcaactctgctgttgtgattggagagccgtagtgaatgagtgtggctgtgttccagtaaaactttatctactaaaatgggcagtggactggatttagcctgggggctatagtttaccaagatccctactccagatagatcctcttttcttttttttcctaattcccatctttcctgggaagcacagtattaactggcctgcctaccaggagccaagtcgggagggcccaggagcccatcgtttaggaggtaaactgactctccctgtcttcagtacagtactcccacccttggcttcctgtgtccagaatctccctcttgagcctctccagtcttctgcccgtggagggaaagatcatttcctagatgtgggcagtataattactataggggtataattggagcctttaacctcttaaagagcctcacaatccatagtcataccccccaggctctaagcctgatgccttaggtgactacacttccctgaggctgtgttttgtaaatcaccctgcttagcttcaccactggcttaggtattggctttctttggtctgttaagtcatttgctgcttgttcatatgcttttgttagtcatctattcacttgttcttgttctttttttttttttttttgagacatggtctctctctgtcacgcaggttggaatgtagtggcacaaccacagctcattgcagccccgaactctcaggctcaagcaattctcccacctcagcttcccaagtagctggtactataggcacacactaccacactcagctaattttttttttaatttttatttttagtagagacagggtcctactatcttgcccagactgatctcaaactcctgggctcgagtgatcgcctcagcctcccaaagtgctgggattacaggcatgagccattgcgcctggccaatattcacctgttctttgttcttattcttgtgggcctgtctgtttactgcctatacttaattttttaaattgtaagatgtgtcatacagatagaaggcagcatagaaatatggtataatttagatattagtaaaataaatgcccatgtattcatctcctggataaagagtgttgtaaacaccttagaagtctcctgtgtactttctgttcccctcagaggaagccactttgacttacagtgttaattattcttttgctttttaaatgtgtatgtctctaaatgatatacttttcgtttaaaaaaatactgagtagcaagcataaatctagctgtgtaagtaaattgccactattagatgaagtttcctggagaagataagctaaatagtcattctgggtcattgttgtggactgaattgtgtcccccttaagcatatgttgaagtcccaaccctggtacctatgaatgcagccttatctggaaataggccctttgcaaatataattagccaagaccaccaaggattgccggcagcaccaggagctaagagaagggcacagaacaaattctcccctagtgcgtaccccagagagcatagccctgcccacactgtgacttctgacatttggcctctagaactgtgagacaataaattcctgttgttttaagccacccagtttgtggtgctttgttcctacagccctgggaaactaatacttacagtgatgttctggcttcggcttccatgaaccccttctgaggtagtcactggccaaggtcactagggagtcctgggaaacatgaggctcaccatagcgtatgcatcagccagggctgtgatgtataccagagatgcggcagaaatctgggcagaggaagtgggatcctctgtatttcctgcctgagctgacagcttccttccagcttgcagaaggtcaaagcagttatttgtggagtgagcatcatcagctggtctttggggtgggcatgggtggtgtacaggaggctcacctgtacatggtgaagacaagctgagcgtagataagattctgggccacgacgccataggtttaaaagatggtcagtggcagcaaggacttaaggatgatagcctcaatatgtgttagaaataccaaaattgttagaaatagataatcggtgctgcgaagaaaagtcagcacagagacaaaaggtatctcagcaaggccatcttttctttctgtagaaagggtgctcagttgcagatggaacaaaggtgagagcacacttgaacacaggaaaagcagacatatttatcccttacgcacttgggtcgtccttactgctgtgtcctgcatccactggctggagcgggacctcacaatcttaaactgatacccgatttgctaatagcctaaaactttcctaaataggtaagtgcagggaagaacaaagaagttgcttacaaaaggtttaaggaagcaataacatttccaaataaggaaggggcgtagactgtgggctggaacgtgcctgtgagcatgtccaacggttacagaggatagggcttaacaaagagttattagcacaaggcaaggagacttgaagaaagttagtctttaaaagaaactgttatttctaacacttatgatttattctttaacaagaaggaaaactttgaagaggaaactttttactttctacactatgtctgccccttgggtcacacttgttcaccctttgttgtgaaactcagcaggggtgttgggatctcccctctctggagattcttttgccctcctctgtatttgatctcctgtttcctgtggcccatctttaccttgttataggtttattcccttgttcttaatgacttcctgagaaaagctgcatgggaagtaaaatttgagaccaacatactgaaaagaccctcattaagtgaggttgaacctggaattccatacacagccacattgtctaggtgagacctctgttgaggaccactgcacttcctttaggttttttctttgaatctagtcagagtccctggggaataatcttctgggctcaggatgctggttgccaagttggggaagagggaccttagcattcagcttgtcaggtactcacacctcagccctccagctggatcccctgttagttctctagagatcagacctcctggcttctgggggagggcagccacccagcaacagggagtggaaggatctggggatcatactgctttccacatggtgtttgcctgctccttattttattgtcccatttggtcccagttccagaggaatctgctggctgctgcctggattttagcgggttctgtagtatagattgggttagttctcatttagcttacccaaagccactttgggattttggtgttaaatcagttactatttgtccatctgtttaccagttactgttctaattaagtcagcttctatagttttagtgggattttgggaagtagtaaagctttatatgcttgtgttttaacccagtcttaacttggaattttagtataaattttaatgtatttacacagggagtggctgtaaatgcatttattcaatccatactcttgttttatatttattctttgaatgtattcgtagctataagtttctcaataagtgctgctttagctgtgattcttgacttttgaaatgatgtgattttatttccaatcagtacttggcattttgttatttttctcattatttcctctttaatccaaaggttatttagttgttttttggttttcagatatatgagaattttaagctatgttttggtaattgatgtgatttctaatgttgtattatgatcagagaaaatagtttatgtgatgttcattctgtaccataaagaaagttatacattctatttttattctttttataggtcctaacttaagatacatttatttttccttattctttttttaatatcatgtggttgtccccccaaacaaaaaagtacattttcatgcacttatctctttttttcttttgtattgcttatttaaatgacataaatctttactaaattattcactcgtcctattgtttctttctagattaatttcttgctggactgctttctctaacagttctttaaaaatatgggctttttgaggttaattttgaaaacttatacgactaagaatatcttcatttcactttttcatttaaatgatagcagtcatataaaattgttattttagttttttccattgatattttgaaattatgacttcattatcatcttacatacagtgtcactcctgagaaccccggtactgataagaaatagaaatttttgactgggctcagtggctcatgcctgtaatcccagcactttgggaggtcgaggcaggcagatcacttgaggccaggaatttgagaccagcctggacaatatggtgaaaccccgtctctactaaaaataaaaaaattagccaggcctggtggcgcatgcctataatcccagctgcttgggaggctgaggcttgagaatcacttgaaccagagaggcagaggttacagtgagctgagatcatgccactgcactccagcgtgggtgattgggtgagactctctctcaaaaaaaaaaaattttttttgtttcttatcaattaagtggcctccttgttttattctcccatctcctaaaactttcagaattttctctttgttttttatctttaattagtgcatgttaagtgtcttttattttctctttttaaagctttgttttcttttttctattattttattttccagcacatccaaaacacagaaattgtgtttgttctcatttgtcttacttgacaactctgttcttttggtcagaggtattttatatgcttcttggcatttattctgcttggtgttcgctgaccttcctgaatgtgtggtttggtgtctgacattaaattggggatattctcagtcattattgcttcaaatttttcttctattcctttctgtcttctggtattcccattgtgtgtttattacaccttttgtagttttccgcagttctcggatagtctgttttgttcttttttttcatcttttttgtctttgcttttcagttttggaagtttttactgacagatcctcaagttcagagattctttactcagccgtgtccagtctacaaataagcccatcatcaaaggcaacctttatattggttacagtgttttttatctccagcatttctttttgattcattttcagagttttcatctctttaattgcccatctgttcttgcatattgtgtattttgtccattaagcccttaacatattaaacatattataggcatatcttgttttattcacattgctgtattgcacttcacagatactgcattttgtacaaatggaaggtttgtgacaatcttatgtcgagcaagtctgttggcaccatttttctagtagtgtgtgcttactttctgtctctgtgtctcacgttttggcagtttttgcattacttccaactttttcattattattatatcttttatggtggtctgtgatcagtgatctttgatgttagtattgtaattgttttggagcaccatgaaccacacccatatgagacaatgaacttaattggtaaatgtgtgttttctgactgttgcactaaccagctgttccccatgtttctccctctccttggggctccctgttccctgagacaacaatattggaattaggtcagttaaccctacaatggcttttaagtgttcaagtaaaaggaagagttatacttctctcactttaaataaaaaactagaaatgattaagtttagtgaggaaagcatttcaaaagcagagataggctgaaagcgaggcctcttgtgccaaacaattagccaaggtgtgaatgcaaaggaaaagttcttgaaggtcattaaaggtgctactccagtgagtgcacaactgataaaaaatcgaagtagccttattgctgatatggagaaagtttgagtggtctggatagaagatcaaaccagccacagtattcccttaagccaaagcctaatccagagtaaggccttaactcttgaattctgtaaaggcttggagaagggaggaagctacagaagaaaagttggaagctatcagaggttggttcatgaggtttaggaaagaaggcagctctataacacaaaagagtgcaagttaaagcagcatttgctaatgtagaagcagcaacacgttatctagaagacctagctaagatcattgatggaagtggctacactaagcaagatgttcactgtagatgaaacagccttctatttgaagaagatgccacctaggactttcatagttagagagaagtcagtgcctagcttcagagcttcaaaggacaagccaactgtcttgttagggattaatgcaactggtgactttcagttggagccagtgatcatttactcttccaaaaatcttagggcccttataaattatcctgaatctaccctggctgtgctctataaatatagcagcaaagcttggatgacagcatatctgtttacagcatggtttactgaatattctaagcccactattgaaagctactactcagagaaaaagattattttcttttttgagacggagtcttgctctgtcgcccaggctggagtgcagtggcgcaatctcggctcactgcaagctccacctcccaggttcatgccattctcctgcctcagcctcctgagtagctgggactacaggcgtccgccaccatgcccagcttattttttgtattttttttagtagagacgggatttcaccgtgttagccaggagggcctcgatctcctgacctcgtggtccgcccgcctcggcctcccaaagtgctgggattacaggcatgagccaccgtgcccggcctgaaaaagattattttcaaacaattactgctcattgacaatgtacctggtcacccaagagttctgattgagaggtttaagattagtattattttcatgcctgctaaaacaacatctattctgtaacccatggatcaaggagtaattttgactttcaagtcttaccatttaagactctttttaaggctattgctatcatagatagtgattcctctgatagatctgggcaaagacattgaaaaccttctggaaaaggagtcatcattctagatgccattaagaacatttgtgattcatgggaggaatcaaaatttcaacatttacaggagtttggaagaagttgattccaagcctcatggatgacttttgaggggttcaagacttcagtggaagaagtcactgtggatgtggaaagagcaagagaactagaattagaagtggagcctgaagatgtgaccgataaatgtcatgataaaacttgaatgaataagtgttgcttcttatggatgagcaaagaaagtggttttttgagatgctatctactcctgctaaagatgctatgaacattgttgaaatctcacaacaaaagatttagaatattgcataaacttagttgataagttagtggcacagtttgactcagattttgaaagaagttatgttgtgggtgaaatgctgtcaaacagcatcacatggccaggcacagtggctcacgcctgtaatcccagcactttgggaggccgaggcgggcggatcacgtgaggtcaggagtttgagaccagcctggccaacatagtgaaaccctgtctttactgaaaatacaaaaattagccaggcgtggtggtgtacacctgtagtcccagctacttgggaggctgaggcaggagaatcgcttgaacctgggaggtggaggtctcagttagctgagatcatacccctgcactgtagcctaggcaacagggcaagactctgtctcaaaaaaaccaatatcttttgtgaaaggaagagcaggtcaatgtggcatgcttcagtgttgtcttattttaagaaattgccccagccatcccaaccttcagcagccaccaccaccctgatcagttggcaaccatcaatattgaggcaagagcctctaccaataaaatgattgactcactgaaggctcagatgatcattggcattttttaacaataaagtgtttaaaattaagtcacacatttttttcttagacataatgctgttattgcacacaacaacaatatagtgtcaacttttttttttttatttgagacagagtctcactctgtcacccaggctggagtgcagtggtgcgatctcggcttactgcagcctccacctcctgggttcaagcgattcttctgcctcagcctcccgagtagctgggactaaaggtgcgtgccaccacgcccagctaatttttgtatttttagtagagatgggatttcaccatattggccaggctggtcttgaactcctgacctcgtgatccgcccgcctcggcctcccaaagtgctggaattacaggtttgagccactacgcctggccactttttttttttttttgagacagtgtctcgctgtcacccaggctggagtgtagtggcacaatcatggctcactgtagctgtcagttgacttcctgggctcatgcagtcctcccacttcagcctcccaatgtgctggtattacaggcatgagccaccacacccagccttaaacataatttttatatgcactgggacaccaaaaacttgtgcagcttgctttattatgacattcactttattgcagtggtctggcactgatcctgcaatgtctctgaggtgtgcctatattttaaattcccagtccagtagctgtaacatctttgccatatctcagtctggttctgatgtttgttctgtgtcttcaagctgtgtttttttgcctttataccttgtaattttttgttgaaagccaaagatgatgttctgggtaagaggagctgtgataagtaggctgttggaaatgggggaggtgtgggcagggaaagccctctatagctctgtgagtagttctcagtcttttttgagcctgtgctctgggctgtggactaaaagtgcttctcagttttctctccggtcagctgggacaggatggctagagggtgtgaagttaggtatttctcttcccccaggtgagttaggctctgattaaatcccaataggttaggctctgataaaaataacttctcctgagggcaggtgttactaagaacacaatgctgtgttttattttaagatggttccttttcccctcctccatctggaatcaagaggggagttttctttgatattcactgtgagaacctggtccaacttctggaggtgaaccttgtggagtggagtttttatccttagacttgtccgcattgagccttcagcaattttcagttcttcagggctttcccgccttgatgctggttcccacagaggctctgctcccgtgtgctgtgattctctttctctccaaatttgagggcagtggtttgccttgttatctcatgtcttttacggatctacaagagttcttgatttttcactttgttcagtggtttacttgttaggctggaggaatgacttctaagcttcttgcctgccagagtggaaatcagaagtccttggatatgctgctgtgatctaggaaattccccattattgcttctttaaatatgttcctcctttatcttttcctcttctgcactctgaatatggatgttaacaccattacttcttttttttttttttgtcttttcttttgctttttaaacaaaatccttaaccagtccctgacatcatttgttgagtgctttatttcagtgatcatgtgtttaatatctggtaatgaataagagatgcttcataattactcattcctgcttccaggctcctccattaccttggaggctatttcttatgctttttcttccttaacagctttattaacatacagttcatataccttacaattcacctatttaaagtgtacagttgacgggttcctaatatattcacaaagttgaaccataatcaattttagaacattttgttaacccacaaagaatccctgaaccctttagctgttactacccaaaactccctattcctactgcccatgaattgactttctgcctctgtagatttatgtactctggacatttcacataaatggagtcatataatatgtggcctttggtgaacactttctttcacttagcataatgttttcaagattcatccatattgtaacatatattagtattcctaaatatggcttaatattccattgtatggatagaccacatttggtttatccattcatcagttgatggacttttgggttgtttctaccttttgactatgaacataaatactgctttgaacatatgtatacaagtttttgtgtggacacacatttttatttctctgagtgtagatctaggagtggaattgctttgtcaaatgtaactctgtgtttaactttttgaaggattgctagactgtcttccaaagtggctgtgccgttttacattcccaccaagcagggtatgaagattctgatttctccacacatccttgccatattgttgttgtctgtcttttttattatagccatcctactgagtatgaagtgtagtatctcattgcagttttgatttgcatttctttgatgactattatactttaaaattcttgtctgtttggtaaattaagtgtgccttttcctgtaatagcttgtttagtttgttatccttttgttttcttgcttttttttttatttttttttttgaggtggatttttactgttgtcgcccaggctggagtatagtgatgcgatctcggctcactgcaacctctgcctcctgggttcaagcagttctcctgcctcagccaccgaagtagctgggattacaggtgcccgccaccacacccagctaatttttgtatttttattagagatgtgggtttcatcatgttggccaggctggtctcgaactcctgacctcaggtgatccacccacctcggcctcccagagtgttgggattacaggcatgagccaccgcgcccggcgattttcttgcactttttatttatgggtcttgattttttttttccccgtgagctcatacccccttagtgttttcagctacctttgctggcagtttacacctagggaagagagcaaaagcctggttcctagcttttgaccctgtcagcaagtttagcaaaatgggaggttctgggcaaaaccatttctcctcctctctttttcccacaatcagccaccctcttctctcagggaacctcccaggacctctcgcccaggtgctgcttttaatctccctctggtgttgcttcctaggactgtgggatgctcaggggctgcccagagtggtatccaccctcacccaggaaggctctagtgctgctctggcgttaccttccagccaatacgtggctggcaaagttgattggcagcgatctacctctcccagagaagtgctcgggggaggagatggcttaaccaagcagcccctgacccatctgtggggcagagcctttttctgccctctctactctgctgcctcactcgtacccagccacctgtcgcctccccgggctttctcccagccttgtgttttgccttccctctcatgtctgtagcatctctcagatgggcttggaaagggaccaagcagccctcctagctctccattgtgtttagaattagaagtataaagaaactcatttaacattttttctcacttatttgaccttgggatgcttttttttcccacactttaccattcagcaaatgcaagtcaagtacataacatacaccgagagccgaaacatggctcaaacctgtaatcccagcactttgggaggccaaggcaggcagatcacttgagctcaggagtttgagaccagcctgggcaacatgaggaaacctcgtctctaccaaaaaaaatacaaaaattagccaggtgtggtgacatgtgctacttaggaggctgaggtgagaggatcacttgagctaggaggtcaaggctgtagtgagccatgatcatgccactgcactccagcgtgggcaactgagtgagactgtctcaaaaaaaaaaaaaaaaagccaggtatggtggctcacccctgtaatccccacactttgggaggctgaggtgggcagatcatgatgtcaggagttcaagaccagcctggccaacataatgaaaccccgtctctactaaaaatacaaaaattagccaggcatgctggcgcgtgcctgtagtcccactactcaggaggctgaggcaggagaatcgcttgaatctgggaggtggaggttgcagtgagccgagatgacacctctgcattccagcttgggcaacagagtgagacttcgtctcaaaaaaaaaaaaaaaaaaagtgccaagcgctattctagcaggggatctgctgtgaactaagacagagtaggtccctgtccttaggcagggggcatccttgagcagggagctgacattaactagctcaccaggcaaataagattacatcatgcagagtgaacgcggggacagtgatgttacatcatgcagagtgaacgtggggaggagtagcgggcaggagcactgctctatgggggttcaggacggcctctctgaggaggcagcacttgaactaagtccacaaggaggagccagggtgatgaagggtcagtgtggaaggcccaggcgcaggccctgaagcaggagttgggttggtgtatgtggctggaacctggtgatggcagagggaacgggttggtggctaatgaggctactggggtgacaggggccagatcctgcaggatcctacaggtcataagtaaggagtttgaactgcattctgaacatatggtaggaagccatgtcagagttttgatcaagggaagtgaatttatgtttttagaagactctggcttctgtgtcgagagtggatagtatgggtgtaagagtgggagcagagagaccaatgggaggcagttgatccaggcagcattgggagtggtttacactagagtgggaagaagttagggagctgtataactttgatggagcttcccagaacttaccttgaggcattaaccagataatgagagtattctgtgcagtaagtagttcagtgcctggtgttacagttatctgttgctgcattataaaccactccaaaacttagtggcttttgatccctgtatcttttttctgattctgtggattgactgggcactgttgggttctttacttagtgggctgaaggctgggttcactcatgtgctgcattaacctgagagctagtttgggattggaatgaccaggagagcctctcttcctccagagtccatctccctgtggcctctagttattaactggtctagctggactccaagagggagaaagtggaagcaagccaccagttgtcttaagacctagactcaaaagtcccagaaagttatttctgctactttctgattggtcagagctattcacaaggtccacccagcttcagtgggtggggaaatttatcctgccttttgatacgaggagccgcttagtagggatggaggaattgttagtggctgtatttagaaattacataccacacttttcagttttaccttgaaactgactttaagccttggaagaattcaaagttggcctttgaaaattttggtgtccagtttgggaaggtatgaaagcaaattataatggaaggaatcttgctctttccttttaacaaagttattttctaggttaagagcaaactgattctacaaaaacaagtttttaaacatcatccaacccttcgcaaacaactttataaatgtgccttttaatcttccatctgatttctttgctataaagccctaattgtacatgttctgttagtacatgactgagagccctggagcggcagtcattgaagaacaacatatttccagtccagctcttggggtttgaaatgaaacacataaaatctaccaagtctgttaggataccttcctagggaacagaggcctcttcctcattgaacccctgataagacctctctgctactgagatttattttagggaggctgaggcaggagaatcacttgaacctgggaggcagaggttgtagtgagccaagatcgcaccactgcactccagcctggataacagagcaagactctatctcaaaaaaaaaacaaaaaacaaaagtgacttgggtgctattgaaagcattccattttaaaagggaaacagaacataaaagttcagaaaagttgcagcctgacaatgcagtagacaaaaaaaacctattttttgaggagaaagtcaagctggctgcagaaatttacataagtaacaaggagccgaatgttaatccccaagacaatctccatggcattccacgggaatccacgggagtgatattctacatcactcccatttttgtcaaatttattcactggaaaagagattgtattagtttgttttcatgctgctgataaagacatacctgagattgggaagaaaaagaggtttaattggacttagagtcccacctggctagggagacctcagaatcatggtgggaggcaaaagccactcttacatggtggtggcaagagaaaaatgagaaagatgcaaaagtggaaacccctgataaaaccatcagatctcgtgagacttattcactaccatgagaacagtatggtggaaaccgcccccgtgattcaaattatctcccactgggtctctcccacaccatgtgggaattatgggaatacaattcaagatgagatttgagtggagacacagagccaaaccatatcattccacccctggcctctccaaatctcatgccctcacactaaaaaaccaatcatgccttcccaacagtcccccaaagtcttaactcatttcagcattaacccgaaagtccatagtcccaagtctcatctgagacaaggcaagtcccttccatctgtgagcctgtaaaatcaaaagcaagctagttacttcctagatacagtgagggtacaggtattgggtaaatacagcagttctacatgggagaaataggccaaaacaaaggggttacagggcccatgcaagcttgaattccagcagggcaaattctaaatgatctaaaatgatctcctttgactccttatcttacatccaggtcacactgatgcaaaaggtaggttctcagagtcttaggcagctccacccctgtggctttgcagggtatagcccccctcctggctgctttcatgggctggcattgagtgtccaacttttccagttgcacagtgcaggctatcggtggatctgccattctggggtctgaaggacggtggccctcttctcacagctaggcactgccccagtagggactctgtgtgggggctctgaccccacatttcccctctgcactgccctagcagagattatccatgagggccctgccctgacagcaaacttttgcctgggcatccaggtgtttccatacatcttctgaaatctaggtggaggttcccaaacctcaattctggacttctgtgcaccctcaggctcaatgcaaagtggaagctgccaaggtttggggcttgcaccctgtgaaaccatgggccgagctgtaccttggccccttttagcaatgactggagcggctggggcacagggcggcaagtccccaggctgccttctaggcttccaggtctgtgatgggaggggctgccatgaatacctatggcatgccgtggagattgtcttggggattaacattcggctccttgttacttatgtaaatttctgcagccagcttgactttctcctcaaaaaataggtttttcttttctactgcattgtcaggctgcaacttttctgaacttttatgttctgtttcccttttaaaatggaatgcttttaatagcacccaagtcacttttgttttttgtttttttttgagatagagtcttgctctgttgtccaggctggagtgcagtggtgcgatcttggctcactacaacctctacctcccaggttcaagtgattctcctgcctcagcctcccaagtagctgggattacaggtgtgtgccactatgcctggctaatttttgcatttttagtagagacagggtttcaccatgttggccaggctggtcttgaactcctaacctcaggtgatctgcccacctccgtctcccatagtgctaggattacaggcatgagccaccatgcctggccttcaagtcacctcttgaatgctctgctgcttagaaatttcttccaccagataccctaaatcatctcaaattcagagttccacagatctctagggcagggcaaaatgccagcagtctctttgctaaaacatagtaagagtcacctttgctccaattcccaacaaattcctcatctccatctgagaccacctcagcctggaccttattgttcatatcactatcagcatttttgtcaaagccattcaacaaatctctaggaagttccaaactttcccacattttcctgtcttcttatgagccctccaaactgtttcagcctctgcctaatacccagttccaaagtcatttccacattttcagatatcttttcagcaacaccccactcctggtaccaatttattatattagtctgtcttcatgctgctgataaagacatacccaagactgggaagaaaaggaggtttaattggacttacagttccacatggctgggtaggcctcagaatcatggcaggaggtgaaagacacttcttagtgggcagtggcaagaaacaaatgaggaagatgcaaaagcagaaacccctgattaaaaaaaacaaaacatcggaccttgtgagacttattcactacgagaacagtatggtggaaaccgcccccatgattcaaattatctcccaccaggtccctcccacaacacaaaggaattaagggagtacaattcaagatgaggtttgtctgggaacacagagccaaaccatatcagagatgtatttcaaaaattctatatacagtagtagttggccccagtggctctttggataacagagcaatcatataatatgactcatgtgtgtgttacctacttgatactagttaatatttagtgaatgggttgaaggcataatatagacaaagtgaagcctagagaagctgcaaatccagtgttcaatcctgcatctcactccctctaatgagttaaaaaaaatttttaaatgacttcagaattttaaaattattatttttattttaaacagctggggttttttgtgtctagttttatgcaaaggtgtctataaactttgtattgaagtttgagctttccaaataagtaatacaaaaagacctactttatgacacataaaaatatgatactaattatatatggaaattaaccaatcctcagagtaattttgtttcttttttttttttttttttttttgagacggagtctcgctctatcgcccaggctggagtgcagtggtgcaatctcggctcactgcaagctccgcctcctgggttcacgccattctcctgcctcagcctcccaagtagctgggactacaggcgcacctgccaccacggccggctaatttttgtatttttagtagagacagggttttaccgtgttagccaggatgatctcgatcttgtgaccttgtgatccgcctacctcagcttcccaaagtgttgggattaccggcatgagccactgtgcccagcctgagtaattatttctatataaccagtgtttctttctcatagacttccttgccgtccaggaagggatttcgacaccagaccaccaagtttttgtatcgcttggtaggatcagaagatatggctgtggaccagagtattgtcagcccttatacctctcggatcttgaaaccttatatcaggtatatggagaactagaggtgtgatgtcaggtgtgtcatgagggataatgattgtggtttctgtgccctgttctcctgttggagagaataaagatcacaaactgtgaacaacattggcaaggactgagttctgtgcttcacctccagttttgtcctttgcttgtttcaactctacttttttgcagagaacatggtcctttgaaagaaacttaaaaagcaaaaataaattaactgaaagattgctttgtgatgatcataatcattgttttatttattattattattttttttttgagacagactcttgccctgtcacccaggctgggctgcagtggtgcaatcttggctcactgtaacctctgcctccggggttcagggaattatcttgcctcagcctcccaagtagctgggattataggcatgcaccaccaagcccagctaatttttgtatttttagcagagacagggtttcaccgtgttggccaagctggtcttgaactcctgacctcaagtgatccacccagcttggcctcccaaagtgctgggattacaggcgtgagccactggggccggccctcattatgttattttaaatactaaagttgtatatttttagtagtctgaaatgaaaaaatgtgaaagacatctcagttgagcctccatctggactggatgtatatgaagcagtttccaataatgaatgtcattgtccaggcaatgaaatggaagctgagcttgctagagaggacccagcagtgtctggcactgtaaatgagagcacattattgcactcattgcactacaattgccctgcagctccatgatcaccctgaccctccatgccagcaccacattcctgggcaggcacagtgagaagcagtttgtgagcctgctccaagctcattgtgtctctggtgttccccaaatgccccgcaaagttgagtgttccctcttctggcctccaaggcactggagatgcatcctcatgtctgactccttggggtgaatctgatgctgtatctgtttcctcactgttcatgaaggcacctagcacagtccctggtgggtacagagggctttggcctgatgaatgttcagagtgaattttagatttcatacataaaagtatagctgtaatcaagccagcttcgtgtaaaacagtgcaggttactttaaagtttcaagcagatcaaagagtttatatgagtcaaaaagctaggaataataccaggtatttttcttgacttgaatttgtttatcttctgtggtaccggaggcgtgattatgaaacaaagccacccaaactgcagctcctgtcacagattcgttcccacctgcacaggagcgaccctcactggacgccggagcccgacgcacctctcgattactgttatgtgcggccaaatcacatcccaacgatcaactccatgtgtcaggagtttttttggcctggtatgttccccctcccaaaccaggcaggtcatttttctgtacagtccattctagcaatttttaaaattagtttatgtgatatccttaagatttttatttatgatttcgtttagtttgtctctgctaacatggaaatattaaaatacaaatacctcttgctttcccaaaatctagaagaagccagcaataaacagtgtttttgtttgtttctcttccctgtttgtctctgtttccagagtaaaagattcatcctgttttgcttctgcatatgtttagataccaggtaatgtctatcaaagatacacagactggtagcttgggcgtgtttggacacttttgtttttggcttaataattctttatgttttgtttatttagctgttccttagagagtattagtacagccagaaggtgttttttaaaagccaaatgccctgatcacagactgagaataagggtaaacccaatataatttgtcattttatcagccttaacaaaattgcctctgaagaccaaagtcattaattaaaggaacacatttgcattgctaaatataaactattctttgtggatctgctttcccacgctgccttgaaacctaaaggaaataatacatgtctttcagatgttagatacgatttcatcaagatagagctgtgtcgtctttattgtcacataatcacataactgtgaatgtggtggcagagctgcactcattcttttgggagtcatactgagccaaaagtaacattctgggagcatctcctgcttcctgcccttatgttaggtgccttccatacattatgcacagaagcatattttacttatttattgtgaaaggtagcatttgtacaaaagaacttataaattatatgtgtggggggtaaaggatgtgatagaacacgctcggaggatctttacttaaccctgtcaggtctaggtatgctcttcatcttacatattgcagaaacggagtctctgagacattttgaaatgtgccaagccacacatggtagaggaggctgagttcaaagccagctgtgtccaattctgaacccgtgcactgctacctaccctattctgccactcttcttttaggaaatactatgtaatttcaatattttctaaaattcactcttatttttatgatctggttgtgtggtctctatgttacctccagttttggtgttttttttttttttttttagcatgcaggtgtagctatatgtacatgctgaacagcttggtgttccttaattctcaaaggcatgtggtttgagtctccgatggtttcttttctttaggcattgacctgtctgagtgtctgcagtacccagacttcagtgttgttgttctttataaaaaagtcatcattgcctttggcttcatggttcctgatgtgaaatacaatgaagcttacatttcatttctgttcgtccaccctgaatggagaagagcagggattgcaactttcatgatctatcatctgattcaggtaagttgtctatgtttatgatttatcacctgtgtctgggctcccctgaacaacctggaggaggaatgaagctgagctagcccttcccagcatggcccaatggaatggtttccttgtaaaccaagtgaagaaagccagtcatcagcattcatgaggttatcaaagcacacagtcaaaaatcttcgaccctctaaaataagattattattcagactcaggtttcatagaaaccagtttgtgaacatgtgtataaataaaatgagaaaataccaaaagcaagagctttagggtggactattcatattagtagtagctactgctcttaggatcatcaccttcgcaactcagagaagtgagggtaggactattatttttatttttttaaatatttgtaaacattttagcacaactgtatcaataagaatatgtatatattttttgagacagggtctcattctgtcacccagactggagttgcacaatcatagctcactgcagcctcaacctcctgggctcgagtgattttcccgcctcagccttctgggtagccaggaccacaggtgcacactgccatgcccggctgattttttgtagggacagggtctcactgtgttgcctggtctgtgcttgaactccttggttcaagcaatccttccacctcagcctcccgagtgctgggattatgggcatgagccactgtgcctagctacatattttatttttgctgatagtttgtaattttactatcactgtataaggctgatatgaaccttctaagatttgattctagtattgaattataattcatcctttaatatatttgtatcacctttgaagaaaatacaccatatatcaccatcaaaaaacatgcaaggatttttttcccctagaattttttttagtcaacttttacttagaaaccatttggtatggaggattatatgtttatgcaggcaagattccttttaaagaggagatgaagatgataaaagttgtttctccaatttttaatgaaacttgcttaataattcccaaatgttggcaggaaccttggaaccattttcctagaaattgctttccttctctccttaggcagtgattatgtaaatcactcactgagtaattaatatgtgctactttgggtggtggttttctcttgagagcttctcagttatttctacaacactccctttctctgccccatcccaaccaagagttgatctctcagtatgcgtctttttaacctaggagagcacttagaggatttgctgccgtatctgtcactggtaagggcctgaagacagggcacgaatagtactctgtccttgtgtgtgtgtgtccttggtgcccaacatgagggctggtacagagtcagtccctgctgagtgtttgcgaggccactggaggagtggttcatctttgcaggtgggcaccttcccctccagccagaccatacccctgagggcccaaacataggtggcgcacagtcgctggcactcaatgatggccacggtgagatcacgtatatttgcaatctagcaaacaccaatatgaccccacaaaatttgctttaaaaactcacaaagtgctcttgtccctggcatactggtaagtgctctcttgtcctaaaaatgcctatggatacacatggaagttaagcagagaaagcaggtagctatcagatgactgtcaacagaggagttcttagaggcctgagagaaccatgggttataaatctcaaggactctatcaacttcagtatttcagtgccttctttattaaaaagtaagttcttaaatgatatgacttttgggacaccttactctgtgtagctgattaaagaatctaaggacttgccttgtgttgatagaatgattgttactcttttcccctaagattaggtcaaagctgaatgtagaaatctcagttctaagaagctaattctgtcagttttagagagacagaaggtggactttgggattcagaaggtctatacaagggcctcaggttttataattacattcttaatatttcatgtttgtgcatgtaatttagcaggcctagtaaaggaatttttacaggttttggggaggtacaagataacatctagttttaaaaagcaaaacttattttgttttgtatttattcaaggttatcatagtgttaggtattgaaatgtttgacatatttaaaggtaattgagttgtaaataataaagctgacaataacaatatccccattgaccctttgcttcaaagaaaaataaaaaacacccagaatactatcagtttccttggtcttgtgaatgttttgatcagcagcaaaatgtcattctgtttccagctgttgctaggtgttgcaatgtctcagcctcagtctctgatttctccggtttccataactaactgcctacacttaaaagcgtttctttacctactcattttccctcaggcctttccatttttatcttgtatttttccactcttttggcagacctgcatgggcaaggacgtaacccttcacgtctcagcaagcaaccctgctatgctactgtaccagaagtttggattcaagactgaagaatatgtattagatttctatgataaatattacccattggagagtacagagtgtaaacacgcattctttctgaggctccggcgctgatgcgaatacagctcacagagaaacgcatgtgctattggagaacaggtctttgtggagatctaaaggcagtgattgatttcacagggagctctaatctctgtgattacatggtccttcaaactcccaaccaaagtgagaaaagcggcatgcagtgaaatgagcagtgagcagccctttagcaaaatcgccctccagtccttcctggagatgccttcagccagcatcccagactccacagttatttatgaatgatgtcgtgattctccctccacctgacagtttgtaagagtgaaagagcatctaacctgatgctcttggagagagataacctgtctgtcataacttaaaggatgagaaaatgtggtgtagctattaaagattcatgcagtcccaaaaggcactgtcctgggatgatgagagattataaggtgatttcataaaaggaatccaaccctgtgcccggccattgatgtgttgtcattgaatccaggaggatttctagggcactgaagttttgttgtttcttttgctgactttggttacagtcagaaaaaataaactagatgtttgtgtctacatgttctacctgttgtacctattagcatcttcctgcagggacttgggcccatggcctgggaggttggtttgggattggggttgttgggcagcctgccattcacctggcctatcctggcccttctcatgcccaagacagttgtttcacaggagtggaagtgtgggtgatgcaagtagaaccctctagatgtaccctgtgtggtctgcaggactggactgtttgctgtgtttgtggatgttggcgatagactgtcaattaggttgtttgtgatccaacaagaacatttccaaaagtatctaggtgttctcaaataaaaagctttctttgcacaacccatggccagagcgtcaa

SEQ ID NO: 6948 - DNA, 6053 bp, Homo sapiens
cagtgtttttcttcacaggttttgcacactagggaccaagaagccctcggggacactgctgagaaaagactgccgaagggaagaccagcgggtaaggccttcttgactgctcacctggtctgtgaccaagggaacctaggtggggagcccatgatttgtgttaacatgcaagggaaacagaggtacatgtgtgatgggtagagatgtatttaattttaaaagagcaaaagtgtgtggtatatagcgatttactgttttttttttttttatttctgaagattgataattcaagtgttttcttaaaggttttcccacttcaaaatgaaatatgaaaaaactcattccagacacttaagaatagtttaatgaggctacttttgaattgtttaataataattcaaagatttaaaaacttatatggatgaaggctgtatgtataacttttaacatcccaggactgaagtcatttttccccaaagtaaagaatacttgctggtttttaaatgctatatggatagtgcttttctgaagatttccttctgtaatataaacaacaggaataatagtacctaacaataaaagaagaacctgccaagtcttgcctaccagacaatgcagatgggatttgcccagagaagagcaccgacccacaacttattgagtcagcaactgagtaaatcagggaataaaaacctctatctttagatacccctgtaaatatctgttttacattttttttaaatcaaagagtggttaataattgctgctcagctgagccctcttgcctatagcttacaatgcttccacttctctgagcatttaaaataaggcactttgtctagaaacccactgataaaaaaggaatttgtaaacgaaggcagaagttttctttggtcagtttccagctgtcctggaggtgaaagagggtgggagagggggaggaaggtgggagggaagaaaaccctcaagctgaatgaaatcctaatagagaaaataatagagcaagtctggattgcaatgtgatctgtgctgaactttagaggtcggccccttaaagaaagttctggaaaaatgttattgcctcatccctaattttcttaacccccattaatttctattccgaaacaattctatataatgaaaacatctcttctacagggtttgtgaaaaataaacataatctcttttgtcctcctttaaagttacagtggttcctgaacaaattcttttctaagttatacattttgcaacaattcaaaaattgactcaagttctctttagcaaaatattttattataaaagattccctaagttttcttttgtcaaaacaacttactttaaaaattacccttctgatcaccccaaaatgtgtataaagaaaacattaagtattctcatatattcatgattattagttaaaatataaacagcaaggagaaatttagctactttcacttagatgatatagtaaagttatcctttcattttctattgtgacttggagagttccatattaattatttttagtagaacaaatgagatgttaaaaatctatatagtttcttttacataagaaaactaaaaaaagtaacttagaggagctcattttttcaagaaatatattttttctaattgatacaattactgaagaggaaaaatagctaacaaggtactttggtaatgtttttctcaaattttctgggttttttttttttttttactctagaaatgattacatttcaaaatttgctttcatttaatgtatatttaatttcaatttctttcttcatgttaaacggtctttttgtttcaaagaaatgaatccctatgggtccctcacctattttctccctcaggatgacttttagtctggagatagaagggacataagggtgcctctggcataagtacaggagtagaaatataagaattactttgtaaaaggataaccaaggagttcctgcacatgcttgatgtggctctagcgacttattttcgaggcaaagttttaacaaatgaaaacgaatagtacttatttttcaattatatgggctaaattaaagatcaaaggtaaaagctcattttataaagctctgctgaatgaaggcaggattgtagtttatgcgctggtacacacgcccacatttatatacattatagccatatctatatccaggtaaattagaaaaatgtttaattttattttcatattactttataaggagatatacaaatattttagggatcatggaatctattccagaggaaactaaccaacagtgagcatcttcaactaaaactacccctggatgtaataagtgtaagtattaaaattaaacattatatgtggtcatgaagagaaaattgtttcagggtctgtccaaactacacttcatagaaatttcataattatttttcattttagcatgtgaatgattgataaattggactaggtactgggttaaaaggacttttccaccatctaagagaaaggaagttcagagccttagcttcaacaccacaatttcttaactggaaaaggatcaatctaaaacggtggacttaaattttcaaactcatttttcttttaggccacagatctcaaaatcaaagaaagactgtttactataggacaaagtttcacactgatcactttcctgtagttagtcaataggcttaatatccttcctgcttggcattcgggctttcggcccagataatatgtttatgtttgtaaaagaccaaaatatactatctacccccacctctcgcctacagaccacccatgtatttcactctgtgggaaacagtttaggcataaaaatcctaacgaaagaattctccccacttttttggttgaagtcttaagctgttataagatataaaaagtacaacttggtaatgtgaaaaaattcactcatccacaagcatccatgctcggtaaagagacgccaaagctttcacttactctgtaagggatctgctctttataaacaatgcactttactctgctctaaggagaatagcccacccatcacaataacgtcaaaataataactaagagaccatcactcagaaatcctggcttaaaataactagaaggtcaggctttaacctgagacaggaaattcctgagttaagatagaaactttcttacttcaaatcccttcttactttcatgttctgtaaattaagtagaaataaatatttactcattttcaaaggtctcttacaaataatttttatcagttttaatagttagagataacgaagtaaattaggaaaaataattaaatcttcattttgaattttttgacttagcgtgacagccagtttcctggagttgctttggtttaatttcactacagaagacttagaagacaattcttttcttacatttttttccttaagaaataaaagacaaaaagaaaacaaggtgtaataaccacactaaaaattacatggtatgataataatacaaatagctcttttatgttttagctagtattttaagtaataataaactaatattcaacctataatttgggagattaaaaaaaggtcaatatggttttcagtctttcatctttttaacaagtttaggggcaggttcaacataacaatgaagtgtgcatatgtcacatagttactgtaagtgtgttttaaaaatctatcagaaacataaattgtccaaaagccttatgaatagaacaattgttttcagcaagattttttttttcccctgaaaaactgttgtggtttttctggctcaaaaaatttttatatcttgccttaataaaactgttttatattaaagcataacatacaaactcacaaatatttctttttattttttcaggttgcatgcatcattcctttaattgagcagagttaactggatcaaattatttatgggagagagaggaaaagttataaagaattatagtaatttttaatttccaccaatatactctttgtaagtgaatcactctataattactttctgttgcactgaatgcagcaacaataacacaatagtattttaaggcactggtttttggcatactctaaccttgtaattatttaaataacagccaagtttactcatgtttttgattctgtcaagaaaaaaaaaaagttcctttactcgaaagtgatggccgaaacagaatcggaaatttgttttcttgaaattacataaatacacagaaaatggcacttattagcttttgttaaaacattaccttacctaatcactgcataaaagtccagatttgtagaaaattgtaattttctcagtatctaaaactattttgctttccattaagtttctatttgctattttctcagaattttacaattaaagataaatcacaaactgtttgtttttcttaaagttctttgagaaaatgtctaattatacaatccttggacaatactgtgtttttttggtgctgtgttttttaagaagtcctacttactggaattttgactatttggatatttttgtttttaaaaggggaggggaatttgcttaatacttctaaagatgtgaattgataattgatattaaaatagaattactctcaactcaccagaattaaattttatatctgcatatttaacactattagctcatataaattataagaaaaattttcaaaggatctggttttaattttttggatatgaaatgaatttgccttttctgccttttcttaagtactattttgtaactatattgcactaactatatccaaaacacattctgagcatcactgtgagtaacagccttccagtttgtacccttttgattcacagcatggccctatagttaattaagaggtggataacttaagctcacaactgcctttaatttgatttcacatccacagttataaactttgcatttaaaaggaaaatgagacatttaaataggttcctgttgtttcacatataattggtaaaaacatattcccttgtaggatcctattatcagagcatcaaataccaaagtcagcaacttgggttgccaaataaattaggctcattaattattttgaaaagggctgctgtttccatgtaaatgataattttctttttcatggacaaggttatggtacttatctactaaaagaaacatgcataaacatagtttttatctttaacttcagtattaaaatatgcagttttttgcaaagaggaaaaacatctggttcaattacgctgaactctgactacatgtgggccagtaataatatgaattggacttaagaataaaccttgtgtttaatctctttttttccttaaaattttaatgtgagttttctgttacgcaaattatccatgttagcacatttggaacaaatgtataaatgtactttctgaataaagtcaaaagtctaacttgtttttagttccataatgttttaatgtttaattatattgtgtatttttctccctttccccttactctccaaaatcaccaaatctggaaaacaggctgattgtatctgtctatgagcaaaggaaacctgaaggaaccaagggcctggctggacagagttgtcatgtgtctgcctgtctacacttgctgtgcagaacatccgctcacctgtacagcaggcacagacaggcagtcacatgacaacccagcctgaatgacaaccagccattgaaagaaagcagccctcacaccatagcatctacaccaagagctacaaccaaaatgaggggctcgggggcctggggttttaatctgttggtttaatacttaactcatgtattattttattttgattcaagtattaaaacccaccaaaagtaaagtgagtggtgcctatgaaatataataaaacccatttctgaaaatgttcctgtgcattctatagttctcttttcctaattgttgtcagcaaatcactacccttgacctttattgtacacagctttgcagcaccctatattgatataaaaactcaatataacaaaacaatataacttcagtctgatgcttaacaaagaataaattattctaagaattcttgtccata

SEQ ID NO: 6949 - DNA, 1402 bp, Homo sapiens
ttttttttttttttttggaaggggatagggtggaaagacagagaaaagaaaagggagaaaaagagtattccaaaggatcaagtgctttgagttaactctgccagtctgggttaactctgccagtctgggtctgggcaaaacacagtgaaaagactactatttccaactagtgttcaactatattaaaataatagtttctcctcttttgacatatggaaagttgaaatttttgatacttccacgcgtcatggtatacataaatttatgactgcgtcattctttaattaagaaggtgcttatgctacagttctaggagtagaatttacaaggccaacacattcacttgcaacctatgcttccatcactataaactttcaagatcttgagatgttcaggcaattcatttatcttcagaagcataaggaaagtggttaatgcacttgaaatgtatattttgacacatcttttgagaaaatatccaaacttcagtttatgcactgttaactggagtgaaatgataagggatggcttttgtctatgaatactttaaatacttaagggtaaaaggtgggaagatggataaaattagaaatgtgtcaacttttatttagttcattaacatgttttagcttcagtatttgaaattaattttcatctttcttagattctggtcaagcttaaaaaatgtaacacaaggctactcaaaacttttttcacatttaacaattaaacactttatgtatgtattcttaactaaagcaaactatttttcattcagctattttatttttaaaatgaaagtctcagtcttaaagctaagatcccagtgagtttcaaattttctgacaatgatattttaaccaaacctgacattatagtttctttaattaaaaaactgaatgatggggcaaaactacaaagcacaaatatgattaaagttaaatttctctcatttaaacaatcttgtcttatggcaatatgtcatctgctaaaattcatctctgcttctgcaagatacattgcacgatgcagatttttgccttaaataaaagtcccattactagcaaataaagtcctaaacaatacttacaaaatgtagaatataaacaggaagacaatataaaaattactcacagaatatcgacatcgttctacccaatcttaaatgccttgtaccacctgttgcaaatgctgcctatgagagttcacgtatggaattattctactggaccctgcaaggctcaggagagtgcttgacagctcccagaatgagacaatgacctagccagaacattaaggagactacacccgtccttcagactccaaagggaaagctaggacggcagcagagtcatcctaaggtgaggcactccaggataacattttcaatatttttccttaa

SEQ ID NO: 6950 - DNA, 1070 bp, Homo sapiens
cttttattgagaaaaggggaagtaggatttagtctactgcgtatttccctgctctctacagataccttatcgctcccgtgaagtgctggcttcatgcattcctatcacaaggcaatcactcagggtaaacgatgatgctgcatgtcttttgtgccacctctacatttctctaaaccatattaaaattgaaaccaaaagcacagataaaagcaatgaaaatatgaattcacttttccatgtgctggtctcacctagtgcttctacttaaatttttaatttatgggaaatatacttcaatctataatttttttgtaattttgaaatgagcgatatgaatttttattgcattattgaatggcccttgtttacctatcctttataccttatttataaagtgcatcctttataaaggatgaagtgtatatagtgcataaaagatatactttataaaatatatcctttatgcactatatgcctccatagtatcaggtatatatttcattaggagatgcatacatatttatatactgcaatccaggccattatactgatataggagagaagaggtcatctatgtcagaattgttttcctaacattctctaaatttccctagcttataaattacttccttgcatttcaaaaaagatgcttttggtttttgtagataatatgggtcacaccagttctgctgagccccagttgcatttacttctctaagacctagattatatggtttaccatagtgatatttttcattgactcaaaaatataagagattatttactcctaaatatatcgtaagatgttagcttcaatttagaaaactttatttgcttatatccttattgttccaccttattacttggccaaaactatggaaatcagtcatatctcattcccaagattaaaaattttaggaaacctgactgggcaccgtggctcatgcctgtaattccaccactttgggaggccgaggcaggcagattgcttgaggccaggagtttgagaccagcctggacaacatggtgaaaccctgtgtctacaaaaaataccaaaaaaaaaaaaaaaa

SEQ ID NO: 6951 - DNA, 1716 bp, Homo sapiens
tgattgcctgtctcaccaccagtttctctccttactactgcagctgggtatttaagtagctctttatttaaaaaatggaaatgaacagatatagtctttcttttccctgggcagttgctgactctggattcctctgtggaatattatactcttaagaactatctgtagatgactctccttttgcaaaggcaaagcagaaattaattaaccattaaccaaataatcacattggcatcatccacagaattgtaatattctctggggcacaggatacttcttttttcatccccacgcccattataaataccttttatacatgcatgcagaatgaaaaaggaccatgggcccatgtcagtattttcagcttcacccaacactaaaatagcaactatttccagtcattttttgcatacaaaagacacacatacacagtaaatttggggggagcaggttgttgcttttataaactgcatggtatgtttgagtgcagttactcgattttaaagctcctgagttgtaatgatagcttaactatagctatactttgccagccttttaaatctaaaaccatttttaaaaaaacatttgtttacccatgtgactattcatttactcagtagtcacagagacttcaggctgcaaacatgtgttgaatgtgccccttcacccaaataaattctgtgtctgatgtgttcgatatttgtccatcttattttcatttaaattgaaattttaaaaagatgttcccatccatgtgatagagttgtttgtgtttgtttgtcaccaccgtttcccttccccttggaaaaaaaattgagattagaatatgacatcttataccttttggtggcttccaaaccaggggtgtgatcaaaccaatgttttctgaatgatagatacggcatcagtgattgaaaacagaatctcaattttggcagcttggggctacaaggccttgtcctccctcccaaacatttgaaaacacccatcccagggactctcccaaccatccttcaaagataatggtatctttgaagtgactgtatcatacaagtgattttggctaacacccaccagaggacagtctcctgtactctctccggggtacactaacactgttgatgcttggcagggtggcaagtatacagagtgaacctggtcaacagaacctccttgttcagcagccgctggggaggaagaggggcctgaggcaggtaagtagacccttaaagcgcaagagaaccatcctacgaattggaagctctgtgtgatttttaatgcccatgtatattaagatattttgctgctggacgtgcccggaatcccagctactggggaggctgatgtgggaggattgcttgagcccaggagttagagtccagcctgggcaacatagtaagactctgtctctaaaaaactaactaaataaataaaacaatgttttttttttaaagtttatattttgcattcaccctacctaaaataagcagcacagagcaactttaaaacgtggtaagtacttaggcaagccaaatgtttcgatcttctattttagctctgaattttcttattagcaaagctgattatgtggtaaagtaagtggggctataattctatttgttccttacccagaaactttctttaccagccaaacttattgatagaggaagatttgttatacagttgatttaaggcctgtttctgcataaaggcaaa

SEQ ID NO: 6952 - DNA, 1561 bp, Homo sapiens
gtgtccagctgcctactttctgcccggatctctggctcctcatctctccggtctccgcagactaaagccctcgggatatgcagcagccatgcctgtgcacacgctgagccccggagccccgtccgcccccgccctaccttgccgcctgcggaccagggtccctggctacctgctacgggggccggcagatggtggagcccggaaaccgagcgctgtggagcgcctggaggccgacaaggccaagtacgtcaagagcctgcacgtggccaacacccgccaggagcctgtgcagcccctgctgtccaaacagccgctctttagccctgagactcgccgcacagtgctcacgcccagccgccgagccctgcctggcccctgccgacggccccagctggacctggacatcctcagcagcctcatcgacttgtgtgacagccccgtgtcccctgccgaggccagccgcactcctggacgggccgagggagccggccgtcctcccccagccacccctccgcgaccgccgcccagtacctctgcggtccgccgggtggacgtccgccccctgcccgcctcgcctgcccggccctgcccatcacccggccctgccgccgcctccagcccagcccggccgccgggtttgcaacgctccaagtcggacttgagcgagcgcttttctagggcagccgctgatctcgagcgcttttttaacttctgcggcctggacccggaggaggcgagagggttgggtgtggcccacctggcacgggccagctcggatatcgtgtccctggcagggcccagtgctgggccgggcagctctgaagggggctgctcccgccgcagctcggtgactgttgaggagcgggcccgggagcgcgttccctatggcgtgtcggtggtggagcgcaatgcccgcgtgatcaagtggttgtatgggctaaggcaggctcgggagagcccagcagctgaaggctaggcgccactgggcctggaattcgccacaggacggatcttacagaggcaagtggtccctggacctctcttgcatccattctctagacggccgtgtcagaggctccaccctgttgtgaacttggtatggaggcaaaggcttagaggctggaccagcattgttgggcaaggactgactctccaagggttttgttcttggctttggacacctgagaaccccctcctcccctcccccaatacaaggtttttgacatgagtgtactcctgcttagttcctcttgtggggctgcatttgcggtgctttgccctccccactgtgagtgaggggccaagggatctcctcaatcctgtctccccagcggctctgtttcctccttccttccttggcctctgtcctttgctgacttcctcttccttacccagcagaactcaccctggggtcggggcagtggggaggggcctatccactgctcttcctagtccttggcagctggcctaggtgggcagactataggagggactggttaggagtctgcattgctttgacttccctctccttggttaataaacacaaatgcttgtttctcaa

SEQ ID NO: 6953 - DNA, 1561 bp, Homo sapiens
gtgtccagctgcctactttctgcccggatctctggctcctcatctctccggtctccgcagactaaagccctcgggatatgcagcagccatgcctgtgcacacgctgagccccggagccccgtccgcccccgccctaccttgccgcctgcggaccagggtccctggctacctgctacgggggccggcagatggtggagcccggaaaccgagcgctgtggagcgcctggaggccgacaaggccaagtacgtcaagagcctgcacgtggccaacacccgccaggagcctgtgcagcccctgctgtccaaacagccgctcttcagccctgagactcgccgcacagtgctcacgcccagccgccgagccctgcctggcccctgccgacggccccagctggacctggacatcctcagcagcctcatcgacttgtgtgacagccccgtgtcccctgccgaggccagccgcactcctggacgggccgagggagccggccgtcctcccccagccacccctccgcgaccgccgcccagtacctctgcggtccgccgggtggacgtccgccccctgcccgcctcgcctgcccggccctgcccatcacccggccctgccgccgcctccagcccagcccggccgccgggtttgcaacgctccaagtcggacttgagcgagcgcttttctagggcagccgctgatctcgagcgcttttttaacttctgcggcctggacccggaggaggcgagagggttgggtgtggcccacctggcacgggccagctcggatatcgtgtccctggcagggcccagtgctgggccgggcagctctgaagggggctgctcccgccgcagctcggtgactgttgaggagcgggcccgggagcgcgttccctatggcgtgtcggtggtggagcgcaatgcccgcgtgatcaagtggttgtatgggctaaggcaggctcgggagagcccagcagctgaaggctaggcgccactgggcctggaattcgccacaggacggatcttacagaggcaagtggtccctggacctctcttgcatccattctctagacggccgtgtcagaggctccaccctgttgtgaacttggtatggaggcaaaggcttagaggctggaccagcattgttgggcaaggactgactctccaagggttttgttcttggctttggacacctgagaaccccctcctcccctcccccaatacaaggtttttgacatgagtgtactcctgcttagttcctcttgtggggctgcatttgcggtgctttgccctccccactgtgagtgaggggccaagggatctcctcaatcctgtctccccagcggctctgtttcctccttccttccttggcctctgtcctttgctgacttcctcttccttacccagcagaactcaccctggggtcggggcagtggggaggggcctatccactgctcttcctagtccttggcagctggcctaggtgggcagactataggagggactggttaggagtctgcattgctttgacttccctctccttggttaataaacacaaatgcttgtttctcaa

SEQ ID NO: 6954 - DNA, 1561 bp, Homo sapiens
gtgtccagctgcctactttctgcccggatctctggctcctcatctctccggtctccgcagactaaagccctcgggatatgcagcagccatgcctgtgcacacgctgagccccggagccccgtccgcccccgccctaccttgccgcctgcggaccagggtccctggctacctgctacgggggccggcagatggtggagcccggaaaccgagcgctgtggagcgcctggaggccgacaaggccaagtacgtcaagagcctgcacgtggccaacacccgccaggagcctgtgcagcccctgctgtccaaacagccgctcttcagccctgagactcgccgcacagtgctcacgcccagccgccgagccctgcctggcccctgccgacggccccagctggacctggacatcctcagcagcctcatcgacttgtgtgacagccccgtgtcccctgccgaggccagccgcactcctggacgggccgagggagccggccgtcctcccccagccacccctccgcgaccgccgcccagtacctctgcggtccgccgggtggacgtccgccccctgcccgcctcgcctgcccggccctgcccatcacccggccctgccgccgcctccagcccagcccggccgccgggtttgcaacgctccaagtcggacttgagcgagcgcttttctagggcagccgctgatctcgagcgcttttttaacttctgcggcctggacccggaggaggcgagagggttgggtgtggcccacctggcacgggccagctcggatatcgtgtccctggcagggcccagtgctgggccgggcagctctgaagggggctgctcccgccgcagctcggtgactgttgaggagcgggcccgggagcgcgttccctatggcgtgtcggtggtggagcgcaatgcccgcgtgatcaagtggttgtatgggctaaggcaggctcgggagagcccagcagctgaaggctaggcgccactgggcctggaattcgccacaggacggatcttacagaggcaagtggtccctggacctctcttgcatccattctctagacggccgtgtcagaggctccaccctgttgtgaacttggtatggaggcaaaggcttagaggctggaccagcattgttgggcaaggactgactctccaagggttttgttcttggctttggacacctgagaaccccctcctcccctcccccaatacaaggtttttgacatgagtgtactcctgcttagttcctcttgtggggctgcatttgcggtgctttgccctccccactgtgagtgaggggccaaggtatctcctcaatcctgtctccccagcggctctgtttcctccttccttccttggcctctgtcctttgctgacttcctcttccttacccagcagaactcaccctggggtcggggcagtggggaggggcctatccactgctcttcctagtccttggcagctggcctaggtgggcagactataggagggactggttaggagtctgcattgctttgacttccctctccttggttaataaacacaaatgcttgtttctcaa

SEQ ID NO: 6955 - DNA, 161 bp, Homo sapiens
tcctctcttggtctcagctgggcctggttctcccggggcaggagggagggggtgtgggtggggcctgaggccccgcagctgctgccttgtgcctgctgattggctccttgtggaggggcgtggtctctaccttataatagggagggcgtcttatcctctca

SEQ ID NO: 6956 - DNA, 285 bp, Homo sapiens
gggagggtctgttggggagagagcagggagggattcttggaagtggggaaggtgccagattgagtcttctccaatggttatggcttggtcttgggagggctccccctgttccaggattctggagcctcccgccttccctgcaggcctctgtggagggagcagggcggggggcttttgcactcctccctcccccaaccctgcagccttggggatctgtggaaacagcccctctattgttctgcctccagttggagtgtgagccctcggagggcctgcagctgctgc

SEQ ID NO: 6957 - DNA, 415 bp, Homo sapiens
cgccccggtgccagcaccttcctttttggtggtcaggggcagagccacctactcgctgggttaacttaagcaagttgtttgcctctctgggcttcagtttctccatccaaaaaacggggctgttgagaggacctgaggttgagttgactggtgcgtagcacagagcctggagcctcccttgctccctttagcgcgtgccttgccctgtcttttctgctcaggttgcccaggtcttttttctctagcaccttttttcctctcttggtctcagctgggcctggttctcccggggcaggagggagggggtgtgggtggggcctgaggccccgcagctgctgccttgtgcctgctgattggctccttgtggaggggcgtggtctctaccttataatagggagggcgtcttatcctctca

SEQ ID NO: 6958 - DNA, 285 bp, Homo sapiens; identical to SEQ ID NO: 6956

SEQ ID NO: 6959 - DNA, 285 bp, Homo sapiens; identical to SEQ ID NO: 6956

SEQ ID NO: 6960 - DNA, 415 bp, Homo sapiens; identical to SEQ ID NO: 6957

SEQ ID NO: 6961 - DNA, 6151 bp, Homo sapiens
tgggagttgagattttaatatcataaatcggtgtggggccacacctctcactgccaggcccgtgggcctcctatcttcatattgcctggaaggctgcctgcagccagggcttcccccatcccctaggaaggatccagcaccagcctgagaagggaggcaacagcagctaaaggggtgggaggaggaggagacagaagcatgtgctgcaggcgcatgtgtgtatgtacttacatgtgtgaacacatataaagtgtcaggtttacagaccctggctcaaggacagtctaggatgggaaaggaggtagggcgagaagaagcacatattttctccctggtgcttcagcctcaccctatccaagggacagacatatggggtgtgagaaacccatccccaggtcccagccttcaggactggagtccttttgagtctggtggagtcacagatccagtctttgggggacactgggtctgtctccttttgaaagccctggaaaggtgggaggtaagaagtaaagggagacaggtccctgctagaagaacttgacgcctcggccatcgctgacagtgatgatctcggccttgtgctcctgctgtagggcctgcagagcccgcagtagagtggcttcatccagcccgtggaactctgaacagggagagataggcagagacaatcagctcctgaggcccaaggcctctgaggagagtgctctggctggaagccgagacctcccagaggcagggtatgcataagccatctatactgctacagctgccatccacacttcccaggcactccttaggagtaaggggtggaagaaagcctgaatcagcatgaaatgagtttgtgcttatttcccccttcttggttctcctctcagactcagcctcccccacacctagcatttgtgtctgatgcacgagaatgacaccatctgcttcagggccacaaaggggccgtgaaaatcaggcctagggagatcggagccattgtcactagacactgaccctagaggatctatcctaacacaaagaatatagccagtacccctggccaggagactgttaaactccagcactattatctgccctttttctagcttttagctgggagcacaggccaggcgcggtggctcacgcctgtaatcccagaactttggaaggctgaggtgggagggtcacttgagatcaggagttctagaccaccctggccaacatggagaaaccctgtctctactaaaattacaaaaaattagctgggcatggtggtggtcacttgtaatcccagctactcaggaggctgaggcagaagaatcacttgaacccgggaggtggaggttgcagtgtcaagatcgtgcaactgcactccagcttgggggacagagcaagactttgtctcaaaaaaaaaaccaaaaaaattggggagcctatggctagctgagtatgtggagatatggtaagatactgcagggagatgtgggaggcagcaggcaagccctgacaggcttgcttacctcaccccctgtgggggctcagctaagtcagggagcttgctttctgaggaaacctacaactttgcccaacctgagtggtgggctaggcaaggctacagtgctgaaatcatggggtgatggtgggagtagcaagcagagacctgcagggcagcagggggaacagccaagagctataaactctgctagggcagccagggcctggcagaaaggggagacaccctctgttatcccagctaagatcgaaacttgtggtgatccagaggatcagaatctggagtcggagaaaaagaactaagagtgtttacgctatgtaaaaatcaaacactatacaaatccttgcctggccagaaaccaaagtatataaatgggctgggggtgttggcctaatctcttcagctgacacccacagatcttgagccctctataagaataaagggtgaaagagagcctgagtcagcaaggaatgagatttcaagcttaatcccctgcccttgtttctcattcggcatctatagcagatgctgaatgaagaaagttatttataattttttttattgttattatttttattttctgagacggagtctcgctctgtcatccagactagagtgcagtggtgcgatcttggcttactgcaacctctgccttcgggttcaagcgatcctcctgctgcagcctcccaagtagctcagattacaagcatgcaccaccatgcccggctaatttttgtatttttagtagagacggggtttcactatgttggccaggctggtctggaactcctgacctcaggtgacccacctgcctcggcctcccaaagtgctgggattacaggcgtgagccactgcacccggcctattgttattttttaagatagcatctcgctctgttgcccaggctggagtgcagtggcgtgatcatagctcactgcagccttgacctcctgggctcaagtgatcctcccacctaagccttctgagtaactgagactactggtgcacagcaccatgcccagctgatttttaaattttttgtagagacaggatctccctgtgttgcccaggctggtctcaaactcctgacctcaagcaatcctcccaccttagcctcccaaagtgctaggattacaggcacgagccactgtgcccagctgaaagtgaaattcttaacttttcatgggtcatagatgcccttggaaatcttgtaatatctaatctatccctagaaaaatgcacatgcatccacaaaaacaaaatttgggattttttgcatgtgaattcaggtggcttatggaatccttggacatgggttaagaacttagaatcgcttgaacataggaggcggaggttgcagtgagcagagactgcgccactgcactccagcctgggatacagtgactctgtctcaaaaaaaaaaaaaaaaaaacaggcggggcacagtggctcacgcctctaatcccagcactttgggaggccaaggcaggcggatcacgaggttaggagtttaagaacaacctggctaacatggtgaaaccccatctctactaaaaatacaaaaaattagccaggcgtggtggcgcacacctgtaatcccagctactcaggaagctgaggcaggagaatcgcttcaacctaggaggcggaggttgcagtgagccgagattgcaacattgcactccagcctgggtgacagagcaagactccatatcggaaaaacaaaacaaaacaaaacaaaaaattaactatgagtgggaagggaaaggcattaccctcatcctctgtgtcttccccattagtcagttcatacagggtaaagacggagttgttctggccactcctggaaacctgtgaatacagaaaatgaggagtgaattagaaccaagaatctcctgggagacagtaaattcatcagctccacccctctgatccaggaatgatacctattcccaaaccaggactcactgtcgcctctgcagagtggcctaaaagccataaaccctacaagtgctatatttatatgtgtacacactcatttggaaccactaaaccacaggtcttcacgtgtctgaggagtgaccttgacctctcattctggttgttttcctgttcaagaatggatggtgtgtatttgttatatttagaatgttgatgcttcttaccctcttctcttccttgggaatgtttgggactggtggtttagggggaagagtattctgtccccacacccacactgattcagaatatctcattcatgttgtggacagtcccataacagtgcagtgggggaggggccccaggttttttcccttcctttccccatttatctcctgtggccagaggctccagccaacaatagcactcagggttcccagttctgcattctccaaatatggcctcacatagcccccggcctcctacaggcaaagaaagggaggttctatgcagccaaagacattgagtcacttaaagaggtttccctagaaggcctacacttcctctttctgccccctccccattttgctcagtctggatctgggaacaccggctatctgctaggccctaatatagttaaccttttccatgggtcactgttgaatacttggcagaataatgatctcacccactgatagatgagtttcccccattcttctggcctccgccacatgatcaggaagctggacttgctcttatccaaccactcgaggttccctgtaaaacagatacttatgaaagcataaccaggcgcgcagtggcttacactttgggaggccaaggcgggaggactgcttgagcccaggagttcgaaactagcctgggcaacatgatgagaccctacagaaaatacaaaaaaattctctctatagaaaatacaaaaaattagccaggtgtgtggtgacacatgcctgaggtctcaactactcaggaggctgagatgggaggatcacttgagcctgggagtcgaggctgcagtgagataggactgagccactgcactccagcctggatgacagagtgagaccttatctccccacccaaaaaaaaagtatcatgaactaaaaagaaacaaagaggcaaaaaaataccaaggtgggacagagtggaagagactcagctttcagaaagaaagattcaatatttattttactattattatctacaaggcactcatccttcttccacttctcttcaggtttagggcacagacagagatttcaattttgtgtacaaagaagaaaggacttgggaattgggctgcctactttacagaagactctggccttcaagccaggagagagaaaaagttattaaagggaaaaagacttatcctaatttgccctcaggaaaacccaactaggaagaaaaataaggaatctggggaactgaacccacctttcttcctcagttcctctaatacaatctggatcgactccacaggaagctttcctggtttaaggttaagggaacggcatacacatgagttgggtaggataaaaattttcagagccagtcccatgttgagaaacacctgccccttcctctcccacacacatatgtgtgcaatttcccaacatgatatgaattggcatttcctggatattcaaaggaggaaggtaaagagaaactcttccaattaaaaggagctttatgtgattgtgccactgcattccagcctgagcaagagaggaagaccctgtctccaaaaaaaaaaaaaaaaaagaaagaaagaagctttagaaaatgaaaggtactgtcattcctcaccctctgtctgttgccttccttcagcctttctccacagatattttagggatgaatcaggcagcaaaaacaaatgacccttacttcctggcaggaggggggcagagaaaataattaaaggtagttacccaagtctgggcctcacacagaaaaggatggaagatacaaatagtcaaaagggtttaggttaaaaaacttggaacttggcttcagggcagaaattctaagaccttaatgacatccgagcagtcatcactgccaagaacaagagggtatggtactgcatttgccaggggaaaatgtcagctacacattttcactctttaagtccagtttgggtgggaatctgcctaccatgggtaaaagggggctggcgcgggggggcgtctgggcatgtgtgaaagcgcagaagtgcatgtgtatgggctgtggaagagcctgagggaggatacgctgtagcttgacgttgttgaagagcgggctctcctgagcttccatcaccgtcatgctggactgtttgtgcaggcggcagaaggacaggaccagcgagcaccaggcggccagctgcttctgccgagtgtccacattcggttgtaacctgccgggtgaagggagtggggcgcagaattagagggcgggaggcagcacttgcccgggacgcatttcaggaagaaagtaagggactgagggtgttggccgacgggtcttttctccccctccccatatgaagcatcagggctgagcccagggtccgggggaggggagggaggcacagcggtgcttcttggggtctgagcctcacgtaaagaagggtgggaagcgatactgccacggccactcgaaactcatcgccatcgtagtagcccaggaaacccggaagct

SEQ ID NO: 6962 - DNA, 104 bp, Homo sapiens
atttttgtatttttagtagagacggggtttcaccatgttggtcaggctggtctcaaactcctgacctcaagtgatccgcccacctcggcctcccaaagtgctgg

SEQ ID NO: 6963 - DNA, 8535 bp, Homo sapiens
cagtccctcctggagacgcacgactctgtggcctcaaagacctatgagacaccaccccccagccctggcctggaccctacgttcagcaaccagcctgtacctcccgatgctgtgcgcatggtgggcatccgcaagacagccggagaacatctggtgaggactgggcagggccagaggtggtgctggtgagggtggggggattgagaataaccaatgaacggacaaaaaaggccaagtgtggtctgaagatgaagatggggccagctttgtgcagggaaggatcgatgcagcaaagggtcgggggaagacccaggagaccatagacactgcacacacacctgtgtccgcacctctccagtctgcccacctctcccctcattagtacctgctgtaagtgaagaatttaggcagaaggatggaggaggactttgtgagggtgggggtgggtgggtagggacaggaatggaggagctattaggagactatttgaagattctgacttggagcaattggggcctcatcttacactccctctgacctccagggtgtaacgttccgcgtggagggcggcgagctggtgatcgcgcgcattctgcatgggggcatggtggctcagcaaggcctgctgcatgtgggtgacatcatcaaggaggtgaacgggcagccagtgggcagtgacccccgcgcactgcaggagctcctgcgcaatgccagtggcagtgtcatcctcaagatcctgcccagctaccaggagccccatctgccccgccaggtgggcccctcacccagcacaaggcccaagggatggctgagcctcctggctgtcaaggttgcaggtctcacggaggccctcctctcctactggtttcctccagggaagatgggggtgggacctgcagcccaggggcagctgaccgcagccgccgacaggcctctgccgctgctgcacctgcacatgctcccacattggctggtattatgcacgcagccacagcctggggtacaagtgtatgagagagcgcctgcattatggtcagcgttcttcacgtttgtgcgcgtgcgcagggtggggttgtcatatgtcctggatagctgtctcctggttggtcaattctgggggtgtggctgctctgtctccctatcctattgggtctctcgccctccaccagagcccttctccaaggggagagggtgagtggagggagggatccaggattaggtgccagggtcctgtgccctacttggtggtcccgcatccttggtcctgagatctgaatcctgtagtactagatgcaaagggaggttggcaccagggaggagcatgggcaggcctggaggcatcactcctgcagggggacagttccattgccccttagtctctgtgaaaagagggggcatggggtagacctccacctgcagccttctgctgacccttcccccgaccctttgctgattcctgggcccaggtatttgtgaaatgtcactttgactatgacccggcccgagacagcctcatcccctgcaaggaagcaggcctgcgcttcaacgccggggacttgctccagatcgtaaaccaggatgatgccaactggtggcaggtgagctgcgggcacccccgcatctctccaggtatggtgcatgggagggcgagggcacagggaggggtcctcttgctcaggcagatcttggtctcatgtccgttttaggcatgccatgtcgaagggggcagtgctgggctcattcccagccagctgctggaggagaagcggaaagcatttgtcaagagggacctggagctgacaccaaactcaggtaggaggtcccccctaccccacacctccaatctgggatccaacagggccctgtctgcctcactcacccatctccctatggccagggaccctatgcggcagcctttcaggaaagaaaaagaagcgaatgatgtatttgaccaccaagaatgcaggtgggtatcagagcgccccctcccttaccctcctctaacatggcatgcctttccctgtccccacccatcacctgtgacgacgtgtgcctggctcagatgctgccagccgtgtccctaggccctgcccgactcccccctgctcccctgttccaagccctcttgccctcagcctccctgagagctccgcccctccctcaccgtgcagcctggtgagcagcgccatctccctgtgtccagagtttgaccgtcatgagctgctcatttatgaggaggtggcccgcatgcccccgttccgccggaaaaccctggtactgattggggctcagggcgtgggacggcgcagcctgaagaacaagctcatcatgtgggatccagatcgctatggcaccacggtgccctgtgagtgggagctgggccctgctgagttggggacaaggagcagggctcccctggggccagggctgggcccaccgaatgggcatcttcatgggcaccaggccaggtggtacctttgggtacacgggttggggtgcacgccctctgtgggtggttaggggaacttcaggctcaggaagggtgagggaggtgtccagccaacaggtggcctagcgggctgggctggcgtccactttccttctcttgtttcacttgctaaaagccatgaagaaagtgagtgcccagctgtgcacccgggtgaaacaggctacgagctgcatgtgtgtagccttgtggaagacagggcttcttagtggcagaaacagcgggggtggtggaagctcctggctgccagaggcaggactaagagcactgccctggtctgcttggctcttgctgtgtggctttgggctgtacattgccctttctggacctcagcctctcttctgtgggctctgggctggaccatgattaccagctcatgtctctgtgtgtgccaatggggagagtggggggcaggtgtgtgcaaaggcagcagtgctggcaagatggggagcagactgcacctccaaggctgggaaacgggggcctgggtaggggtgcatatatgtgtctgaggcactgtaacctgcccctgcccatttggtccaacctacccccatccccctagacacctcccggcggccgaaagactcagagcgggaaggtcagggttacagctttgtgtcccgtggggagatggaggctgacgtccgtgctgggcgctacctggagcatggcgaatacgagggcaacctgtatggcacacgtattgactccatccggggcgtggtcgctgctgggaaggtgtgcgtgctggatgtcaacccccaggtaccgccactctgctccttcccagcctgcccaatgtcctctctgctgcctcattgctcccccatatagttccagacacctgtcacctgaacacgcccatgtaccccctttgccctcaactactgctagaaacccagcccacctggaacctttctcagccttccagggtccccactcctcctctagtctcctccagtcaccccagccacctgccagctgtttgtcatttgtcccaggactcatgtcccagacccccgggcacccttttctcatccactcccaagtgctcaccccaaccccagttaccctcacagcctttctctggttcctaggacagacatggggatatactccctaccttgccttctccttctgcaggcggtgaaggtgctacgaacggccgagtttgtcccttacgtggtgttcatcgaggccccagacttcgagaccctgcgggccatgaacagggctgcgctggagagtggaatatccaccaagcagctcacggtgagggctctgaggtgtgggggaggggtctgatagctgcctagggtggtgggggacaggcctgagctgacagagagaaggaggtggtgttggggagggacaggggcctgctccagttatcagtgaggcaggacgtggtcccccctgcatagatgtggaaggggaggtctgagagaggaagtccaaagtctcagagtgagccaggcacacacctagcctgggatacatgtgcttctgactcaaggcccccggctcagcccactctgcagagacagagtgctggccagagagagttcccgagggcaactgggagaggtgggctggaggtgggccaggtgagcttgggttgcttacagctgggggaaagctgaagggtaggagaaagccagaggcgggaaggctggctggagggctgagtcagcgtcagggagcaggcagcgcctggaggagaggcttcaaggcctcattgcagaactccagccccatcctccttcctatgtcttgctgcgccttcccaggaggtggagggtttgcggcgctctgagcgcaggggtccctctgctggccatgcctggtgctgcagcattccggccccaggtcagagcgtgcctggggcccaggagaggctgtctaggctggcccccttctgccaatgacccccttaaggagctctggacctttgcctgatccccattctgggcacctcctccttggcaacaggtgtggccaactggagctgttgggatgcagctagcttcagcttatttaagtcagttgtcaagtacccttcctcacccctgcccatccagcttccactgggtcgagggtggggttgccctgggtacttgtggattgccctggtaccagcctgtctagctgcataggtaaggcagcctagtcagacttgagggagcactggcttgagagtcaggcagaccctgtttagccactgactggctatgtgacctttttataccttcattttctctgctataaatgggaaagaattaatcctatcttgcagagctgtagtgaagattatgtggcatgcaaagcatttaggggtgtgattggcagttattaaagcttatttcctccctttcactcaccatctgtggttgatggtgagccactttgaggcacgcagagaggggcccctgcctccctagccagggagtccacaccagggttgggctttggggagggggagtgggggcagctgtagctccttctgacagtgggggtgagttgtgggcactgactgtagggaggtccccttgtgcctgggcaggaggcggacctgagacggacagtggaggagagcagccgcatccagcggggctacgggcactactttgacctctgcctggtcaatagcaacctggagaggaccttccgcgagctccagacagccatggagaagctacggacagagccccagtgggtgcctgtcagctgggtgtactgagcctgttcacctggtccttggctcactctgtgttgaaacccagaacctgaatccatccccctcctgacctgtgaccccctgccacaatccttagcccccatatctggctgtccttgggtaacagctcccagcaggccctaagtctggcttcagcacagaggcgtgcactgccagggaggtgggcattcatggggtaccttgtgcccaggtgctgcccactcctgatgcccattggtcaccagatatctctgagggccaagctatgcccaggaatgtgtcagagtcacctccataatggtcagtacagagaagagaaaagctgctttgggaccacatggtcagtaggcacactgccccctgccacccctccccagtcaccagttctcctctggactggccacacccaccccattcctggactcctcccacctctcacccctgtgtcggaggaacaggccttgggctgtttccgtgtgaccaggggaatgtgtggcccgctggcagccaggcaggcccgggtggtggtgccagcctggtgccatcttgaaggctggaggagtcagagtgagagccagtggccacagctgcagagcactgcagctcccagctcctttggaaagggacagggtcgcagggcagatgctgctcggtccttccctcatccacagcttctcactgccgaagtttctccagatttctccaatgtgtcctgacaggtcagccctgctccccacagggccaggctggcaggggccagtgggctcagcccaggtaggggcaggatggagggctgagccctgtgacaacctgctgttaccaactgaagagccccaagctctccatggcccacagcaggcacaggtctgagctctatgtccttgaccttggtccatttggttttctgtctagccaggtccaggtagcccacttgcatcagggctgctgggttggaggggctaaggaggagtgcagaggggaccttgggagcctgggcttgaaggacagttgccctccaggaggttcctcacacacaactccagaggcgccatttacactgtagtctgtacaacctgtggttccacgtgcatgttcggcacctgtctgtgcctctggcaccaggttgtgtgtgtgtgcgtgtgcacgtgcgtgtgtgtgtgtgtgtgtcaggtttagtttggggaggaagcaaagggttttgttttggaggtcactctttggggcccctttctgggggttccccatcagccctcatttcttataataccctgatcccagactccaaagccctggtcctttcctgatgtctcctcccttgtcttattgtccccctaccctaaatgcccccctgccataacttggggagggcagttttgtaaaataggagactccctttaagaaagaatgctgtcctagatgtacttgggcatctcatccttcattattctctgcattccttccggggggagcctgtcctcagaggggacaacctgtgacaccctgagtccaaacccttgtgcctcccagttcttccaagtgtctaactagtcttcgctgcagcgtcagccaaagctggcccctgaaccactgtgtgcccatttcctagggaaggggaaggagaataaacagaatatttattacaaatgttagaatatatttcttatactaggaatctcatttgcatttgcatagactatacacatggggtggaaaggccaggcctgcccccatctcgttggtgtggctctgcgtatactacacactcattctcctgctcctcttttcccttagtcagtgtcctttcatcctgattcagctctgccttgcatcaccctcagcctaagggagtgggaaggaaatggggtgttttcttgctgacctgaggctatagggtcacttgccatttcctaccttctctgggggatttgagggtagaggcaggggaagatctgttgttgcagttgcttctgcccccttgatccaaatgaccatcatctctgatggagatgggttgggtacctggccttcatggcaccttcactgctagggatgctcaaggggcaggcctggggcccttccctcctgtctcttctcggtctttcctctctgagcagcctcctacctcccctgcctgagccctcactccacagccctcccaggtacctagcagaggctgtcagtccttggctcacctggaacagggctggggctgggttggaacaggtgtgtgcccccaccacagctctatgactctgttctccctccctgccattgtggactcttgtatttgagggacctcaagagagtgaggaccctaccatccactgtccatattcagtcccagccccagtgcgcttcctctgttccctccctcagccatccaattcttgagttttctcactgattggttttctttctttttccttggattaaatgtgaaagcaaaggcttctggctctgcttttctttggttggggttggatggatggctttgggagagagtgagagctggggagcacagcacagatgactactagaatggaagtcagagcaacatgtcttgttttctgcgatgtcttcctttcctctgtcttgcccctgcacactcccccatccccagaagatgctccttctaagtgcttgtacccaaggacatgaacagacatttctcaaaagaagacatacaagtgacaatgtatgaaaaagtgctttacgtcactaatcatcagagaaatgcaaaccaaaactaccatgagttaccatctcacaccagtcagaatggctattaaaaggtcaaaaaataagagatgctggtgaagttgcagacaagagggagtgcttatacactattggtgggaacgtacattagttcagcccccgtggaaagctgtttggggagttctcatagaactaccattcattccagcaatcccatcactgggcatctacccaaaggagaagaaatcgttccaccaaaaagatacctgcacttgtgtgactgtcactatgggactgaatgaaggaggatgtacgccacttgtgacagttactacaggaccgaacaaaagaggacaaatgcagaaatgaaaacaagacaaaagaatctgctttaaagaaggggtccttgcttttgcttctagtgagcaagggccctgagcttccacagccctccatatttattgggtagaaagagcagggaggagcaggtaacctttggtcagctgcttgatttatcacaggttcacataattgctgacaggcttcatgtgtgcctgtagataatcacaaa

SEQ ID NO: 6964 - DNA, 901 bp, Homo sapiens
gaagacattttagtctttgaggttcatcccattctgttttaattttttcgagacaaaaaatgaccaatctcttatttgcgtattcaagcattcttaataagtcactaaaactcttatttttcataactctccttttattaaaaaccttggggaagagaacaaaacattccacattgaccttagtgagttgttcctaggtaggcatgatgaaaatgcaaaactgaaccccaaatctagccaactgaaagacattgatttttctagaacagcaccttccaaacaccagtctgtggaccagtcactgcttgcccaagacaaagttctcaccagcgtgaggtaaaatgaggaaaataacagcaatgtgtctaaattcattcaacctaaagacttcctttcattctttattgttgtccttcctatttctttgattatttgaacatctttacttctataaaaggaagttgccagcagatggtagttgttctctttaaacgtttctacttagtgaagttaacatttaacacacacctatgttggtcctcccacacccactttatttttttctcatccgtgaaaactagatatctagaaactactgctaggctaagggatagcttctgctatccaagacccccagattttccaaggttcctggccttggagcctttatattttataaaggaaatattttttaatcacattcacatctttaacttttgttttgaacatgtgaaatacaaccttttctggataactctatcatgatcaataatcaatggcattggattagaatacagtgaatctgctggagggcaaatatcatagggcagttttccagaaccagaatcgcccccgggccaccattcttttagcaattcgtttctgtctccttaaaaaaaaa

SEQ ID NO: 6965 - DNA, 1518 bp, Homo sapiens
gagagaaagacagagagagagagaggagtactggcccataaaggtacctaaaagactaaagagtgcatttctgggatctgttaatggaaattgctttcccagcttgaaaattgccacatttaaaatcccaatgtggggtaagcaaaatcataaatatgaactccttttcagacagcaaaccagcatttggagtctctctccttgccttcagggatccatatgccacagtctagttagctgcccagcgactgacaagcataaataaaaggtaacggttatagtaatcagagctgctgtgagtcaaaagtgtttcccagggagggatcaacatgcttctgataacactagagtcaccaaatagccaaggttcagctcttttaaaaacaaacaaataatgaaaacaatgaaaataaaaatgtttgctctgtcaactgtctacattcagcagtggaatggaacaggcacctgggattcataatagtaaaagggtcaggccatggggagcagtctgggtttgatggcttctttgccttccatcagtgctccttgccacctaccattggggacatcctccttcatcgtattactgcctcatgatggtctgtgaacccatctcacctaagttaagtaaacactgggcctcaacttaaggtgataccatcatcagagtaatccttaggagaaagtagataaatagaagatgaggcatgttatgtcctgaaagatggtcaactccttgtctaaagaactaggttaggtgttgaaggatgaggtggcaaactcagccaacaaaattgttccagcctgtggctcatgcaccaatgggcccagcacataaacccttataagtcacacttgaacagggtctcagagggcaagtgaggagttgtccatagagaaatttagatggactcccttggcccttgcagatggccctggatatgttatatgtacatgttgtcattgatgtggccagaaactcctgccttgggatttgccgaatactaacttgacttattggagcaggtgtctgtggtcctccaaagctgtcaactgttaagcatggtgattccaactaaaagtttcatgatcctcactgcctttctcttttaagcctaaacagcagtcatgtaaatgaagtaagattgttctgaaagcctcaggaaaatgactcaaccatggccttctgatgaatctgttttcctctgtcctgaaatgtctgaagtgtttaattacaccttaatctgactctgtcctcttctacttctcaggttttcctgaaatttgcctaattatttctttatgtgacttgattaatagaatgccaatcatgttgtttttatatctctctttctatgtctactgtgatgtgagaaacactcagaggaatgggtgagccaggtgccttcccctgctccctactttgccaagttgataactcctttgacccttgaacattaaccatgagcaccgatgcccgtctttcattcaggctgtattaaagtccactttgcaaag

SEQ ID NO: 6966 - DNA, 390 bp, Homo sapiens
cttttttgttagtctgtaaaatcatttccaggtaaaatctagagcttaatccatatgttgtgccatcttttgcttttccacacctctgatcctaggtaagttagagctaacgagtatttgctgagcttctattatgggctcagcatatgttataatttcttttacacataggaatctgaggcttagagaagtttactgatttacctaatggcacaccataagtgctggggctaagatttaaactcaggtctcctgacttaattcagatggtcagctcgatggtaatcataataatattgttgttgttgttgttgttgttatttatcaacaatagtagtagctaagtcatttcatgaaacagctcattgatagtccatttgataattctga

SEQ ID NO: 6967 - DNA, 3040 bp, Homo sapiens
cagcattgctccacgccacagcataagcatagatcccaagtccacaggctccattttgcaggtcatcttctgatcctagcaaatgtcctttccccatagttgtcctatgcctttgggctttagtctatcccaggactaactgtggagaaatcattggtttgagagtcaagagagcattggtttgggagctttaatcctctttctgcttcacactaagtgtgtcatcttggctaaatcacttggtctttctgcattttgttttcttatttataggatgaggaaattagattaaatggttttgaggtcctttcttgttctgatatgtccagtactcactggaaaattggatctataactgatgggtttagtaatctggtcatttcttgctctgaaaattgtagtcagcaaaagagatcatggaagaaatcactgtaatggtagtaatagtaacacatgccatttgtattgtgccttaggtttaccaggtgtttccaaatacattagcatatttgatatgtgcaggactagataccttgggacctgccacactccactttcaagatatgtattagcttcattagaattaaagggacttgaactcaggacctgcagcctattcttctttatccacatgtctctggtagggctacatccagatcacaccatgacttcttatagagcaagagaaaataatattattatatcttcctttgcctaaaatctctccacttattcttttttatgattctgcaccagttcactgggttattctatgattccatattttttttaaaaaaaatcatatttaaaatgaacttacaatgtctgaattttcctggccttgagtcacagaagtaatatgtttcagatggctgcccaatatgtattatcatgtaatacatatctgtgtccttttctgggatgaggaaggcttcaacttctggcactgagaactttgtattacagacacaggtttagtttctagcttagtcatgcctttagagtttagtagcacaaatccatgcaacccaacagaatacatggtgagggcctagtatgtagaatttgaaagtagttcaaatttgaattagaagaatgaagctaggacttatttggaaaaggagatagaaaaaaaatgatcagaaactgtggggccttattacctttgcagtaagttatcttctcatgatatatgtgaattattttatgtgcagattgtgttttgggattgtcagatctaaacttatattcttgctggctaatgtgctgatagccaggtctgaaacttgatgtgctatccagacacatatgatcagaaaagatctagagtgcaaagaggtgcctgaggagcaaaatgtggttttaatgttgtggaaagatcacttgcaagtatataagactgtataaagaagaggactgtgtgcaagtggggtgaaaaaaaaggatacgtgaatgtgcatatgactgaatagggaggaaggtcagggctagaaaggaggctacataaaaaggggcaatggagaatgcacaggaaagacacaggggaaggtcaagtcgagcaaggtagaaacaggagtagctagagccattgggaatccattttgaaacaagaaggagttttgaaagggaataggaaagtaagtgtcttgaagtaaaagataaatatggatggagaaagaagaaattctggatgatagagatgataaaaatatttattaagaaatgaagtcaggttcagtgtatgaaatggaaaggaatttttcagaattttaagaaaggggaagttcctcttggaaaagatatagcaaccatcggggaatgaccttttcatttcagaagtggatgaggaaggtggtgtgagcatcaggtatattctggaccatttcaagtgctggtgagaagaaaggaactctttgcctgaactgggcttggttttccaagtgctgctttggaaatgaagacccagagatgcagagcttatggtagttcataaatcttcatgttctattatctttcatctgccaataaagttcattttcaataatgtccaccattgctgtgcccagaataaccacaggcaaacatcaaaacaatacgcataagttagacaagattaaatcttgtctgatatctgcacaaacagatatgcaccatgttggaaacatgtgttttcctagtcccatccaggcttcccacaagaaagccatgatgtgggtctaaaccatatgttttgagtaaaggagaatagaagaaggggagtgtccgcaaaatggaaagagatgaagatgttccaaggaagtatgctgaaacagaacagtgaatgttttgcccaaaactacaaaaataaaagaaaaaaagaaaattgcaatacatggctactaagtctttgatcataagtcgaatttatagacctggaatttgccatcctagtctttcctttttagtaagacttctgtcctctggcagtgcatatggtaggtctctaatgtttcttcatctccaggaagatgcagatccttatttttgctgggaaatccttctaaatagaaatgtaacatttttataaaaacagattaatgtgtttttcacttagtaaatgttttcaagagctgaattgagaaggaaagagactggagtggttaatggtgatttgatttctggcattctgagttttctgctacaattagctgcattacttggtgccaaagagcagtggggaattgttgagttgctgtatcctttaaaaaaaaacaaaaaacttgttattttgaaagaacttaaggctcacaagatgttacaaaaatagtagagtggccttaccctagatccagttttccccatttataacatttcacttagtccattttcggaaccagaaaattaacattggcataatgctattaactaaactacagaccttttttcaatttcgccagtttttccacacatattcatttagttgctggatacttttaattcttgctgatttgtaaactggccttgcttggatacaacaggaaagatactatctggataaagt

SEQ ID NO: 6968 - DNA, 302 bp, Homo sapiens
cttgcctctgagatggcgtgaccagcagaaaagaaagctcagggctgtggcttcagaattcatggaaacagagccactgtcaagaaggaatctgctcagagcagattctgagttttcacactccacaaatcctcagatttagtgggaagctggaaaaaggaactcttaattccaattgaggagaaacaagaaaacattacaaatcagtttcccaagctgagaaggattagccttgaccccttgggtctgcctctgttgccctcaccagtttaccttctacaacagtttctcaggaacatgtg

SEQ ID NO: 6969 - DNA, 2091 bp, Homo sapiens
agcccgggggaacagtcagcgggctctgcgtcccgggagctggggacacgcctgcaaggtgtgtgatcctttaaagatccttagtactagttttgtagggagcctttgttatagctttgtcagcctgcgcgccttcagcagctccccctcccgggcccctcggttccctccgggctcgcccccagcggagagggcccggcgcaggggatctgcccaggatcaactgccctcttccagatccccttctgcgagattcttttcctttggttacaatctcccctccgtgcctggggcagataaacacggttcgccccgcctgcagtattggggcgatgctgtcctggaagaacgggctttctgaatgtgacctcgggatgctgcagcggcgcaatgctgctactgctgaatgagtagctctcctgccaccgcagggcgactgcggtgggcacagcagggcgcacagaggagggggtaatctgcccacccaggctaaggatttgagggttctgacaaaaaagagctggttgaggatgacacagttgtgaactaacctggctcctactaccccacagggcagccaggtcccagtagtcttgggtaccactgcccccaccataccaccattgtaaagtatggactcctgcttagccaacgtgcagctctaggcaggatctctgaaggatgctctggcacacagatggtgcaggtatgactttacctgcacacaagcttacatgtgccctgtcatatatggctacacgtttccccatttccccacagtcttcctatttaactggtcttcaatcctcctttctagggctttccgcctgcacacagtcatttggagaaaatcaagtgagtgcacttctccccacagaggattctgtatgttatgtaacacactcacactgggattcctcaagttaccattttgccccaactcagccagcacttggttttctggcgggggtgtcaggatgatgcaaatggaggtggaagcttcattccctgggggcttttattcccctccttgaagccccagttcaaggcccaggaacaaaggggaaaggtaactgatctctcttttggtctttctctcccctcacttccaccccttcacctgcaggccctcctctttgataaatagaggaaagcccgtgggatcaggtacatatgtaaatactgctgacctcggccgcccctcctcaccgaaaagcagaaagcccgtttcaggtgcaggctgctccgtgcctttgagtgtccaccacttctattcccccagactgcttgggactcaaggccactcacttaatacccgtctcttgttaaaaacattcaggacaactattaaatagttattggaagagttaaagaccttctttcaggagtgaaacgtttttaaagctgtgcttggcataagtctttaaggcgtacaaagtagaatcagtagacttgcctgagcgattttgaaatttgaaagatttctccccatgaaatggtaatttaaaatagtttgtagatgttgttttgttctgtgatggctttttcaccattgtcacctaaagattctcaagaccaagctactaagacatttcatttggttagtttctgggtgatactgtgctttctgattagacctatttaatttatttttaactctgcaggagagttttcaaccttggaaatgtaagtgaaacacagactcaccctccttctgagaccttgataggggcagaaaggaacaaatctggctagcccccctcacacctggaagtttccctgtctaaacctgggtacaatgagcgtggtgggttttgtcaccttttattttattgctggctcaaggaaaattctttgaaatgaacatctattctatttcagtgtgcaatgttccagccgacttaatgggcttgccttatgcggagaggcagtcctgcaggacagagctaatgtgtggtctcccaggaagctcatcagaacacctcttgtcccttttctttaaaagaaaaaaaatttaaaaagtttttgcttccatctcaatgtccattccattattttgtagctacaataaagaaacatgggcagcagtga

SEQ ID NO: 6970 - DNA, 398 bp, Homo sapiens
tattctgcacttttcatatttattcactgctcactgggtcacacagatgattcacacttgattccaccttcctctggacaactctccctcaaacaacacccctctatcaacttatagggaaaggagattcacttagagaaaacttcttgaattaaagaccagactcagtttcgccaggtaactaatcctggcataccggtgactaggaagtcatcacctaacactctacctagatataaactctcaggaaggaggcaggccggtggggacatttccacagacatttctaaaactgtggcaattgagtatattttacagatacaattttggtagattcccatccagcttaagacatttaaaatgcaattttgttcacacgcatgtgcgcgcacacagac

SEQ ID NO: 6971 - DNA, 6234 bp, Homo sapiens
gggaaccctggcggggaggcctgcgcctcctcaagctccagtccctctggatgggtgagtccctccggtgcctttgtcctgtgtccaacttcctttgtcctctccagaggtctctcctgggcttcaccactggtcatggtcctccaaacagcagctcccaatccccaggacagttcttcaggacactaccccttcctcccaggagacccgcaggtttcagctctcctggggccactgctggaccaagtcctcaattgcttccttgccattatcctctttgaactccctctctctcctctaaaagcccctctggctgcagactccttaattgcgtggctgttcctttccagaagcaggtgcgcctgcctcgggcctcttcggactttccatcacaggccaaaggaaaaccagcgagagcttgcatgacaccgggtccgtattaagacaggcgcaaaacgatccttcctcttctgtgcgccttagggaacgcccgaaggcatgcaaggctggggctcaggggagggtccccgagcgggcagtcagggctgccctcaggccctgggcaaggaggtttccggaggcccctcagttctcgagtgtgtgtgtatgtttttggtggtggtaattgggaagcagggggtcaagacccaggagtgcagagagtgggagagaggatctcctccgcccatcctgggctcctgtcgggcctaacctccacccagcgtcaactttttgctgctcccgttagatggcgcccaagactttctaaccacttgtgaaagtgctcctggcccggaacaaaaagaaccgtggggtgtgagtatgagtgtgtgtgagtgcgagtgcgcgcgcggggctggccacagggcacaggagttgcctggcactacgcgtggccccgtcgcgggtcgggtcgggccggcccagggctggggcgcgctcacgggaggagctgcgcgcggccggcggagaactttcttcttttcccttcgctctccctcttgagcgagcgcctaggccctggccactctcccggagagaagccgggcgacccggccgcgggctcaagcagccagcgccggctgcaagtgaccgcggtgcgcgggcggaaaggggtcccggacgtgcgggtcggagagctgggacgcacacgacagcccctttctctgcccttacttaccggcccagcgctcacagccgctgccctgtttttaagagaatggcgcaggtgcaagtttggttgttgcggttttagccgctccaaggaaattgttcagtgtaaggttacctaagcgtactgcgtgggcgtgtttccagaaacaaagggcaaactttctcgctcccaaagccagtgaagttaaacagactcccttatgaaaaggcccttggggaccctagggcgtcagatgcgacagctaattttaaaataactgtttaacaggtgattagggagcgcgctttctctccaccaccaagttcacctcttctccaaacccctctaaaataagtgacttgacgataggtgatcccattccctagtcctctccttaatgccagtctggaggcgcactgtcaagaagggatgcgtctcctcgcccttgagaaccagcgcggagaccttcttttgtgcctctccttggctgtgaactttcccgcgcggtaggttctcctttaagaaagtagcatccctatgaatatttaatgctgcacgcgggccggcggggcggaggggagcccgcggcctgggtttccgcgcgcgccgagacccgggcgcagagcgagtgcgtccccaccagcctggccgccgcgggaactcggggaccgggagggcgggggttagcgggaggaaagggtaagctgaagaggggctgggaacgggagggaggctcggggcgaacgggccgtcgcgttcatttccataagaaagctgaaatcgcagttggaagcaggatttctcgcccctgcagcccttcccccatacccggttttctgcaagaagcgggctccagagctcagagcccgaagtgtgtgctctggtctttgatgatgttgataaaatgtggtttcaaatgttgtcccgaagaggccggtttcctgtctgtatgtggaatggaaggaccgtgccgggtgagtccagaacgccggggagcggacaggaggagcagggctgaggagagggagggcgcagccggcgggcgcagggcatccctgcaggggaagttctccagggggttttgaaagggggagccaggttgaagccaagtttcccgagcaaggaagagtgtgtgtgtgtgtgtgtctgtgtgtgtgtgttcgggggtggggagcgcgatgagggaagacgtcacgaaagccccagaacccaggcggcccgcgcgtgggaaggtctggcaggtcttgtcacctccctcttcaaagagcgggggaaactttcgctggccgtcgctgaccctcttcctgcgaaggaataaagtgaacttgcccagatactggattccactggcggttcagttgttgagttctttctgcgttcgcattgagcattgagtttctttttgacttgcagtgtgaacagcagccatgtgacctcaattctatatcacatatatatacacacacacctcctaggtactttatgatcccatctggagaaattaaagcccagatctgtaatgtttattcttagatagtttaccaaaagcaggggggaaatgtgtgagacacatgtctgcaaatataacaaaagtactttcccttatgcttgaaaagttgcctgcaaatggctggcttccgtttactgactgcaccacctgtacctctccatgaaactaaatggaatcaggaataaagcaccaatcagatcaagcaattaaataccaattatgactattaatgactttattactaatgactggagttgaggactccaaacccaaatgaggtaatcaagctgttttaaaattctgctacctaatatttttaccgcactccttccccaaaataggaggttaaaaaaaaacaggtaatgttttcaaagagttctccagtaggtattcatggtcaatgttgaacttatttttctcagaaagtttattgctactgctggtaaataatggagtcttcctttctggctctgccaagttacgcaaagtgtaactgatgatggtggttacacaatatatggtacttggtttggatgcagaattgggatggagcaggggtgctttctgtcttcaattactctgataatccggcagaccctagacgattttaaggaacaagtgttttaattcttcagatggggtaatggctattgggatgtttggaaggtgaggaaatgaagaatggggaacccaggcagcaaagagaaagaaggaattgggcctatgttttgaattttctttttgctcatgggttgaaatgcctttagcttgtcataagctaagtgactgaaaagaaaaggttactgagaacggtatattggtgtaaaggctactgtgtagctgggtttatttattactgaagatgatttgccaaccctccttgcctcttgattgacaccccttcttatcccaaatggaagtccctgttcattctgggataggaggaagaggcctggagggaggaagggaataaatttctgctgcagtccatgagaagaaaggagggggcagttagtagggattctttagtcaccatgaagcaggcaggctaggcagctgggcacttggaggagccagcagttcatcttgatgtaggtcatctctgctcattgtcccatagtttagctcttcaggacacaaggagtgtttggaacaatgaacttcaagtccctggcttgggatatttccccttcaccttcctcctaggtagaagcctacagcagcagcagcagcatctggttctgatgtgtttaccgggctggtatggaaatgcccaggctgcatggcagaaacctgagctgctagtgacaagcacactcctctgctaagcagcgaaaagttttgatactttttgagcactgggtggcctcttctcttgatgtgaagccatgagcccccctccccatttctatttgtcagagttaattgccctgcagtggggcagctcacacctcaggcagtgccaagaaatacagcagggaaggaatcctgcacatgtaacaggatggcgtggtattaccttagacacctaggggatcaaaaacctcagtggaatgaaatgggcctggggtattctccctttggtgcctccctagggacaagcctctttggcctggcctagactgtgggcagcttatgtatgatggccctgagtcctgaaggtgaagctagtcactttctgtaagtggacagtcgacccaagaggcagttctaaagaggagagcctgaggtgtccacaacaatttcttttctgttccagggcaccaagaggcaccctgagaactcagaggacccagaggctcccctcaagcaaattccctgctgaccctggacaccccttgaaggagggggcaagaggctgccacaaggctcatcttataactcccagcaaggactcccagcaaacaagttcagcttgggatctgcccaccaccaagcctggctgggaggtgggggggagcgaggggcggtggagaggcagagtccctgaacagggaaaagacaatcagttgttcccctttctggtgtcagaggcaaagaagcctgaagggctggtggtggtgctggctctgggtttattgactctgtgatcctgtccagctgtcctacagggagttccagagctctcccaaagtgcatgaggaactgcacaagtaggactggggcacaataccagaagctatttgtctcctagaacctggcaccccctccacttaccttacaggagacccacatcactcagttcccaggacacctggtgggagagtctggtgagatttggaggcagacttcctctactcacaacttgtttgaaaatggacataaagagaagaacagacactccatcgccccttcagggcctcctttgtgtcacaaaacctatcccctcctagggcacccttgacattcccctaggtgggcctacacattgttcagaacctgtcccctgtaccaaaataaatataaatgagtttgtttctttaaaagaaatattacagctttaaacttttcccagccggaatccacctaatttcatcaaggtctctcgctagcagccataacccaggccaaaagggcttgtccctagggaggcaccaaagggagaataccccaggcccatttcattccactgaggtttttgaacccctaggtgtctaaggtaataccaccaccatccccacctgttttcagttctttctttgtggcttaagattgcatttttggagggtttatgtaatgttgttcacgtcagcaagtctccctgccccaccctcaccccactgtcctatatggaattatagttggaaaccacacacacatagaaaatctttgaagatttttttctgctattcttcctgactagaagagttgacaagacatagacacattcagttgcataaaatacagtagcgtgatcagcctaaatgcatctcatttgcactgtttgtaaccaggggtgggggcttgtgtcactcattgcctccccctcctctgcccaaaccagacccgccagctggaatttcagagcaggccccaaggcagcagccatttgggaagtggaagccctagcccaccccagtccagcaggggtgcggggtggatagagaaggtgtctggaggtctggcctgagggcttggaccaactttggcagacctgggctctgggaggcttggccggtgggtgaccacagctggaagttggaggtctgcagcgatgcttctgagcttctcctgagttgagttcaagaaaggggacaccaagaagtaggggaacagtcactgactatattttacatccacgcctacccctttcccagagttgtgttctcaccacccactttgtcggcggaggagaaacactgctgcctgatgcttgcactgctgcactgttcttgcacctgctcctagccctgaactcgggccctgagctcctcactgccgccccctctgcgctgagccccactcctgagaccgcgaggtgccagagcagcgcctctcccaccaactcctagacgcctgtaggacgtgcgccggagccttcagaacccatgggggtgtgggggtgaagttg

SEQ ID NO: 6972 - DNA, 1857 bp, Homo sapiens
gcagacgtggtagaaagacagtaagagaggaacaactagaagtggagcccgaagatgtgactgaactgctgcaatctcatgataagacttgaatggatgaagagttacttaagtggtttcatgagatggaatctactgctggtgaagttgctgtgaacattgttgaaatgacagcaaaggatttagaatattacataaacttggttgggcagagtttgagaggattgactccaattttgaaagaagttctgctgcgggtaaaatgctgtcacacagcatcacatgctacagagaaatctttcatgaagagtcaatcaatgagacaaacttcattgttgtcttatttcaataaattggcacagccactctagccttcagcaaccactgatcactcagttcagcagccatcaacatcaagacaagaccctctaccagcaaaatgattacaacttgctgaagggctcaggtgatcattagcgttttttagcaataaagtatttttagatataatgctattacatgcataatagactagagtacagtatagtgtaaacctaccttttatgtacactggggaaccaaaaaattgtgtaacttgctttattgtgatacttgctttattgtggtagtctggaacagatcctgcagtatccccaaggtatgcctgtatctcagtatagtcgtgatcataggtcttgcttttctttagattcactgttggtgttatcatccatgaatttcaccttcctgtgtacaaacatctcttattacagtaggagaatatgggagtcagaaaaggaagacatttattgtcattatgaactcagaaatatgttttctagtgatcattgaaacaactgagattgatattttccagccacggcagttttggtgattgaaagcaagatctgttttttaaaaattaaatataagtttgcacattcttccagggaagggcacgggataatttcccttgccattttattttgaaaccagctttgttgtggtggcacgctccatgagatttgctccatgagatttgctccatgttgcaccacacacagtctttgctcctgtgtccttccatagaaaaaaacagtgtggggaaggatttggtttgtcttaccctttaatcttctgctcctacagctctctggtctgatagttcactattttggtaataaagtcagatatagttcaaatcctgtctggtctattatttcgtgaaatttttgaacttttccatgctttggcatcctccaagaactttttcctttctaagttttactgttttaatataaatggactcctatgtgaacacttttagactggagtctaaaagtggcctaataggcttgctatttttagagaaggagaaagttgccttttgttctctctgtgcttttcacctcccacatgttctttagagttttttttcctgttctggtcttagtagtgacagctttctaattccagaggctttttcctgggtctgtttctggctcattttgtctcatactcaaaatttttaatgtcagaattgggctgggctcttctctttctattatctgtaaacattttgggtttcttttcctctaatttatgaaaattatgaaatgtacacataaaggagtggaaaatatattcacccagtttaaagaagagtaataaaatggacattcgtatatacccaccatccaggttgagaaatagaacattgcttgtgtctcagaagctctctgtgttcctctcagtcacgttcccccaccccaactcctacccaaggtaacctctcatcctgaagcttacatggaagatttgggcatttttattaaaaaaaaaaaaaagaaagaaaaa

SEQ ID NO: 6973 - DNA, 11121 bp, Homo sapiens
ttttttcacagagctccttaataagcatttatagtcagtttttggcagcaatagaatcactaaaggcattctgggatgttatggatgaaatcgatgagaagacctgggtacttgagccagaaaaacctccacggagtgcaacagcacgcagaattgcattaggtagggacaaggaggattaagggtttgtttttaggtgttttattttgtattatgaaaataaatctaacaatgacagttggactcagacttctttatatgaagtcaactattaaaattttctagtataaacttttttttggctacacatttaaatgtaaatattttaggtgaaaaggagaagtactgaggtgtttcattataaaaggtgatgatccaatggaggtaacattcagaagtagagtttaattagctgctaattagcacaggaatcgtggaacaggtaactcaaaatttacattacttagaacaagaaaaaagtcagaataatgcagtcttcatttgtgaagcttacaatcttctcagattagtgtgctcagatctgggaatattttctgttagaaatacagaggaagataaaagaacttgcagtagaccatgccactgaagagtaaacagaaagcacagagaaagaatttatagttttaagtattttcttcacaagtatatgaaatttatgaatgagatatggtataatcataaatacctgtgcaatgttatcatgttctcgactataaaatggctgtgtattttcattataagcaagcaaaacatgtgacttcagcctttctcaagattttagataaactatatttaagctcacattaaataccatagctagttttaagatacccatttctttttttctaaatagatatgttgttcaagggtattttgaaattctgatgtgaatcacatccaagttagtgagcaatttttatactttatacctaggtataatatagattatctgggggaagaatgtcacatacgtggtattacgagaagaaagtatagtttacagcagttctacaaatagtattggtactttcctggtttcaaaaagtctaactgtgtttaatttggaacaattaaccaaattatggtatatttgtgaacaagtagatactaagaatgaaaatattttcttcaaagaaatgtagtaaatcattattttcgtggccccattaaagtaattatcaggttatgattaaatatacttactatatttctcattcagcatacatagtctagtttttaattcattccctatttaccttttagcttcttttttctcctccaggcatgatttgctttcttaagaccaagttttgaacaagtgattggaaaaattagttaatatgcccatattacgtgaaagtactgtctggagccattaccagatgacagtgttgagggctaataagaaatttctgttcatagtaaataatgtgttaccaaatgagattataactttttgtatttttatttgtctcattgaatggctagtcatttttttctgttaatgacctctttttgccagatatgcaataactgcatttatgttgatgccagccttagtgaaaggcttattctacagtgtatggaatttatcaagacatttttacgatgaaaatgaaatccaaattgatcttaagcagttacactatgtaccttcaaaaaatagaagtaaaatttctgaaacttacgctgtagtccagtacagttaaaatgtataaaagaacctagtgccaattttcttaggtcttgcgaaattaggttacttattgttttggttattaatgaacaattgccaatgtgaatgaaatcttttgttaaattataagggaaagtttcacatgcagcaaaataatacagaaaatgtttttataaatttttataaaacttgaatctttaatgtttgtttttaccatttactgtattgttggtctttttacatttggccatagttctatgaaatgtaaactttttcaggaaagccatgaaaaataatttagatagttatttcttaaacatgtgacttgtgatagttttgatattaaagacctttatcactccacagaacatttttatttaaactttaatacagttgaccagaattgcaatctaattaaatatatcaatttgttgactggctgaaatttaagatcctttcaatgataatcatatcaaaattacttcttttggttcaattatatttaccattacataaaactacaaaacatttggttaatctttccgtgggtatacagtgaaataggtagccagaccaacacctctttattttttattgggttgtttgatgagctgttctacttctaaaagatttaatcttgtttcattctaggtaataatgtttccataaatatagaggtagaccccaggcatcctactatgcttcctgagtgcttctttcttggagctgaccatggtatgacatctgagatttaaacgttttttaatagagtcataaaatccttgcctagcattgttaaattattagacaatattagtatattaatggtagtttttattttttgtctgagacggagttttgctcttgttgcccagtatgtagtgtaatggcgcgatctcggttcaccgcaataatgatagttattttaaatgacaatgtctcagcattctgaactgtataattttgttttttaacataatacatataattttgattttctaatcaagtagttaagaaacattctgtatcaaatgtggctttagaaaccaagagtagagcatgcaattattaaattttttttttttaatctgaagtggtaaaacccctgggaattaagctgagcaggaacatacatttgtggtaggtaccttggcaatataatttttactttttggtgattttacaaagttcacagcataatttttttccccatgctttcagggatccagaaaatagtgtgttacaaaatttgaaagatgttttagaaattgattttccagctcgtgctatcctggaaaaatctgtaagttttatcagtgttttgatattccagacagtattgcataatgaagtttaaatgcttctctcagtgaaaaatgaggctgaaaaaggagggaattagaaaaatattataacacagacttctgatctgcatcaaaaaacttgtttacctttgattggttgttaagtacaactgtctcttggaacagggggattgatttcagggctgcccatggatacaaaaatccacagacattaaagttccacagttaccctgcaggacccatatatagaagaagtcggccctctgtatacagagatttcacataaacacaggttctgcatcttgtcagtactgtatttttgatctgcatttggttaaaaaaaaaatctgtgtataagtagacctgtgcagttcaaacccatgttgttcaagggtcaactatatacttttttcatggtcttcagtagtgacgtcattaatgacagacatttattaaaaataaggggagaactccaaagtagctaatgagatgtttggcttttctacatagtctgtttatggatggctcaaatactgattagcttgatgtaagtgtttgtgaagcagttatagtttctcaaaattgaatagataccactatactgcaaaaataatagaattgatttttgacaaggctgctaaggttgtagactactaaatggtagtgagtttctttttcctttagttacagaattgtgctgtttagtaatcactagctaatatcaattcctttctttaaatactatcagggacattataacaatgtatgatatgggaatattactgatgcccaaacatcttgccagccaaaaatggaatctctttttttagcctagctgtgtatatttgagtggaaaaggaaacaccctacaatagctttgctaggtgttaaatagtaatgtaattatatttcctataatacagcaatatagtcacctttataaaaactatatttataaaacattcttcctgatcttaccttgtgttttaaacacatagatgatttcgtattctaaagtagttagaagaattgtaatgttcccaacataaaaggtaaatgttgaggtgatgaatatcttaattatcctgatgtcatcattaaacactgtatacatgtatcaaaatatcacacataccctcccaaatatgtacaacgaataagttagtgagacacatacgctttttataaatatttttcttttgaaggattttactatggattgtggaatttgttatgcttatcaacttgacggtaccattcctgatcaagtgtgtgataattctcagtgtggacaacctttccatcaaatatgcttatatgaggtaaaaaataaaaatattgtcaagacttttttccgctaacacaacataggaagtattcctgtttgaaatacacagaatctaaaatctgttgagtcaatagtgatcctctcttttgccattaactccttttaccagtttattccagatgcttatgtgcttcatttcttcatcacagttactaatgagtggagaaatgttctgaagtatccaagggagaaaatctatccagaatatattcatggactagcttattgacacataacaaattaaattgatggtacattggaatctttctataaattccttgttaccacaatgtaagcttcataggtttacccgaggtggaggtggttgaaagtggcagtaatacagtgaaaatgaaattagtactatgtagtatctattacttttcaggctgcatttaagaatagaatatatccaatactactacttttcatgttgagaagaatgccttttgtgatctgagtctcacagcactcaggcaatgccactttacttactgtatgtgaagtctactttcattcctgtctttagtgcctggcttcaccttagggcctagttgatacatgataaactgtgtgtaactatatacagaacaccttgcaattgtatgttgccttcggtttcagtcttccttaatatcacatctttacttttgtgattagaggtagcagttggtgccgtctgtactttgccaatggagaacttaggcagaggcatctatttaccttatataaaatcatgaaattacagaaatacaggtcaaattacagaaatactctaagggaacatgtgatttcttttgtaattatgaatattcatttaatttttaaaaattcactggctcatgcttataatcaatgggttgaaaattaacccactgttagtgattcagaccagaactaagagggaaattttcaagagcctgtagtatctttaacagcaggagttgttaatttgtgattaatggatttagggaaagtctatgaatgccaggaacttagtatgcattatttttatgtatgtctattctggggataaagaaaatgcgtaattcttatcagattcttaaaggggcccataatctggttataaaccagtggtttaggccttcaattccatgttgatttcccttgttactcaacatcttaatagtctgctattggctcaggaaatacatcccttactcttgcaaaacaaaattaagctaagtcttctggaataaaaacataatgcacttaaaaacaaagggaatgacatttggagtatctgtaatttgtaatcatgctgacgcttctcctttatcttttaaaatttgcagtggctgagaggactactaactagtagacagagttttaacatcatatttggtgaatgtccatattgtagtaaggtaagcaaattgttaatcacatctcataaaatgtgcctagctttcagtaatatgttctagaagatagatctatatagtatatcagtttatctaaaacttttgaaactcattctctgtatttctatttttcaaattctctgatcaaaaacattaaactccttttctagatttcctaggtgatctgaaacttcagaagtgttttccaaactgtactatgacactattctatgacactatttctagtacaaagcaattttattttttagagtgtccacaaactttgttaaaatatgttctctttttaaagccaattaccttaaaaatgtctggaaggaaacactgaaataagaatacaacatttcggtgaagagctggaaacttaaaaaattatcaaaaggaattttggtatcatcttcagagaaaaaataaagcaagaaatactaacatcaaaaggacaggtatgatgatgcgataataataaacatctgcgtttgtctcttcactaagagtaaactgggaaattgtaggccaaagtccagttgaactttctaagtctgtgatccccgtgctgactgtggaagtgtatttataccaagatggagatcttgacttcttgaatatatctggactggtaaaatcttgatgaggctcataaaatgagtttgggaattgtgtatagctgattttttgtgggaaactgtttacttcattcaaaggttcttgagactcttgatatttctgtcttctccttgtgctttcctatggaaaaaatacatatatagtttagtttgttagacgtgagttatccaagtatttattttgtgtagtgtgtaagaatgctaaataaaatgttatacaagatcaagtttttgcgtgttatttttcctgagaagtaatttttaggtaaagatcttaaagatttacactttttaagagtttataaacatccaacaagcaaatctggatataatttgagtggttcttttaaaccacgtcagtaggccatctcttaagtaatttataatctaaaaataaataggatagaatatgaaaactgaattttcttggcaaaaccaaaaaattgggcttaatcttaagggggtaagatagccataattagaaatattttggtcattaatgtgattctttctttaccttctgattccatggcaactgagaagtgtccactgtacagtgggcaaaggatgaggctgtacacagccaaagaaaactgcctcaggggtagctatagtgttatgtctcttggaaagctatacagacgaaccagtatagaccgaatagatattaatataaagcaaattaagtggtattaatataaaacaaattaactggttacttatgcaagtttcgggagctacttctatgttttcatcattcctgttggccaaagtcccaggaatcagtttcctgatcaccacttaactggctgaaagtcgagtttttctgctttgctttggtgacatctggcatgccccctcagcaccatttatcaagtaactaacttagaagagaagaaatttataaaacaaagcaaaatactttaagcttgttcactgtccatcattctcagaatagctactaccttctcaacctttaaactgccacccttcaaacaaacagccctcccctttctagatacagagttttggaagtgtcagaaaggagtcctacataaaacaaaggatgttttaaaaactactagctttcctatgaaaaaaaattacttgagagttaaatgactcactttagagttaaataactcattttaaactactctttctgagctaacgaagtcacattaatgcagtttttcataagtttgtcagctttattaactaaagtcaaaataagtgaataattattccagtaggcctataaagcataatacaaataataattatgctatcaaatcatagagcagcatttacatatagctcacatgtgcaaggctgggagatatctccacttaggtaaggatagaagtcaagctactataatttccagaatcatctactgtgtaatctatacacttaatctctcttgaacatcagcaaatgacatcatatggcaaggcactcatcaaagaatttaaccacctgttgtcttcagtacactgagggggtctgattaggatagtctataacaggagttgccaaaatttggcttggctagttgcctgttttgtgaataaagttttattggaacagagccacatcaatttgtttatgtattgtctatgtgggcttttgcactacaatggcattgttgaatagttctgacaaaaactgtatggaaagtaaactgaaaatattttctttctggccttttaagaaaaggtttgctgacccctgctctacggcattattcttcgagtattagaaagcaaacagatcatcataacttgttaaaatgcagatctcattcaaaaggtctaggagtatgacctgagattctgtatttctgagaagctccagatgatgccaatacagctggtctgcacaccccactttgagtagcaaagggctcaaggcaatgcaataatctactgtgatagagcattggttctcagcctgggttgatcctgccccacagaggacatttagcaatttctggagacattttgggttgttacagctaggaggagatactattgacacctagtagataagtactaggaatgatgcgaaacatcctacatcacaggacagcacccccacaacaaataacagctcagctcccaaatgtcaacagtgcagctgtcaagaaaccctacattagaatagttattaactttgaatgcacatcagaatcgactgggaagctatgaaaaatagcaacactacttccactctggccatgaaaatctgataccagacttccccttctgctgtgaaaacccataaataaataatagaaaacaaaattagtcaaaatatgtgaaataacttagggatctaaaacaaagctcaggaagggaaaataacacagacctaagaaaggccacaatttaagatttactgcagactaggccaaaaaagcctgaacagaacttataaaatgatcaggtttagtcaccagtaagttaactgtctgccagaactaacctcaaaactctttaaaggaatgcaataaaatctggagtctaaagaccacagcatccacaatgttcagtatacaataaaactactacaaatgagatgcaggaaatgtgacccataaccaggagaaaaaattaacagagattcagggctgatccagatggtacaattatcaaacaaggactataaaacatctacataaatatgttcaaggaattaaagttgaacataattaatgaacagatatgggggaggtggaatctcaacatacaaagaaatatacttgtggaactgaaaaatacagggtataacatgaaaaattcattggctaggtttaacagctgatttgacaatcaactagaggtcaggcaaaaacaaaacaaaacaaaacaaaacaaaacaaaaaaaacaccaccacccaacctgaggtacagcaacataaaagactgatttaaaaaaatagttatttagctgcctatgaaaaaggtaaagtattctaacatgcatgtatttggaactcagagaaataagagagattaaggcatgaaacaaattgatgaaatcatacaaaacctttccaatttgaagacaaatatcaacccacagataaaagcagctctacgaacccaaagcacaataaacaaaagacagccatccttacaaaaccaaaaataacaagcaaatcttgaaagccacagaaagaaatacattataaatgggccaataagaataactgctaacttcttagcagaaaaaaaaacagacctatgaagatggaaacatcctttttaaagttctgaaagaatagattccatattcaatgaagctttcaaaatcaaagtgaggggcatccagttatagacaagaaagagtaagcatcccaccttattctggtaattaaagagtggacaaaaagcacctatcaaaacactgaaaattctaaaaatgaccctcccttgagtctccacccgccatgtactttagtacctcctattaccccagcctgggccataaaagagcctgcgttctggaaacagcaatatgcacagactggaaaaaaaaaaaaacaaacatgaaaaacatgctctatgtaaccaatagccctgggggaggacaggtctacaggacagaatctttttatacctgctgaaccctaggtgaacaccatgaaagaagctgtaccttacttctctccaggtgctgtggaaacggggcggcggggtgggggggatggtgggggcggtggggaggtggcaagggtggggtgaagagggagggtacagtcctgttgagtatcatcaccctacactaaccagggagcacacctacccttcccccatcaagcactgtggagacaggtagagccctgttgaccgtcctcacactaacaaggtgataccctatcccactgggtgttagggaaattgtgagatagagctctgacaacctttcccagcctgtactactgaggtggtcccccttccttcccaccaggagactaccaaaactgtaaggcagagccatatagcctgttcctccctgcactaacacaagcagatgtggtacctgtcttcctccccaccagacactgtagagaccgtagtagagagctaccaaccttctccaccttgcactgagcaaacatcagagcaacagcaaccctccactctggcctcagaaactggagaggcacttgcccttttgaccgtgcctgctgtgcattaaacagcaaagagttggcatcgcacatctccctaactagaaagctctgttctcagtaattgatataactactagagtgaaaatcagcaggaatataaaataaatcagtaacatcacaagataatgggatctagctgatatttatagactacttcacccccaaacaggaaaatacatgttcttttcaactgcaactggaacattcaaccaggcagaccgtcatatcctatccataaaacaaaccctaacaaatttatattgttagaccataatataattaaactagaaatcaataactgaaaaaaaaatcttcagatacttgggaattaacacatttctaaataaggtattaaaagtctcaaggggaaatatattttgaagtgaacaaaattgaaatgtataaatatttacaggatgcagtacaaacagggtttagcaggacacttatagcatggaatacttacattagaaaaaatagtgggttcaaatcaatagcctaagc

SEQ ID NO: 6974 - DNA, 11119 bp, Homo sapiens
ttttttcacagagctccttaataagcatttatagtcagtttttggcagcaatagaatcactaaaggcattctgggatgttatggatgaaatcgatgagaagacctgggtacttgagccagaaaaacctccacggagtgcaacagcacgcagaattgcattaggtagggacaaggaggattaagggtttgtttttaggtgttttattttgtattatgaaaaatctaacagtgacagttggactcagacttctttatatgaagtcaactattaaaattttctagtataaacttttttttggctacacatttaaatgtaaatattttaggtgaaaaggagaagtactgaggtgtttcattataaaaggtgatgatccaatggaggtaacattcagaagtagagtttaattagctgctaattagcacaggaatcgtggaacaggtaactcaaaatttacattacttagaacaagaaaaaagtcagaataatgcagtcttcatttgtgaagcttacaatcttctcagattagtgtgctcagatctgggaatattttctgttagaaatacagaggaagataaaagaacttgcagtagaccatgccactgaagagtaaacagaaagcacagagaaagaatttatagttttaagtattttcttcacaagtatatgaaatttatgaatgagatatggtataatcataaatacctgtgcaatgttatcatgttctcgactataaaatggctgtgtattttcattataagcaagcaaaacatgtgacttcagcctttctcaagattttagataaactatatttaagctcacattaaataccatagctagttttaagatacccatttctttttttctaaatagatatgttgttcaagggtattttgaaattctgatgtgaatcacatccaagttagtgagcaatttttatactttatacctaggtataatatagattatctgggggaagaatgtcacatacgtggtattacgagaagaaagtatagtttacagcagttctacaaatagtattggtactttcctggtttcaaaaagtctaactgtgtttaatttggaacaattaaccaaattatggtatatttgtgaacaagtagatactaagaatgaaaatattttcttcaaagaaatgtagtaaatcattattttcgtggccccattaaagtaattatcaggttatgattaaatatacttactatatttctcattcagcatacatagtctagtttttaattcattccctatttaccttttagcttcttttttctcctccaggcatgatttgctttcttaagaccaagttttgaacaagtgattggaaaaattagttaatatgcccatattacgtgaaagtactgtctggagccattaccagatgacagtgttgagggctaataagaaatttctgttcatagtaaataaagtgttaccaaatgagattataactttttgtatttttatttgtctcattgaatggctagtcatttttttctgttaatgacctctttttgccagatatgcaataactgcatttatgttgatgccagccttagtgaaaggcttattctacagtgtatggaatttatcaagacatttttacgatgaaaatgaaatccaaattgatcttaagcagttacactatgtaccttcaaaaaatagaagtaaaatttctgaaacttacgctgtagtccagtacagttaaaatgtataaaagaacctagtgccaattttcttaggtcttgcgaaattaggttacttattgttttggttattaatgaacaattgccaatgtgaatgaaatcttttgttaaattataagggaaagtttcacatgcagcaaaataatacagaaaatgtttttataaatttttataaaacttgaatctttaatgtttgtttttaccatttactgtattgttggtctttttacatttggccatagttctatgaaatgtaaactttttcaggaaagccatgaaaaataatttagatagttatttcttaaacatgtgacttgtgatagttttgatattaaagacctttatcactccacagaacatttttatttaaactttaatacagttgaccagaattgcaatctaattaaatatatcaatttgttgactggctgaaatttaagatcctttcaatgataatcatatcaaaattacttcttttggttcaattatatttaccattacataaaactacaaaacatttggttaatctttccgtgggtatacagtgaaataggtagccagaccaacacctctttattttttattgggttgtttgatgagctgttctacttctaaaagatttaatcttgtttcattctaggtaataatgtttccataaatatagaggtagaccccaggcatcctactatgcttcctgagtgcttctttcttggagctgaccatggtatgacatctgagatttaaacgttttttaatagagtcataaaatccttgcctagcattgttaaattattagacaatattagtatattaatggtagtttttattttttgtctgagacggagttttgctcttgttgcccagtatgtagtgtaatggcgcgatctcggttcaccgcaataatgatagttattttaaatgacaatgtctcagcattctgaactgtataattttgttttttaacataatacatataattttgattttctaatcaagtagttaagaaacattctgtatcaaatgtggctttagaaaccaagagtagagcatgcaattattaaattttttttttttaatctgaagtggtaaaacccctgggaattaagctgagcaggaacatacatttgtggtaggtaccttggcaatataatttttactttttggtgattttacaaagttcacagcataatttttttccccatgctttcagggatccagaaaatagtgtgttacaaaatttgaaagatgttttagaaattgattttccagctcgtgctatcctggaaaaatctgtaagttttatcagtgttttgatattccagacagtattgcataatgaagtttaaatgcttctctcagtgaaaaatgaggctgaaaaaggagggaattagaaaaatattataacacagacttctgatctgcatcaaaaaacttgtttacctttgattggttgttaagtacaactgtctcttggaacagggggattgatttcagggctgcccatggatacaaaaatccacagacattaaagttccacagttaccctgcaggacccatatatagaagaagtcggccctctgtatacagagatttcacataaacacaggttctgcatcttgtcagtactgtatttttgatctgcatttggttaaaaaaaaaatctgtgtataagtagacctgtgcagttcaaacccatgttgttcaagggtcaactatatacttttttcatggtcttcagtagtgacgtcattaatgacagacatttattaaaaataaggggagaactccaaagtagctaatgagatgtttggcttttctacatagtctgtttatggatggctcaaatactgattagcttgatgtaagtgtttgtgaagcagttatagtttctcaaaattgaatagataccactatactgcaaaaataatagaattgatttttgacaaggctgctaaggttgtagactactaaatggtagtgagtttctttttcctttagttacagaattgtgctgtttagtaatcactagctaatatcaattcctttctttaaatactatcagggacattataacaatgtatgatatgggaatattactgatgcccaaacaacttgccagccaaaaatggaatctctttttttagcctagctgtgtatatttgagtggaaaaggaaacaccctacaatagctttgctaggtgttaaatagtaatgtaattatatttcctataatacagcaatatagtcacctttataaaaactatatttataaaacattcttcctgatcttaccttgtgttttaaacacatagatgatttcgtattctaaagtagttagaagaattgtaatgttcccaacataaaaggtaaatgttgaggtgatgaatatcttaattatcctgatgtcatcattaaacactgtatacatgtatcaaaatatcacacataccctcccaaatatgtacaacgaataagttagtgagacacatacgctttttataaatatttttcttttgaaggattttactatggattgtggaatttgttatgcttatcaacttgacggtaccattcctgatcaagtgtgtgataattcccagtgtggacaacctttccatcaaatatgcttatatgaggtaaaaaataaaaatattgtcaagacttttttccgctaacacaacataggaagtattcctgtttgaaatacacagaatctaaaatctgttgagtcaatagtgatcctctcttttgccattaactccttttaccagtttattccagatgcttatgtgcttcatttcttcatcacagttactaatgagtggagaaatgttctgaagtatccaagggagaaaatctatccagaatatattcatggactagcttattgacacataacaaattaaattgatggtacattggaatctttctataaattccttgttaccacaatgtaagcttcataggtttacccgaggtggaggtggttgaaagtggcagtaatacagtgaaaatgaaattagtactatgtagtatctattacttttcaggctgcatttaagaatagaatatatccaatactactacttttcatgttgagaagaatgccttttgtgatctgagtctcacagcactcaggcaatgccactttacttactgtatgtgaagtctactttcattcctgtctttagtgcctggcttcaccttagggcctagttgatacatgataaactgtgtgtaactatatacagaacaccttgcaattgtatgttgccttcggtttcagtcttccttaatatcacatctttacttttgtgattagaggtagcagttggtgccgtctgtactttgccaatggagaacttaggcagaggcatctatttaccttatataaaatcatgaaattacagaaatacaggtcaaattacagaaatactctaagggaacatgtgatttcttttgtaattatgaatattcatttaatttttaaaaattcactggctcatgcttataatcaatgggttgaaaattaacccactgttagtgattcagaccagaactaagagggaaattttcaagagcctgtagtatctttaacagcaggagttgttaatttgtgattaatggatttagggaaagtctatgaatgccaggaacttagtatgcattatttttatgtatgtctattctggggataaagaaaatgcgtaattcttatcagattcttaaaggggcccataatctggttataaaccagtggtttaggccttcaattccatgttgatttcccttgttactcaacatcttaatagtctgctattggctcaggaaatacatcccttactcttgcaaaacaaaattaagctaagtcttctggaataaaaacataatgcacttaaaaacaaagggaatgacatttggagtatctgtaatttgtaatcatgctgacgcttctcctttatcttttaaaatttgcagtggctgagaggactactaactagtagacagagttttaacatcatatttggtgaatgtccatattgtagtaaggtaagcaaattgttaatcacatctcataaaatgtgcctagctttcagtaatatgttctagaagatagatctatatagtatatcagtttatctaaaacttttgaaactcattctctgtatttctatttttcaaattctctgatcaaaaacattaaactccttttctagatttcctaggtgatctgaaacttcagaagtgttttccaaactgtactatgacactattctatgacactatttctagtacaaagcaattttattttttagagtgtccacaaactttgttaaaatatgttctctttttaaagccaattaccttaaaaatgtctggaaggaaacactgaaataagaatacaacatttcggtgaagagctggaaacttaaaaaattatcaaaaggaattttggtatcatcttcagagaaaaaataaagcaagaaatactaacatcaaaaggacaggtatgatgatgcgataataataaacatctgcgtttgtctcttcactaagagtaaactgggaaattgtaggccaaagtccagttgaactttctaagtctgtgatccccgtgctgactgtggaagtgtatttataccaagatggagatcttgacttcttgaatatatctggactggtaaaatcttgatgaggctcataaaatgagtttgggaattgtgtatagctgattttttgtgggaaactgtttacttcattcaaaggttcttgagactcttgatatttctgtcttctccttgtgctttcctatggaaaaaatacatatatagtttagtttgttagacgtgagttatccaagtatttattttgtgtagtgtgtaagaatgctaaataaaatgttatacaagatcaagtttttgcgtgttatttttcctgagaagtaatttttaggtaaagatcttaaagatttacactttttaagagtttataaacatccaacaagcaaatctggatataatttgagtggttcttttaaaccacgtcagtaggccatctcttaagtaatttataatctaaaaataaataggatagaatatgaaaactgaattttcttggcaaaaccaaaaaattgggcttaatcttaagggggtaagatagccataattagaaatattttggtcattaatgtgattctttctttaccttctgattccatggcaactgagaagtgtccactgtacagtgggcaaaggatgaggctgtacacagccaaagaaaactgcctcaggggtagctatagtgttatgtctcttggaaagctatacagacgaaccagtatagaccgaatagatattaatataaagcaaattaagtggtattaatataaaacaaattaactggttacttatgcaagtttcgggagctacttctatgttttcatcattcctgttggccaaagtcccaggaatcagtttcctgatcaccacttaactggctgaaagtcgagtttttctgctttgctttggtgacatctggcatgccccctcagcaccatttatcaagtaactaacttagaagagaagaaatttataaaacaaagcaaaatactttaagcttgttcactgtccatcattctcagaatagctactaccttctcaacctttaaactgccacccttcaaacaaacagccctcccctttctagatacagagttttggaagtgtcagaaaggagtcctacataaaacaaaggatgttttaaaaactactagctttcctatgaaaaaaaattacttgagagttaaatgactcactttagagttaaataactcattttaaactactctttctgagctaacgaagtcacattaatgcagtttttcataagtttgtcagctttattaactaaagtcaaaataagtgaataattattccagtgggcctataaagcataatacaaataataattatgctatcaaatcatagtaagagcagcatttacatatagctcacatgtgcaaggctgggagatatctccacttaggtaaggatagaagtcaagctactataatttccagaatcatctactgtgtaatctatacacttaatctctcttgaacatcagcaaatgacatcatatggcaaggcactcatcaaagaatttaaccacctgttgtcttcagtacactgagggggtctgattaggatagtctataacaggagttgccaaaatttggcttggctagttgcctgttttgtgaataaagttttattggaacagagccacatcaatttgtttatgtattgtctatgtgggcttttgcactacaatggcattgttgaatagttctgacaaaaactgtatggaaagtaaactgaaaatattttctttctggccttttaagaaaaggtttgctgacccctgctctacggcattattcttcgagtattagaaagcaaacagatcatcataacttgttaaaatgcagatctcattcaaaaggtctaggagtatgacctgagattctgtatttctgagaagctccagatgatgccaatacagctggtctgcacaccccactttgagtagcaaagggctcaaggcaatgcaataatctactgtgatagagcattggttctcagcctgggttgatcctgccccacagaggacatttagcaatttctggagacattttgggttgttacagctaggaggagatactattgacacctagtagataagtactaggaatgatgcgaaacatcctacatcacaggacagcacccccacaacaaataacagctcagctcccaaatgtcaacagtgcagctgtcaagaaaccctacattagaatagttattaactttgaatgcacatcagaatcgactgggaagctatgaaaaatagcaacactacttccactctggccatgaaaatctgataccagacttccccttctgctgtgaaaacccataaataaataatagaaaacaaaattagtcaaaatatgtgaaataacttagggatctaaaacaaagctcaggaagggaaaataacacagacctaagaaaggccacaatttaagatttactgcagactaggccaaaaaagcctgaacagaacttataaaatgatcaggtttagtcaccagtaagttaactgtctgccagaactaacctcaaaactctttaaaggaatgcaataaaatctggagtctaaagaccacagcatccacaatgttcagtatacaataaaactactacaaatgagatgcaggaaatgtgacccataaccaggagaaaaaattaacagagattcagggctgatccagatggtacaattatcaaacaaggactataaaacatctacataaatatgttcaaggaattaaagttgaacataattaatgaacagatatgggggaggtggaatctcaacatacaaagaaatatacttgtggaactgaaaaatacaaggtataacatgaaaaattcattggctaggtttaacagctgatttgacaatcaactagaggtcaggcaaaaacaacacacaacataacagaacaaccccaccaaaacaccacgagccaacctgaggtacagcaacataggagactgatttaaaaaaatagttatttagctgcctatgaaaaaggtaaagtattctaacatgcatgtatttggaactcagagaaataagagagattaaggcatgaaacaaattgatgaaatcatacaaaacctttccaatttgaagacaaatatcaacccacagataaaagcagctctacgaacccaaagcacaataaacaaaagacagccatccttacaaaaccaaaaataacaagcaaatcttgaaagccacagaaagaaatacattataaatgggccaataagaataactgctaacttcttagcagaaaaaaaaacagacctatgaagatggaaacatcctttttaaagttctgaaagaatagattccatattcaatgaagctttcaaaatcaaagtgaggggcatccagttatagacaagaaagagtaagcatcccaccttattctggtaattaaagagtggacaaaaagcacctatcaaaacactgaaaattctaaaaatgaccctcccttgagtctccacccgccatgtactttagtacctcctattaccccagcctgggccataaaagagcctgcgttctggaaacagcaatatgcacagactggaaaaaaaaaaaacaaacatgaaaaacatgctctatgtaaccaatagccctgggggaggacaggtctacaggacagaatctttttatacctgctgaaccctaggtgaacaccatgaaagaagctgtaccttacttctctccaggtgctgtggaaacggggcggcggggtgggggggatggtgggggcggtggggaggtggcaagggtggggtgaagagggagggtacagtcctgttgagtatcatcaccctacactaaccagggagcacacctacccttcccccatcaagcactgtggagacaggtagagccctgttgaccgtcctcacactaacaaggtgataccctatcccactgggtgttagggaaattgtgagatagagctctgacaacctttcccagcctgtactactgaggtgtcccccttccttcccaccaggagactaccaaaactgtaagcagagccatatagcctgttcctccctgcactaacacaagcagatgtggtacctgtcttcctccccaccagacactgtagagaccgtagtagagagctaccaaccttctccaccttgcattgagcaaacatcagagcaacagcaaccctccactctggcctcagaaactggagaggcacttgcccttttgaccgtgcctgctgtgcattaaacagcaaagagttggcatcgcacatctccctaactagaaagctctgttctcagtaattgatataactactagagtgaaaatcagcaggaatataaaataaatcagtaacatcacaagataatgggatctagctgatatttatagactacttcacccccaaacaggaaaatacatgttcttttcaactgcaactggaacattcaaccaggcagaccgtcatatcctatccataaaacaaaccctaacaaatttatattgttagaccataatataattaaactagaaatcaataactgaaaaaaaaatcttcagatacttgggaattaacacatttctaaataaggtattaaaagtctcaaggggaaatatattttgaagtgaacaaaattgaaatgtataaatatttacaggatgcagtacaaacagggtttagcaggacacttatagcatggaatacttacattagaaaaaatagtgggttcaaatcaatagcctaagc

SEQ ID NO: 6975 - DNA, 274 bp, Homo sapiens
gagccactgcacctggcccactttttaaaaaaatatgtgtagaaggttagaacagttgaatccagcacagtggaactgagcatgaattcatccaagtgtaaaccttgactgaagtgacaaaatgggatgggttttccttaagtattaggtataaaatacatgtttaaggaagtggctagtttcttttcatcttagggtgtatcatattcttaaattattggtgtggccagttatttcagattgaaaacgtttgtagtatgtgactttacatttt

SEQ ID NO: 6976 - DNA, 274 bp, Homo sapiens
gagccactgcacctggcccactttttaaaaaaatatgtgtagaaggttagaacagttgaatccagcacagtggaactgagcatgaattcatccaagtgtaaaccttgactgaagtgacaaaatgggatgggttttccttaagtattaggtataaaatacatgtttaaggaagtagctagtttcttttcatcttagggtgtatcatattcttaaattattggtgtggccagttatttcagattgaaaacgtttgtagtatgtgactttacatttt

SEQ ID NO: 6977 - DNA, 2281 bp, Homo sapiens
cctccctcatgggttgtatttccctaccttcccatacacttctctccctaaggtcttatctaaccatcattctcttcaagttgccatttccattccctacttcccagctatgcacctttctgttccatttggttgacttttatttttttcttctttccagcacatggctttcagttttcctgcctctgctggagttgtcagggttggagccaggagggctttactttttccttttcttctaccaggttagcccggttggtttatgacatctcctcattttcaactctcctcatctcttttcatgtggctttgttggggttggatggctgaggttggctggactgatggttacaaaagaatatgtgagagtattgagggagtgactaaatccctcagggataagagagggaacaggaccttccagaaggttgtgctcttattgtctcagactttgtatatacatgtttatttctgtaaattgctttctccatttggacaaactacaataaccagagtaaaaagctaccaggaatgagttctgttcaaaattacagagatggacattggagtctcagtgagtttgcttgagagttctcggaataatatgaaaatagctttaaaagggacaacaggagagtatgcagagtggagctgcttcttttttttttgatgccgaaattggtttagatagaatgaaactgtctctcttaagattcgaaaaataaaagccaaaacaacccactcatctctcaaatcccggttgagctaaagctacaaatcacattcatttgtaggatacggttgagagatgactctcgagtaatgaaggctcataagcctgggctgtagttagtgtaagaggtaaacaggggccttcttgttttcactcttttggaagctctaattcatttctaattactatctcctggaaaaacaccgtgttgtcattgccttttaaatttctttctcttttcagagaaaacacatattttaggtcattaagaaaaaccttgtcttaatttggatgatgtttttattctacaaaatagaattattatcttgttcgaggcacaatttggtaagaagaagaggctgcatgcattttaatttggcaatgaattaacaataataaagaggatatgacttttccactgttacacagttcagatctacatgcttatgtaggtcagagaagaagcatccttgctatttgaatttttacagggaattggtcaggaggaaaaaataatggcatgtgaaatatcaaaacctttccttaattttcaactcaataacgtgttttgcaattttaaaagtccatgaagaagaagaaaaagaaaaagaaggctttacaattagtaggtgtgaaaaagaaaaaccaatattgttttgtatagacaaggaagcagaatgtggcaaaaattagcttttgttgtttttcatattatgaaatattccccaacacatatgaaagtgtaagtaggcaaaaatttttttctcactcataagctgaggttaccttggttatttttttgaacaacttagtctgttcttatggtaatttggggaaacgtatgaattgatgggataaacttttccttgagattgtgaatgaaaatgggctcaatggagtgccatggtcttcctcagtgcatagcagattctgaagacatcacatacacaaattgtccaccacttctagttccaagagaaggtgtgagaaaaaggggtgaagggaccagcattgcctggcaagatggttgggggagtaatcagctggggagaccaccttagtctggatacagacgagagaggggaccagagaggtctcagactttgccattttacttcttgatttactaatgggctccaagtgtgaactgtaatgtagagagtcaggaagaaggtaggtcttaaatcttgttaaaaaatggatacattcttaaatgcttcagcttgtagagaagagagaagaaattttgattattccttatgcctctattaaaatacctgggaaaaccatttactcaattgatttttaccagctgcatttttgtatgacataggtaaactatatttgttttaacaagtaaagaccaaaaatgctgatcgcaaaaagaaaaatacattattcacaattctacctctaatagacgggtactgttgtgtgtactcgtatacacacgtataatataaaatattatatttgtgtgtgtgtgtgtatgtgcgtgtgtgtgtgcgtgtgtgtattctttcatttggcaaaccaaaaaaaaaaaaa

SEQ ID NO: 6978 - DNA, 3305 bp, Homo sapiens
cagatggagttaactacatccgcactgacgaggaggtaatcatttagtaaacctggaaacctaggtgtacccagcagggaaaacaacattcccccttggaaaccacacgggtctcctgggaagatttctgagtgattgtgcagctcctgagctcctcagccccttcacagtaacacacacacacacacacacacacacacacacactaatgggatttgtgctttgcaagcgctagtgatggtactttttaagaatgattattccatctgtatttagcccatgttagacttactccgtgtttttccctgcttgccaccaggccccttgatggctctaactgtgtgttggctttgcagggcgacttcagacacaagtcatcgtttgtgatctgagacccgcggtgtggctgagagcgcacagagcgcacgtgcacatacctctgctagaaactcctgtcaaggcagcgagagctgatgcactcggacagagctagacactcattcagaagcttttcgttttggccaaagttgaccactactcttcttactctaacaagccacatgaatagaagaattttcctcaagatggacccggtaaatataaccacaaggaagcgaaactgggtgcgttcactgagttgggttcctaatctgtttctggcctgattcccgcatgagtattagggtgatcttaaagagtttgctcacgtaaacgcccgtgctgggccctgtgaagccagcatgttcaccactggtcgttcagcagccacgacagcaccatgtgagatggcgaggtggctggacagcaccagcagcgcatcccggcgggaacccagaaaaggcttcttacacagcagccttacttcatcggcccacagacaccaccgcagtttcttcttaaaggctctgctgatcggtgttgcagtgtccattgtggagaagctttttggatcagcattttgtaaaaacaaccaaaatcaggaaggtaaattggttgctggaagagggatcttgcctgaggaaccctgcttgtccaacagggtgtcaggatttaaggaaaaccttcgtcttaggctaagtctgaaatggtactgaaatatgcttttctatgggtcttgtttattttataaaattttacatctaaatttttgctaaggatgtattttgattattgaaaagaaaatttctatttaaactgtaaatatattgtcatacaatgttaaataacctatttttttaaaaaagttcaacttaaggtagaagttccaagctactagtgttaaattggaaaatatcaataattaagagtattttacccaaggaatcctctcatggaagtttactgtgatgttccttttctcacacaagttttagcctttttcacaagggaactcatactgtctacacatcagaccatagttgcttaggaaacctttaaaaattccagttaagcaatgttgaaatcagtttgcatctcttcaaaagaaacctctcaggttagctttgaactgcctcttcctgagatgactaggacagtctgtacccagaggccacccagaagccctcagatgtacatacacagatgccagtcagctcctggggttgcgccaggcgcccccgctctagctcactgttgcctcgctgtctgccaggaggccctgccatccttgggccctggcagtggctgtgtcccagtgagctttactcacgtggcccttgcttcatccagcacagctctcaggtgggcactgcagggacactggtgtcttccatgtagcgtcccagctttgggctcctgtaacagacctctttttggttatggatggctcacaaaatagggcccccaatgctattttttttttttaagtttgtttaattatttgttaagattgtctaaggccaaaggcaattgcgaaatcaagtctgtcaagtacaataacatttttaaaagaaaatggatcccactgttcctctttgccacagagaaagcacccagacgccacaggctctgtcgcatttcaaaacaaaccatgatggagtggcggccagtccagccttttaaagaacgtcaggtggagcagccaggtgaaaggcctggcggggaggaaagtgaaacgcctgaatcaaaagcagttttctaattttgactttaaatttttcatccgccggagacactgctcccatttgtggggggacattagcaacatcactcagaagcctgtgttcttcaagagcaggtgttctcagcctcacatgccctgccgtgctggactcaggactgaagtgctgtaaagcaaggagctgctgagaaggagcactccactgtgtgcctggagaatggctctcactactcaccttgtctttcagcttccagtgtcttgggttttttatactttgacagcttttttttaattgcatacatgagactgtgttgactttttttagttatgtgaaacactttgccgcaggccgcctggcagaggcaggaaatgctccagcagtggctcagtgctccctggtgtctgctgcatggcatcctggatgcttagcatgcaagttccctccatcattgccaccttggtagagagggatggctccccaccctcagcgttggggattcacgctccagcctccttcttggttgtcatagtgatagggtagccttattgccccctcttcttataccctaaaaccttctacactagtgccatgggaaccaggtctgaaaaagtagagagaagtgaaagtagagtctgggaagtagctgcctataactgagactagacagaaaaggaatactcgtgtattttaagatatgaatgtgactcaagactcgaggccgatacgaggctgtgattctgcctttggatggatgttgctgtacacagatgctacagacttgtactaacacaccgtaatttggcatttgtttaacctcatttataaaagcttcaaaaaaacccaaacattgcttcattctttgttatttgctcttacgttgggtttgtctcttcttcctagcatttcagtggttaggcatgcacactaaaaatgctatcaatcacccatccaccagggaagtcagtgctgggcaggaggtcagcctgtgtgctcaagagcagtgctgcgcctctccgccaccgagcccacctgtgttgcggttcccacttgggatggcagtgggcagatctcagtggcatcccatcccccaaaccaaccaacgcacatcatcactttgtacttttgcttttgtaatactgggattaaaaaacaaaccaactgcatttctttctggatattgttgaa

SEQ ID NO: 6979 - DNA, 7627 bp, Homo sapiens
ttcaagacaatcatcttttttctaatagggaagatttggtttcattcctctaacaaacaaacatgctttatgtaaaattaaaatgattaccaataagagctctgttctaaaaacagaaaaatcctattgactactggaaggctgtatttatgctaaacctttattacttttagaaagctgtacacttttttaaaaaatttgcacttataaataatagaaaaaatattagaatcaaaatttcgtcattacagatgggaaaatatgtactataaggaattcaagttaacagaggcttgatttatataaaagaaagctgcagttttaaagttgtgttccttaaagaccagattatagcttatctgaatgggcttgacactttcaaatggaataaagttacaatattaaacagattagggtaagaaaatctaaatctggcacatctctattatttgacagtgtttaaccaaatacatcataagaatagaaggtgagtgccaggcccctgaggaggagctctcgtgttccacagcaaagcgctgcccaaggactgcgggaagtgatccagctgccttcacacggaggacacgagactgcttcctcaagggctcctgcctgcctggacactggtgggaggcgctgtttagttggctgttttcagaggggtctttcggagggacctcctgctgcaggctggagtgtctttattcctggcgggagaccgcacattccactgctgaggctgtgggggcctagggaaaggacatgtgcagtcattctggaactcagaaaaaccctgacagaaacatccacctcaaaaggaacactgctaaacttacggtttatcaggcagtgataaacataagatgtcatttccttgactccggccttcaattttctctaaaagggagtcaaacaaacacattcagctttcccagaacctcaaaggcagtgcatctatcagcccagaaggacaccaagaacttgcctttggctgacgacggagtccgtggtgtcccgatgtaactgacccctgctccaaacgtgacatcactgatgctctctgcataaagaggagacaccactgagtgaaagccgcgtggtctatcggaggtctctgttctagttgtccgtgggacgtaggcagggtgtccacatcagtgtcccagcggcggccctcagacctccactggaccctgtcccagggcctggcagtgttgagggcccctcctggggatgctcctttccgtctctctgacccccttctctgacccgcagccctcaggcactcggctggcccctgggcctcactgttcacgcctctggcttccctcccgccgtcttccatcattgcccctgtcccggtgaccgccctgtcccacttactacacctcctactgtggctcacccagattccctgaggacacttcaactccttgcctctgcacctccacgcgtgcctgctggtttccagccagtgactggagcatgcgcgctggaaatatggcaccgtgagcagctcctccacatggaatcagcagccaagtcctgtcccttctacctccagtcgccgcctcatcctgtcccgtcgtgccacactgggagcggctcagtccacctcccccctcgcccttgattgttcatggcacctacccgcaatgaaccccctccagtttgccctcaggaacaggagaacacagttgagcagattccaccgcagcttgggtgtgaattctggctcagtgtctcaccagctgtgtgagctgctctgagaccctcaggtttcttcatctcttaagtgggtataaaaacatagctacctcattggggggctgccaggactacatgaggttatccacgttgagtgcttagcatcgtgctggctgcaagggcagtgctcaagagatgttagcagccactgtcatttattagcagtatcatccctgcatcactggagttatgtttcatcaagaagctggtaaatttactgccctgcttcaagacacctcaatcgctgtgttcctaggagagcctgaagtccaccctcagtctcagctggtcccaagctgcctttacagactcacctgttaggctcaggtgcacgcgtgcacaaacacgtccaccctcctgcgtcctcttcctcagcaggccctgtctgcacattatgcttctctgcacccccccccccaccgccccatctgcctacacatgccaccctgtcttggaggcccgggtggtgcagcctcacccctcctgggtggtgcagcctcgcccctcctgggtggtgcagcctcgcccctcctgggtggtgcagcctcgcccctcctgggtggtgctgtacccagtgcataagctgccaccagcacactcccgggaacagcacgggctgggcagctgcttgctggtaccactgaacctgctgcccttctgcaagcacatgcgaggaggcagcttcagagcgctccccgttctccacttggtgtcttgagtatggactgtgtcttcccatttacagttcaaagctcatcagcgcactgcagctgtgtacccgatggctacttgagtgtcactaatagacgatggtagagaattcctcatcactgctagatctgcttattctgtttcggtgaagtctctccttgtgctgtcacatgaaattcccttcctgacacacacactgctcttcctgtttggaagcccatatgcactccaggaaattagtctcccatctttacagaagcccgggtgcgggggctctgacgtcccccatgcactgtgcgtagaatcgaaggcagcagcgtctgtgccacccgaatggtaacagtaacagggacttgctaaaacccccacagattttcagttaaaatcctcgctctgaaaattgactaattttcatttccatttagcaaagccactgtgaattggtgctgaactgggtggcatctttcctgccagctttgaagagctgagacacttcctgacagtctcccccacctaaactaaaagttgccaaaaagaatctggacgtataaaccacagagaaaacagaactgagtgcttttaaactatctaacagttctcccaggaaggggagacctccaggcatttcttcctggttcagtataaagagagacggacagagactgcatcagcaggaatattatgtccaagagcctggagcaagaacaagtactctaccaactcaatgacaccgggcgcctgatttccagcacaaagcgtggctccacacaggcagatgagggcggcatgaaccctccacgccaggctgccctgtggagaaacacgagctgctaggaaacaacccaacactgacatcagggactcaggatgagcacaacgaaaatgagatgcgttctccccgtttcttcagcatatggcacctcactgccaaaatagaagctcttggcactcctgagccaggaacatcgaacacacagcaagctctaacacacagaacatcgcacctgtccacgacgcaggatcccaaattacccactgcctttaatgacaaatgccgtcatgattcggttgtcgtctgagggtgggggtgggataaactcccttcaaagggggacctggatgaaaattacctctaacctgttaactattctaagagatcacagcatcagtgtgacagaaccaaacaagcaagtagctagaatacagcaggtgctccacacacatgagctgactgaagcagtgactaaacgaacggcaggacaccttgctgctctgttaccaggaagagcaccttagcacgctctcatcttcccctgcagtcaggactaggagacaggctggagaaggggcacaagagttgggaccagaaggcctgggctcagcgcccagctctgccctcccagaagtctccgggaggagatctctgacacctcccaggttccaggcactgtggtctgtggaaacagtgaggagtggaatggccagggacgagcggggctggatgcagcttgctgagggcactgtgcacagccgggcgcagagcgaggggcacacagggacacggcggcagggcctagccactactccacagatttaggacaggaagcatttcttcttcctgtaagagttttctcaaaataatggtttttatgaggtttgacacaatatgaagctatcacacaagataataggaaaagaatactcaactctcctaactcacctctgttttgaaatcaaaggaaaagcacaaacagtaggaaaaaacatggaggggaatgagacacaggctccgagcaggggtccccgggtctctggtcttggcagttgcagagcgtgcatggtacctgctggtgctgacgtctgcccgccctgggagcaggcccacccagcagcgcccagtgcacccggacagcccagagacacggagggccgcctccagaaggcaccactgggtcagtcacccaacctacctgtgcctcaacggcattgtctgctccgcgggccactgtggtgtttgactgactgaatgtaacgacactggaacaacatactcggtcagtgctcatggatcaagcgaccgtggtcactgtgaaatactccacctcagcaatgcactcatggttctgaccatcagaactatcctgcaccggaaggagttttactgcgactctagcaaacacatcacgaatgcaggagagactgaggagaagcccacgtgttccgatcagttactcactctcgggggtgctgatggcccgcttggtcacgtgctcaatctcgccattcgactcttgctccaaactgtatgaagacactagaacagaaaaggtgctgctatccagaaatacccccaaacaataacgaagagcaaaacaaccacatgagaaaacatatctgcaagacgtaaagtcaaaatcactagtgtttacaattttcttataaagaggcaattcaggaagaaatacaaataaatgataaacatgagaaaaaatgtccattctcattaggattcaaaaaaataaaagagtctaacttggcataagtgatagaggacagtttgacactatccaaagtttttaaatatccatggcctttgactgctgggaattaatcccaaggattacatacatacaaggctatatgtacaaggatgtttactgtgatagtatttgtatggaaaaattgaaaatcaacatttcaaagaacaggatagtaataaatcagttatttccacagccacaatgctataaagccactgaaagcaaaggttggaaagaaaagttcatggaagctgtctactacatctactacatctgacttaagaatgcagggaaacaggtcataaaacaatgcacgcacagatcacaattccataaacaaaacaaaacacgtgtgtgtaagaggaacagaatagctggaggaaggaatgcctcactgctatgggtgagtttcatatttcactctattttccaaatctcctagaataaatatgcattgttttactacccatgatcctaaaagcccaattaacgttatttgttttaaagataagaaaacacaccgctttgaaaggaataagaagtagcttgttctgtgttttcatctgtaaatgctctactgtgtctggcaccaaacataaggcttaccctgactgcacgttttttctgggcttccagaatttaaagtgaaaggcagcactcctaagctccgactccgatgcctgctctttgactccacggctttcttgacagaattcaggattgcaatggtgctcagggacatgggcctgtggagaacagccacagccgctgactttctcactgcagaccactgcagaggtgacagtgctgcactgtgtccccgcgtgcctcctcaccggcgcatccctcaccaccctcattcaaacctcccagggcacagtgtggagcggggtggcaggccagacaatgacaatgactttcctgcccacgcttgggaatggcagggacgcctctgagaacatcgccacagagaaccagccctgatgtggcctccaggggctctttacctggctttgggcagcaacctctgcaatggccctgtttcaggtgtaggagatgatactgctacatggccagcacttgccctgggtgtgcagggctggctcacggcaggtgacatggcagggttttcttggccagcaggaactggcactgtttctaaacacagggcaacctggtagagaagataaagagtatgtacattctaatactttttaagttttcaaaaacggatatatgatagttgtacatggttgggggtccatatgagattttgatacatgtggacaacgtaatgatcaaatcagggtaattggcatctccatcacctcaaacgtgagtatcttttctttgtgttgggaacattccaattcttctatgtactttgaaatatacagtaaattgttaaactgtaatatctccactgtactgaatactagaacttatttcttctatctaactgtattttggtacccattaaccaacttctcttcatcccccttctcccaccccttcccagcctctggtaatcaccaaaaatccactctctaactccgtgagatcaacctttttggctcacatatatgaatgagaacatacaatctttgtctttctgtgtttggcttatttcacttaatataatgtcttccaagttcatccatgttgcaacagatgacaagatttcactttttatagatgaaaagtactccactgtatatgcaccccattttctttaccattcatccactgatggacatttgtttccaaattttgctattgtgaacagtgctgcaataaacatgggagtgcaggtatgtcttcgacatcctgatttcctttcttttgactatacagtcagcagcgaggctgctgcctcatatggtacctctacttttagttttttggaacctctatactgttctccatagtggctgttctactttccatccctaccaacagtgtacaagccattccctttctccattttaacactttattggaatagaatcttcacgtactatgagcaagtccataagtaatgtactttgaagccatatcaaccctgggtaagttgaatttccttttcagaaacagaatactatgagaaagctgccacttgtagatgctgtggcatgacagaagagaaaaaggagtatgctactttgtgctcattggtctttcctacaagagatctgcctgcattcctcaggacggtgagcaacagctactcctagaaatggccgtgtgccggtctgctctaaagagggagtgctgggggaagatgcggacacactgacacaccctggcagacctaggatctatagtcaccagctactgctgctgccagctcgcttcctgcaccacgtcctcatggaagggaggtctggagcacagtaaatccatcacagacagaaaggcacgagggagtggccaacaagcagcactctcgaggccttcgggctgactaacctctgatgacggagatcttgagaggtgccagacaaacgacagactggtagcagacagcagactggactgtctggtcacagtgcagtgggccccacacctacctgtgccacaggtgccacctcagcacctccagccgtccc

SEQ ID NO: 6980 - DNA, 35764 bp, Homo sapiens; identical to SEQ ID NO: 5220

SEQ ID NO: 6981 - DNA, 386 bp, Homo sapiens; identical to SEQ ID NO: 5221

SEQ ID NO: 6982 - DNA, 437 bp, Homo sapiens; identical to SEQ ID NO: 5222

SEQ ID NO: 6983 - DNA, 2132 bp, Homo sapiens
tgcacattcatgtgcaagttttgtgtgaacctgtgttttcatttcccttgagtatgtttctaggggtggaattactgactcatatggtaactctgtttaactttttgaggaactgctggactgttttccaaattaacattctcattagtagtgtatgaggagtctaatttgtccaaatcctcaccaacgcttgctgttctctgttcttttgattataaccatcctaatgggtatgaattgattctcattgtggctttggtttgcatttccctgatggctaaaggtgtggagtatcttttcatgtgcttattggccatttgtatatcttctttggagaaatgtctatgcaggtcctttgcccattttaaaattgtattatttatctttttataattgagtcgtaagatttctttgtatacagtagtcctcccttatccagaagggaaatgttccaagaccccagtggaagcctgaaaccctggatagtactgaaccctatatatattgtgctttttctcatacatacttacttatgataaagtttataaaccaaaccctgtatatactgttttgtctcatacatacttacctatgatcaagtttataaattaggcataataagagattaacaacaataactaataataataaaggagaacaattataacaatacatcagcattactactcttgcactttgggggcattataaagtaaaataagggttacttgaacatagcactgagatatcacaacagttgatctgataatcagtatggctactgagggcaggtggtgtatacagcatggatgttctggacaaagggatgatttatgattaaggcaggatggaacaggacagtgggagatttcatcatgctattcagaaaagcgcataatttatgaattgtttatttttagacttttttgtgtcatatgtttggattgatacatgatttgcaaatattttctctcaatttgtgggttgtctttttactttcttggtggtgtcttttgaagaacaaaactttttcattttgatgtagtccaatttattattttgtattgttgttgcttgtactttttgtgccatatccaagaaaccattgctttctccaatatcaagaagatatatacctttgtttttttcttagaattttagagctttagcttttaatccattttgagttaatttttatatatgatgtgaaatagggaaaaatactattaatttttgtttattgatcatatcctgtaatctagctaacttcacttagtagatctatttaatagtaattttgggtaaattttttttaagtagacagtcatgtcactgcaagtgactgcagtttaatgttttcattgataatctgtgtgtcttctatttttcttgccatgttgcattggctaggacctctactacaatgaatgggagagtagtgagaggatactcttgtcctgttcctgagcttagggggaaagtattcagtctttcatcaagtctgatgtaaggtatagggtgttttgggaaaaatatatttaccttctctttccctctctgtttcctttcccctacactgccccttggcatttctggagcttttatttctttatgtaggtccaagtttcagtctggtattatattcccatcgactgaagaatttactgtaagttcttaaagtgcctgtctaatattggttgattctcttagcttttatttctctgagaaagtatttcacctttgttttcgaaagataattttcaaaggatatagaattctgggtttataatttttttttctagtagtactttacaaatatcattccattggccaggcatggtggctcacacctgtaatcccaacactctgggaggccgaggtggatggatcacctggggtcaggagtttgagactagcctggccaacaaggcaaaacctcatctctactaaaaatacaaaaattagccaggcgtggtggtacacacctgtaatcccagctacttgggaggctgaggcaggagaacagcttaaacctgggaggtggaggttgcagtgagctgagatagtgccactgcactccagcctcggcaacagaataagactctgtctccaaaaaaaaaaaaaaaaaaaaa

SEQ ID NO: 6984 - DNA, 104 bp, Homo sapiens
tttttgtatttttagtagagaccgggtttcaccatgttagccaggatggtctcgagctcctgacctcgtgatccacccgccttggcctcccaaagtgctgggat

SEQ ID NO: 6985 - DNA, 3128 bp, Homo sapiens
ctttcttaagatctaaggtactttcttaagatctaagaatttgctgaaagcattttcagctttgaaatctccaaatgaaactttaaaatttattttggtttatcccaaaataatggaaaatgtccagttgtgttttgtaaacacctatgtaactcatcttttagtttacacttcctggggaaattgtctttggtgtttagaggagggaatgagaacacaaattggataatccactgtctcccatcccaggaggtggtgagttggctacaagagaaagggacaagtgaggcaggcctagcagttcccttacctgaagttttcaaatccatactgcagttccctctcgtaatgatgtaactttacaactattcttaatgcttgaacatgtatttaggggcaagtttctcatgatgatgaaaaagtatcaagtcatattgctatgttaattggtttttttttttaaaaggtaagttagtgattactgttaatggtgggggagtaagttttcactgtaaattgaacttataatttatgtgcaagtgttttcagtgccctgaatcaaactataaatgtggggagaaatcacctccatcaaacagttgcatatttactgtaaaagtattcccagtatgtgtgcagcatgaagaaagtattagtgcttctcagtgttctcagtgtaaattctatttatatacagcatattcacatactactttccttatattttatatagttctatgactgttgaaacatcaaggagttaaaaaaatcttaatatttcatgattaactctaagtactattaattaatagcttgcgaaatattagcaattttcccattatggactattctctctaaagcaagagagactagcattcccagacatcattctagggtctttaagctcattttgggtctgctaaagtttggggggaaatgttacgcaaagtgatactgtgtatgttgccattttgctttattcttctgttgaagcaaaattgtggggttttattatgtgtgtgtgcttttcctagatgtcccagttagctgtgctgagatatacctgtactatttatggtttaagttttgattcttaggtattttctccagctctgacattgttttccaaagacacactaaactgcattgcacagttcaaaatttgattacttaagggatcaatctaggtggtgttcttggtcttaaatttaacagcaaacacagcacatatctattatcactatattaattttcaaaggtttttctttgacgtttaaaactgtgacaacagatattcacatttgattatagaaacttaatgtctattaataattttagtacaaaatttcataaaccgtgtttttcaaaataagtttatgtcaaatccagcttcccagaaacactaataattaagtacatcaatgtactaaataaatcattcagttgcacccatggggaagattgtgttactgcccttcacagtgaaaaaaagaaaaatctttcatttttaaaattaggagatgttacgtaacttggcactttagtagtgtatacactagcattagtttatacaccacttttgccgctggggaattcaagttgaaatgtccctcaatcatataggtctggaatacatctttcattcataatttctgctcagataattgaatagtttgccatcgagattattttcatttatactataaaacaaaagcaaactagtccagtttaattttttgtacttagaatattgcacattttctatatatgagttattcagattagtatctatgtaggttcagtcagatccaaccatggattcgaggtattatactgtataaccctacaaaatacatagaagtattatttgccttcataatagaacccaagagtctgtttcaatttatgaattcagtatttgcaccgagattttgattcccaaagtttggaaaaaaatgacaaaacaacgagggaagaaggaaccagaccttagtgccacatatttttctcttggggttgtaaggtagtctcctgctttccagaacactttattatatttcacttatagacctgattttctgtgtcaaagtataattctcatgctgaagctgtagcctaaaaagccaaaagaaagttgtcttcattgtacaaacatattcatcactttaacaataagggaacaaaatttagtattcaagctgagtgagaatactgtttcaatgagcatgtccctaagataaaccagaattggcagttaatttaggcgtctagaaaatctcagttcccaccagtaaaattatcctgagtagctaatgcaccttgagaaaaatctggcatactgaataaataacattaacttgggagccaagagctgggtaagccttacctttagactactctgtgactacagaaataaagccagcacttttggaactaataagccttcacttgtcagtatcataaagagtattgcccaactgaactttgctcccactggtttaatagttacttatttctgcctaagcactcaccttccgattttacccaagtatatatataggatagaaaaaaatgcattatatttgagagctacttcgcccaaattacaaaatgagtgtttttagattcaagtgacagtaaaaggatttgttcccttcagtgacttgagtgttttagttatgcataagtatttctagcaaaggaagggtagaaaggaattgaaaattaatttacactagttgctacttgggaataaagggctttttgaggggggtatggatattaaatgttttcgttatatacttatccctattaaaacaggcagttgtttctttgaatatgcctaaataacagtattcttaaaatctgacagacaagtaacatgtcaattacttgatattccttgtctccagtaccacaggccactcttgacatcccatgtttgcctggataaagttcctcatttcaaacagtatacatacttctttgcagttcattatagtaaggcttaacctgtaaacagtatctgatggcccacctataaataaaattcagcattctatttttaataatttgtatgccaccaatttgtattatttgtctcaataaatacttagtcatcaatgcat

SEQ ID NO: 6986 - DNA, 309 bp, Homo sapiens
ctgttttttcagcataatcgaacagcttatgacattgtagcaggaaccattgtggtaaaaagaaaggggtcagatgatgccccccaaaaccctgatttccacacactaagactaaattatgtatcaaggccatcagtatccctgggttacactaattgatgatttagaaattaaagcagtcactccagtgtgatgcaggtgactactctgaaagtattgattatacttgaatgccaaagaacttgtccagaagaaaaacctgttaaattcaagtattaaaatttttagatcaaaaaggcaaatgatttt

SEQ ID NO: 6987 - DNA, 1109 bp, Homo sapiens
tctacaaaaaatacaaaaattagctgggcatggtggtgcgtgcctgaagtcccagctactcgggaagctgaggcagaagaatcacttgaacctgggaggcggaggttgtggtgagccgagatcgcaccactgcactccagcctgggcgacagagcgagactctgcctcaaaaaacaaaacagaacaaaacactcacccatcaacgaatatagactcttctctcatttatcgatgatcctctttttccattttttaagtacttatgtggaagctagtctcccaaaacacaatctttagagagaaaagacatgaacgaactccaaaatatccatttaatcaatcatgtttttggctttggataaagaactttgaaccagtttttttctcaggagctgtcaaatggacacttaattatgacatgagaatgaagaaattattttggaaaaaaaaaatgacctaatttacctatcagtgaaagctttattttctggtgccttttgaaagtatatggagtcatatcattcttctgtttaaaatgttagtttggtttgactttccactttgtcctttctgctcttgtgaagaaaaaaaaaagcattttcgaggaaagaattatgcaatttcttttgttttctgtgtcattatttattgctttttcaatgtgcagccagtggatggttttagttctttcagatgaactgccatttgtgtttcagctcacagttctttgctgggtaaaagaaatactttctgacagtcacctgagccttaaatgtaagtattacatgacatgcattctgtttcttccagagttctgtctgccacacgaaagagaatatttgcttacttgatagaactttggcattttcatcattcttttacttaaccaggcttatggcatgatctctggaacaaagttggaggaaaaaattactccaattgaatgactgatgtatgtaatcaacttcattgggctggagtaaactagtggaaattagagaagtgttttattggggctttctactgtgagttaattaaaaattgtttttatttgggtcattatgtccaggcttgagtaaccagaacttccggattggcctttctttgtt

SEQ ID NO: 6988 - DNA, 318 bp, Homo sapiens
tatttttttttttttttttttttttttgagatggagtcttgctctgtcacccaggctggaatgcagtggcacaatctcagctcactgcaagctcagcctcccaggttcacgccattctcctgcctcagcctcctgagttactgggactacaggcacccgccaccacgcctggctaattttttgtatttttagtagaggcggggtttcaccatgttagccaggatggtctcaatctcctgacctcgtggtccgcccgcctcagcctcccaaagtgctgggattacaggcttgagccaccacgcccggccggtgtgtatt

SEQ ID NO: 6989 - DNA, 34028 bp, Homo sapiens
aaaggaagctgttgaagttattgaagtacctgttgctatattctaagaaattaaaatgtccagaaatctgcctctgtaagtaaccttttaagatcattcatgccactctgtttctttagtcagtaataatgcagcccatgttctatgccttctatagagaatttcatttaaaatgaaaccactgaaaaatgtagaccaccattttatactaaatggtgagtaaaaggtctgattttatcttgaagaatgaaactaaaattctgggaaaacattagcttatagtaactgtaaacatgcatgaattgttataatgaacaaataatggatcaagtgtgaatggataaacaatttttcccacaaaataattcagtatcattatatgacagccttcaatttgacatttgtggcattagctttaagttgttcttttttttgcaaaaatattgataaaaatatatatacattttttcaaggacctctgttaaattctttgatagtcaagttactcttaccctcctcccgaacaaagaatgtcttgcttactgattactgtaaaagtggtagattccctgagctcagtattcctcatccatgcatcaagactacaaaaaagcacaaactcatacatataaaacatggagaatcttataatactgaaggaaagattacgtgttattccttctatacaacattcacaaaaaggcaaaactataaaatacatcacattatccccatgggtcttggggacaaacaaaacctcaaataatgtcaatgcttatgctgcttgctgtgcccagagtagcagagtctctaacccaggagtcttatgtcctttggcaccatccagaagacagtaacagactaacttgtaagtggggtaaaatcaaatcctagatcctacattgtttgccatcatttttataaactttggaaatcttggaatttttgcaaaatctgtagtctcactcatggttcataagccattatggtgagggagacacttgtgaatagggactgattttataagtgatcagtcacaagtatgttttaaagatatttttaaaaattgaaataatcatctagtaaagcacacagaattaaagtgtgtagcttaatgaacttctgcatatggtatacatccatgtcatcatcacccagatcaaaatatggaaaatttctagctccctagaaggctgtctcatgacccttcttagtgctcttctggccttgatggcataggttagttttgcctgtttttgaatgttgtgtagatggaataatgtgtaatctttccctcagaatatatgagaattctccatgttttacacatactagttctttctgtagctgtgaagtattccattttatgaatttattaccagtatttacccactctactgctgatgaatatttgggttccagtttgggactattataaataaagttgttaggaacatgtacttgttttttggtggacacagcactcatttctgttggatatatacctaggaatggaatttctgggtcatagggatctatgtttagcgttagtggatactgttaaacaattttcaaaagtgactggactaatgtatattcctactatcaatatatgagagttccagttctgtattatcatgaacagttaatcttttttttttttttaagtgtagccattctggtaggtaccgagtgagattttactgtggtagtttttgttttctttttgcattcatgtgataactaatgatattgagcccattttctcatccagtggctattttaatgtcctcttttgtgaaggatctgttcagatcttttgactattcactaatttttatgatgaatttttctccttttgtaatgtaagttgagacgtggataacaagtactcgggtagcttgcacataccactttaccagtttgggaagtatagaaaacatttttagaaataatttcatcaaaagtgctaaagttttttagtcattccatatttaaagagttgagtgtggagatttgctcctctcctgtgctagttttactagtaagagttctaggtttttaaaactgacacctattgttctttttgaaaccaatctcttgaagtttagtggcatacccattcaccaaagtcactggccttttctttgtttacattctctttaaactctcccatatgtttaatcttctgcagtaccattgtatctagttctgtctttttaatagtgcattatcagtaactcactatcaggaaactctttcctaacagtgaatgtttcgtaatatttaggtgtttacttactgttcttttcactctgttgcaaactttttttttttagctctttgtgcaaaatcttaaatctgtttctcatctttacctggctaaacctgtatctccagtcatgaccttttcccagtggagtttaccaccatttctactgacaaagctgccttctgaatgtttttaattctgtgggtagaattctcattttatcattatcttagtcaacgtgggtttaaaatttgaaattatctcttaatttcaaggtacagttagtagaaaaatcagtgaccattcattaagtatcatagtgtgtggtatggcacatgcaatggtccaggtgctgaagactacttcttagaaggattttgtactgtatttgggaagttatgatattatttatgacttattaattagtttttattataaatattcagtgaccatagcctcttcagcattgggtggtaaaggaagtcttcacaaaaggggatagattggagctcatcattaagaatgactaagatttctcttggaagacacagatgggcagaggggcagggatttggattggatcagaaggtgtgtatagtggaagagtaatgggcaagattagattaggactagatctagccagtctcttaagtcttggttcgtcttctttctgaatgctaatgattagaattcatgtttgaatagtactgttgagtttgtaaagcttgtgttagatagacattagtactttaatatttctgtgacttaggaaccatcatctctattttacagaaaagttaataggctttgaaaaagtgatactagtaaagaacagaatctggtgggcacagtggctcaagcctataatgccatcaacttgggagactgagtctggtgtgtttcatttccaggcatatttttattctctgatatcatagatatctataaataacaatttttttgttttaagtttgatatagacatccttagaaaggtatatatatttttacaaattgtttttcttactcatttatttgataaatggacactattctaggtccagggcatccagtggttttgagggcagacgagactacctgcatactaacattgcattggggaaaacaaagtaaataaacaaagttgataatgtaatatcagattagggtaaatgctataaaaaatgaacagggtcaggggatagagaatgttgtgagaatgggctgtcatgctattttcaatcaagtggtcagggaattcctctttcaggaggtgacctttgaacaactgaattaatttgagtgagtatgctgcgttaagttacgggagaagagaatttaggggagagaacatcagatgcaaagacctcacatagaaataaccttagaatacttgagaaatggaaagaagttaagtgtggttaaatgcaattaggtaggataatggttaagaaatgagtaaggagaagccaagggcctgatcatgtatgatattgtattcagaattctggtcttgaagctcctgtctttttgcctccctcttccttaactgtctctctgttgctcatacacatactctctcacacatacgtacactaccctatctagccccccattatattctagtgttcatgaatcagtcagccaggcctgtctcttatctagcctaggaaatgctatgttcatgtctgcctatatatatatttttttgtttgtgtgcctttgcctttgacatttcccatctcatctcagacaaccaaaccatggttttacttcctgacccacatggattttatcatacatccttgatgtagatgcaactgaggtcagcccttcttacagttcatttagtacataacactttatactctgtgacctgttagtgacaattatgctttcattctctttgttatatctctctattttaatgtggccagttttgtttgcctaggaaaaatcatcctacatagggctgggcaagacaaggcacaaggcatatccatacataaggaggatatctttacttccctgtacccttccccaccatggttccagcatagaaggctggatagctgccagtagttgatcggcatccagaactgtatctggtactttagtaggctctcagtaagtgtattttgaatgaatcagtttattgactgttgagattaaaccctacttggcataactttttttaaaaagccccatcatggctattcacaatacatgggatgtaacaaagaatcaataattatttgttgagtgtatgtcagttttactttactctgtgtttacattatctttatttactttatgttattgtctgggctttagctgagcacatacattcttttctggaaagatgcaccccagtccagaataatattgatgctagaatttttcaaagacaaagctatagcttttggcaattgtaggcacaagaaaggaagcatcttttgttacaccatttttccaaacgttattcttgttactttagtaggtatttatcgtctgtggttggctgtgcagcgatctgcaggagatcttacacattctttttattctttatttagaaatgggatctcactatgttgctcagactggacgtgattgaactcctgggctcaagtgagtctcccgaataactgggattacaggtgtgtgccactgagcctggtttttaccagcttctatcggtggagtgcctgtcacttccacctgtcatcatcaggagcttcttaatggtgcagaacagtggtttacctggagcaagctcattaaccaatataaaatatcacttaaaataagccgataggaattataaaattagaaactgacccttttaaaatgaatttattctctttaaatttattcaacatacttagttttacaaatagatacttgccattttactggcagttataatgatttatttgagggtttggtacatcttatacaaccgtgaatacaatttgcatctaataatgtgacttcagtagtatcatgatttttgtccaaaccttctcagtctgggaaacatttaaagagaataatgaccttagagaagagctggatttcttttaagacttctattcagatcaggacacaatcacgttcaaaattgacatagcatgtaacatggatttcagtgaagaaaagtacttcagaatcaaattttagaagagtgttttagggtttagtggcctaatcaaagggagtccagaagctatttttggataatacataggaggtagagcaacctggttttgcctctggttatcatttgacattgccagtgtcttacttgttcatattatggggaaggaatcgagtggtcacagaacttttggagaaaatttatcaattttttgtttactttgtaatgcttttctgttcttatttaataaaatatgcctttcgattatattaatttaaatttgtatatattgaattgatttaaactaggatcctttccccctttctctttcaggacttgacccaatgaaagaagcatatggcacttgtgaagataaatgttactcctccctttttaattggaacttctgcttaggacctgtgtatgacgtttcacctgtgatctgttctttcggtagccactgactttgagttacaggaaggtctccgaagatttgtgtcaaatgacgtcaatggccagcttgttttcttttactagtccagcagtaaagcgattgttgggctggaaacaaggtgatgaggaggagaaatgggcagaaaaggcagttgatgctttggtgaagaaactaaaaaagaaaaagggtgccatggaggaactggagaaagccttgagcagtccaggacagccgagtaaatgtgtcactattcccagatctttagatggacgcctgcaggtttctcacagaaaaggcttaccccatgttatatattgtcgtgtttggcgctggccggatttgcagagtcatcatgagctaaagccgttggatatttgtgaatttccttttggatctaagcaaaaagaagtttgtatcaacccataccactataagagagtggagagtccaggtaggtcttattcctgagaagaatttggaaaaacaaaaacaaaaaacctctcttcctgatatgcatgtaactagatttagtaatgaaaaggttgtattagctttgtgtttccatcttaaatattctaatcttggaagggctattggattttgagtttagctttttatatgtaggtgatacaattctcaggtggcttactctaattcattattcactgtaagcacccatatatctactctgccttttcctgtggatgacctgtctctggtttatttaagccctaagctcacctgactggtgggcactagagatgggactggcccccaggcctgggccagtgctctagctagttttctgatcttccctaaggtgggactgatccagttttagaaggatatgtaagatttggggccaggtacggtggctcatgcctgtagtcctggtactttggaaggctgaggcgggaggatcatttgagtccaggaggatcacttgagttcgaggctgcagtaagctatgatctcgcctctgtcctccagcttgggtgacagggcgagatcacatctctaaaaataaatgaatacgatttgggcatgcagaaagataaaggataaagcattgaaggcaccaaggaaaaaacaggggtgaatagctcaattccaccctttcccgtgctgcatctccgtgactcaacagcattgttattacgttaaaaactaatagtaaagggacagccaatgctaacaagggtttggggtaataaccccaactccagggattgcccagtcttgattttgtctcctgtttcttggaggtaaggaaatgtcattcttgaactgggacatgggcaaggtccgctcccactctgtccccagaactgagaactcacctgatgtcagacagcagagcgctgagggggaaaacctgcctaggacagcaggcttccagggtgcgctgccattagagccccagagtggggcggacagggcctcatcccacttcatgccagcaggttctgtggacaaaggtggcaggaagaaaagccccagccaggctgagcaagtagggagtgtgtgtgtgtgtgtgtgtgtgtgtgtgtaaagagagagaaagaccgtttattaatttattaatacagataatattaatagtattaatattaatatagatattatatattaatatttattaatgtagataataaacagagccagagagaatgaaagaggaggtgggggtggggggtccactcctctccccaaccaaaccaacctgcggtaagggcagagggaggaaaagacacagggcactgtctgtgtgtgtgttgagtggggggtccctcacatttgagatttatcttttatttctctgtgactgaagctgagccacttccgatttgtatcaggaggaaatgtgctgcttatgcattcgtaattagacccaggtaattcactctttaataatcagcaggcttctcccaccagcccactaaacctccccctcctgcctgctcgtttctattttcatccctgtcccctcccaggtggggatcccttaaagaggcccggctggtttgttatccttttcctttctttccaaatggtcctactggggccctcgcgggccggcctttcccttcattgtgattcagagtgaggttctgaaccagggctctaaggaaccagagaagccgattatgggaaagggcattgtttgaggagctccgatggcgagcaagcccagcccactctccctctggctcagcagagcccagccggaccctcccaccgcggggaggagaccatcaccaggaagccaaaaatgatgagagggttctcttcctcctgtctctcaagtgggcacagggaggatagaaaattgtcctttgagatgttattgccgctgtcattgtgaataaaggcctagggctccaggactcccaactgagtacactgcctcggtcccctccagcccccagcccacctctcatccagtgcccaggcctctgcagaggggactgaagggagcaagatggatgaggcacttaaggaatgagggcccaggagacaggggagaaaaattaaaatgtaaattacttttgctgttttgttttatactgtttctttaaaaatattattctcattacaaaagtaaaccatggtcactggagaaatttccaaaaacctcagcattcagaaaagaagaaaatgaaaatcactcttaatccagccacctagagataattactaggaggtatttgcttgtggttctctttacatatttatataaatcttaatccacaaactcaagtgggtaagaaatgaaagattactagtcagtctctgttaggagccccctgtccctcattcctcagaggtggtagaaatctcagctcagttctgagtcccacagttctgagtcccacacccactttactgaccctgtgataaattctgcaggcttaaagcaggcaatcatcccacccacagccctctctgccttcactgacgtccaccaaacctctgttgtctatctgcttcctaaacgtcagtcctgtgggtcgctgctgcatggaacctcattcccatcaaaaagacagcctcagaacgcctgcttgcctctttcatgcccttctcagagcactgactcagaagcccttctgtctccaaatcattttggagctggaggcagcttgctgtggcccctcatcacttcatgtacactgaggtgaacttgcaggcatgtatgaggtgagcttgcaggaatgatcttagggcttctgcctccttagggctccttaagaaaggtatttaccatctccctctgcaccccaatcccccgaactatctggtcttctgtcatctctctcaaggcagaacactcctctaccccctctcagagacctactcacatctaaggtctccttgtgtccccatgaactctcttctcctcacctcctgctctaccctgccccaagatcagggatattcttttctaacttcagagatgggaaaatgtgctcttatgcaggattgccatataaagttgagcagtgtgtgcactgcacaacagggaagtttaacatgcccagggaaatggcacctttttataatttgcccaaaggtaccatgtgtgtgagccacaatgctgcccttactcatcatgtcttgttccaaacctatacctgggccaagattttgaaactcaaaagccaataatttgactcttttgttagccgagttctgcaatgtcctcccttccctgaagcaattaatattgagcagtctggctgctgtctggctgcaaggaaggaccacaggagtcaggaaatgcagggggatgccttggttaatacttgacaatagcatgcccaaatgtatatgcccatttgcagctccaaatgctaggttcaaatctttggggttggggggcaaaacttgaatttttaaaagcatgccaagtaattctgaaggggttgggagagaattcccatgaaaagaaatcaagaccagtccctggaggactgctgtccccagcccttcagctcccattggggagctgtgggtgaggctgcttttctcgcctggatgggtgaattcaagggtgggagggccaaggctggatggcggcttttcatatcttaaaatgccctgagcaacctcgagtatcttcttgttttccctgtttggttccagctaagatgttgagaccatccacttactagtgaagcccagcaccacttctgggaggagtgtcatcttaaaggctttctccaagaaggggccagatgactccaagccatccagtctacttctcccatccacaggcagctcaaaagcagcctcctagtgggagggggtgggagaagccccttccccagcagaactggggtacagagtaccccatatgcctccccaaaggaaggcttcaggatggagacaacctcatgtctgacctgggagcctgagaggagcatgttgaatttctattgcctcagcataaaatggcaatgctaatgtagtttccaatttaggttttaaaatgccactttaaaggacagcttcagttctctcacttaaaactttttaaaaataatcacatttcctcatgaatcaggacatgtgcatatttgtcccttcttccccatcaaggactcacagagcataaggcatcctcttccacagactttagatgaccactgtgcacctcttctttggacagggggctttctctgccccaaccccacatccatagccccttctgcctgggtccactgagcaaccagtgacacttctgccacactgcgtgagagacttgctgcccagtgacagagggggagggaggactgggaaagaaataagagctgcccaggcagcagccaagggcaacgtttgaagcagggggtgcttggttgtagcgagggacttatccagacaagagaatggagatccctcgtagttttatcaaaaagaaaccaggtagttgggttttcttttagaactttgggaggaaaagaaaacataatttcacaccctgaagaaatatgtgcctgaattttgtaaacttggattttcttcctcttcctaattaagggtagaagtcctccctaccctttcagtgcatgtggggggcagggatgggcataaagagtgaacgttgtccaaaggatgtctctcctatcccaggctcccattaatctgggaagcaacctcaggatttgtgcccaggaagacagagcccctcataggaaagagctttctctagagaactggatttgtagggttgacctggtgtttggggagggatggggtgagtaggagggggtgcctgtctttgcagggccaggagtaatcccctgagagggaagtcaggcttctagctgcccacctaggtccccagctcaggagcagaatctacaggcaaagagctcaagcctgcatgacctgttgccggctctcctagccccagtccttcatgggctggcccaaactgctgactcctaagaatgcagagagctaaagcctacacctcctgctgcccgctctcccagcttcagcccgccgcaggctggcccagaccgctgactcctgaggatgcagagagaaggcaggttcccagtcctagagcttattgctgactcagaccaagtctttctagctggtcctgccctcagccatgggtaggggttacaagtcaacggggccattccctgacctcccaaccggcctgctcctgaaccctaggaaggtagatcccaatggcccttccctgtccttcctttgtggccaaaagccaatctggatagttttgttttgttttgtttcatattttgaatctttgtcagatttttaaacttttcaattcattttgattccatttttcattctaaataaatattcactttaaaacctaattatttgctctttctcagagagatcccccaagatgtaaaagttccagattccaaaaaacctagaaccacccttaaggatggaccacgaggtgagtgaaaggcaagaggctgctatagtctcagtgtccagcaatggggctctgagcctgggcagtagccagccctgtggaaatattgatggcaaggagagggagaaggcccagcagagacgacagcccaggacacacgtgggcctgacattgctgaccacagacatgaagctctagccacaaggggggggtctgcttgacaccctgggctcccacttcagcccagactcagaggcctaaccccaagaatgaggttcactcattcactcttaccctgggaagactgaatatgaagcacacagttaagaccaacagtaatcaggtgaggactgcctgggtctcttccactaaagagagggcaaaaaggcagggttagttgggaccaaaggctgggagagggggcttcctcggagggctgagtcttgctgggacttcaaccctggcacccgccccttcctctaggatctgacagccttttgcaaaggctcaccagccccaacctcagcagaggaaagacgactccatgcttggctagcaagggcaacagtgccaccagcttcatatgtcccacctggcagggggctcctaacaggtgaggtttgcttaggaattccttacggcctgactgagacactttcagcttgaggctcttcttaccgaatcctttcttccctctctcctctcaggggtcagagcagtactgtgacctgaagctctccctgctgcctcttcttcgtgccccttttttacccatcacagctatttcccctaatacatcttctgcatgtgcttcttggaggacctgagatgacactgagccagactgaatttttcttcttgccataatcagaataattaaataagattaaaagacagaaactttgtcgttgtgtgattcatgatgtttaatgctgtgcccatgcactacttaaagtaatatggcatcccacttgaagtattcttgccaaattttagaaaatgcaatcctagacaaaatcaaactttttctgatggagttcttttgccctggcctcactaccaagtcccagaccttttcatgaagcagtcctgcatcagtgccacagatgagtcggggcctctgaagtgactaaacacacctgctccctgccttgctacctgtctccatttctgggactaaggcactctttctggctcccagtctctccataagtataaccacaaaggccaggcaccctatcctggaagcctagggacagggacgtgaggatgttagccagaccaccaggggcccctgagcctggcaactgatcccaaacaacagtcctgttcccagtctttggccatatactggctctatcccagctttagcctccttgccagtacttggccagagtgatggctcatcccttagcatgcagtgaccccaccgtgaccccatccaacacacctagttgagcccaggcagcaggaggaatgtggtttcaccaccatgcaaacctctgcctttcccagagaaagcaagatgattgggtccagggggtgactatcagtctatcaatcccaggatcctgcaagccttgggtcgccataacctgcttggcttgaggttataccactaaagggacctggagaggcagatgaggtcacatgtcattgggaccatagaaaaaaatgttgaggtgctaaccaatgagtggtgagacctgattcaaaaataaatggcacaacattcaccagcctggtgaatcttgaaactgactccatcccatcatctgatctgaccagagaccagcaagctgacaggaccacgggacagaactggagacaccctttctgggataggagacaaagccctttcagagctctctccttgcagaatcatttctccctcacaccccatcgtctctccagttaccccactccactaaccaaactgcagccattttgaaagccctggcaagaccattctccaagcctcctacaggttattctcattaggaaagctgcttcattccagagtctgggcttgggctacttgctatttacttcttaaaatggttattgtaggctgggcatggtggctcacacctgtaatcctagcacttatagaggcggaggcaggcgaatcacctgaggtcaggagttcaagaccagcctgacaaatatggtgaaaccccatctctactaaaaatacaaaaaaattagctgggtatggtggctggtgcctgtaatcccggctacttgggaggctgaggcaggagaattgctttgaacccgggaggcgaaggttgcagtgagccgagatcgtgccactgcactctagcctgggcgacagagcgggactccatctccaaaaaacaaaaaatggtcattctaaaatgtaaccttaaagtcaccaaccactatggttgccaaagtcatctaaaacgagcaaacagaaagccactaacaggggcaatgatttaaaaaacaaacaaaacagttttgcaagcaagggcatcatcagcattcacagaggaagtggccatcccattctccagcagactaacacccacacagggaaaacccacaccagccaatcttcaattgtctgaactccaatcttcagacagcaatttttcacctttgatcttcacccccagcttctgcgtgacgctgagtagtttaataataattcccttggcgtgtggaagaaacagaaatagctccaccaggcaccacaggcctgcgcagcacagtttatgaaatcctggggctctaatgctcccagtctcctaagtttccattaaacagctgccaaatggctctcgctggcaggaaaggcacccttgcctcgcctcccttggtttctccgcagacaggtcaggagggaagaaacatgtgtcactcaacaactacgtaatgggaaagaggttgccctgaggtccccccctgtgacctctgcctgtcaaagccaacctctaagcccctttttataatcttttccaaagacttaaatgtatgggtacacaaagctcccttaatggaaggtcgctctggcttgtataaagagctgtgtaaacttcatctctgcatttactcagtaccagccttgtttaatttcctgcccggggatgtgcagggaacgtgactgccctctcagggccctgaacatctttcagaaaagaaacagtaccctccctacttcagggccccccaaaaagcaagacacctcctccaactgtactaaaagggaaggcagtttgaccacatgctctctgttgagtttctctttagaaaaggcagcttcagactgagtggacaagcacagaccacagctggagggtcccctacaccataaccagctatgtgatcttggcaagtgacaccacttcctggggttctggctttctcctttagaaaatgaggggatagatgtgcctatcacaggttgctgtgcggagaaagatgaatgctaagcccccgcctagtgctcagcttgtggtaagagggccaggaatggtagctactagaatcattctgccatggcagaaggttcattatagtggctaagtgcatggactctggagccccacttcccacatccgagctccagcttcttcattcacaggtgggagaccttgcatgtgtcatttctataaaatgccgcatgggaacagcagcagctgtggggaaggaatgagcagtgttggggacatcaggttcaaagatttccctgcccaccaccactaccatccctgtttcaccaccatccccgtcctgccactatgaccagcgaagctgcagagaccttccatccacaccaaaccctttgcagacaccctgctccacaccatttcctggataatcacagcctgtttccagaggaggaccagaaaacacttatttaccattgcccctcattttatagcccaaaaggctgaggcctgccccagattccacttacagcctcccaaatgagctgccttgtgtcagtaagcccccctcctgggttcatacctggggttatggtggacctgagagaaagtgggggaggtaggccatgccacttcccatatagatcccaggaggaaattccaggccaaatcccaaactgagctacccaagtcccgcattcatgccttcccaggacccaggaagttactgacagcaggagcgtcacctccatcccaaccccctccatccaactcatgagctgagtctccccctggctgaaagtcctggtgaggaggcctgttctggcttcacataatgttctctagcgtgctgctggccgagaaaaatgctgtctgaaacaggtcaggtcttcagagaaagggactccccccatctcctgagtggcccactgccactgctgctgctatatcactgatacatggtggctgtcctgtgctaacacggataagccctggcccctctcagagccaactctgccatctggaaaatgaggcattgatggcagccatgtggaggggctcagcatcctgcaccctggaagcagaccaggcagccctctaggaccaaggggggctctgtctgggatggtgattggtagatggggcagtgctgaatactgtcaagccctgctaaaacccccacaggtccatctatgggactaagtgaaaaacacccaagagggcatttttgtacctcatttggcaaacactgtagagtcaggacttggaaccacagtttcaacttcgacaaagagctcacggaggtgattctgccgggctgagcagggatttgtgggtatgagctctggccaaggtctgccttgcacaccctgattgttcttgttatgctggtggccaggcatgaggtgcagtgggaagagagaataactaactcatctttctactggctctctcagccaatgtcaccaagctctccccatgtattgcacccctgaatgggagatgaggaaaagaggagaaagacatggatgtgaacttggttgaccctttgagggtctctgacaaatgagcagacaacagggctgggactagggtgaggggtgaggcatctaggggcaaaactgaaggagacacctactcccaaccctgcacttgcagactctgagagcgagtgtctcattcagtattgtgctctagacttctcacccacctccccctaattctggccctgaaagaaaatgacaggccagaggtgaggggtgggtgcttgttgagaagtgcaggggctgtggtggtccagggtggttgttcccactctagtctgggggtcctggaagactttgcagaggaagtgagcagttcagactcctgggaaaggagacacctccccactcaatccaactgattgcacacctctgtcctggccacctcgcctttccagacctgccaagggcaggggggcaactgccagcgccatgtcctccttttgcccctctgtgcccaggcagaataggcaaaagggagctgaacattcttgcacacggtgcgggatgcacacagaccggcaggacgcagccggagaggacacggggcccacagaatcagtcctggcttgaacatgcttgtctgggagcgcgtctgcacacccttggaggtggtgtgcccggcctgcgctacccagcagccagtgggcactcggaacaaaccaggccatgcctggagggagcctgtcaaggaggataatgaacgcaggtgtgcacgctcagctgagctttgtctctgagttggtttgcttacctcaacggtttgtccctgtttggcgtgtggctctgttcataggtctgtaactgtgtctttgcccgtcagtcttcctgtgaccctgtgcttttctctctttctctctctctctctgtccctgtctctgtccctctgtccctgagtgatgtgaggccgggctgggggcagtcgcagccgcgtcctctcttgccctcattggttcgcagccgctcccccgggcagccgccgccagtcccgcccctcccccgaacccccgcccgggacacgagcgcgctcagagccgccagaaagctcagtctcctgctcaaaacaggagcgcagcagccggagggagtggggacaagctcgctgaacactgggcgtctcgacagggaccagagcctgcaggactgttccgagacgctgcggtggcggcggcgccggaggacgcggaggactccctggccacccgccctccgtgcgctctgccaccgggcgctcagcagagaccccgggctgcggctgcacttgctgagtgcctctccccgccgccgcagcccagaggcgcccagcacctggagctcactggagctgagggtccgagctgagcgggctgttgtaaagccgaaaggcgagtcagtgactgggacctctgtcctggtggcgacggagagaaacagtgagcccgaggggcgcgggcacagaactgtccagctccgagaactggggtccgccagccggcggggaaagcagctgagcgcggaggcgagtgagcggacgcgtcccggggtctttgcagtccccgccggccccaaggcaccgactctcggtcagttgggcgcggcagggcgggaggggcgcgccatggaggcgccgggtcgcgccagtatgctccaggccaagtgaagcggtccggctggggtcggcgggacccgcgggccatgtacggcgacatattcaacgccacgggcggccccgaggcggcggtaggcagcgcgctggccccaggagccacggtcaaggcagaaggcgctttgccgctggagctggccactgcgcgcggtatgagggacggcgcggccacaaagcccgacctgcccacctacctgctgctcttcttcctgctgctgctctcggtggcgctcgtcgtcctcttcatcggttgccagctgcgccattcggccttcgccgcgctgccccacgaccgctcgctgcgcgacgcccgcgcgccctggaagacgcggccggtgtagcttgggactgagccacggccgccgggcgccccgtcccgacctagccaagagcagccagcttgagcctggtagggagggcacgacaccggggatcgctggcccctgggaacacggtgccctgacccaaagacccttcctgaactagagtggcaacccgagaggaaagggagaccgaggcgtcgggagcctgtgtagggtctcgatcccagtacctgtaggtaccgtgattctgatcccctggccaaatctttcttcctctggacagagggtccagtcgggaaaccttcccgaaagacggcggtcgggtcgggaaaccttcctgaaagacggcgcgccagcccgtcttgcttgctcgccgcctgctgacttccttactttgcacacggaaggggcaggaaccgcaagcgtgcaactagcctggagctacccgtctggactcgcaggccctgtggctgtttcccacagctgctacggcctctcttgctccttgacaccgaggaggaccccactaggatccgagcgtcgtgaactcacctgaactttggaaggttggcactggggggccgcatccccctgggaaatgactgaacgcggggtttcagtgggtcccgcctgggtctaaggacccagtttcttctgtgagcacgggcagtgggaggccggtggaaaggcgcaggggcccacctacgcgtctcacatcttcaggggcgcatttctacaataaaaactcacccaattagacctagcgctgagaacgtgctggtaattgtttgcgccgctttggaaaaggggataagggtagatcgatcccgagcaggagacccaagcgagagacacctccccgcccaggacattttgatgatactacctcctcttcggctttttcccagggtcggtcaattacttccttggggaagtttttttttcaggatggtctccagggaaaattgctgcctgacctgctgaataaattcccattaacagggctcctggggaccctttctgcagggcagttccttccacctggcatcttcccttttgctctgagctttcctgggcctgaagcccctgaagagccctatctggaccagaaccgtctggtgaaggaagagcctgaagatcaggtggtggggcagctgcccagcacttcctcccaaaggagatgggggcctgccctggagaacctggcaggagggaaatggatgcataaacccagttaaggggaaatcaacttcaaagaacttgagagggactaggaaggcttgtaataaccttaaccaaagttaacccaattctagggagtctttttacggggctttaaaatagtttcaggagtcacctggctcaatggagcactagagcttagagaaggtttgactgaaaaagaatttgacagactgtctaatccagtcattctaacacatgctagggtcacttgggcttttggcaatctttagaaaactaaggactcttggccctggccaaatgcatacaggcacaaaattctgcaacaattctatgagttctgacactgaaactggttcctgagaccagactgaggttgaggaagagagactggccagggctcctgaggcccagcccagcccagcccagcccaccacttctcctcagtcagtatccaagattccctcctggcttctatcccaggaagcactggagacgaagcatagaaaccagaaaagcctccctgggcttgattcttcacgccttccagaactaatacccaccaggtcctaacgatgccaattctatgatcacctcacacagcatttcagtttagtcttcagaaaggtagccaaacctctgcagcctataataaaggtaacccaagctaatctgcatgaaccttggactagacggaaataaatgtgagaaatatgagggcccctggctagcatacaaaatcacatgctgctgaaatgggggacccttcagccttggtctgagggcttctgagggggtagggggacccttcagccttggtctgagggcttgtgacaggtaggagactaatgtagaggcagagtatctctccaccacatgtcctgatggccagatctgaaggtagtatgcagagtggtcaaacgtacaagctctggagttcaaatgcctggctttaaatcccagctccacctctcactagctgtatggccttgtgcaaataacctatctgagcctatttcctcatctgcaaaatgggcattatatcaactagctctacaagtttgaataatagagtataaccaaagttattataaccaataacaacatgctagcaataatgcttgcagaaaatgagcgtccaaactatagctatttgtaaaactgagctataggcgtgaagcagcactgctgctgcgaggagaccccaccaacaggatgtgctctcactacggcccactgtctcctgtgaccacaaacaaatgcaaggactggttccttcatgggagaacatgagtagatgactggcttaggattcacctgtagttcctgggccagaatcagctcaagccagagtaatccaggaggcttttgggctctctctgatgtctctacagggttgcagtggcctcagccacttaagccaaaggcttggccacttcaaatgaatagacactttgggaataagtttctgggtaattgagcctgcatagacctggaatctagaaagcacacagggtcagtaaaggtattatctgccagcactgtgaacccgagtaacttggttctcttttctaggatagtattagactgaggggtaatgggttcttcctcatgttgaacccagccccagactctcttctgggaagcagggatgtggctgaattcagatctgtcctctacaatatttagaataagtggactacaacatggtgattggatatttaggtggtgttaaaattgaatgcatatgtcttcccaaaattcatatgttgaagccctaacccccagagtggctgtatttagagtaagaaagtaaagttatatgaaatcataagggtggagccctgttctgataggattagtgtccttgtgggaccacagattgctctcaactctggccaggcgcaggcacggagaaaaggccatgtgaggacacggtgagaagatggttatctgcaaactaggaagagggccctcactagaaaccgactcagccggaactcgaatcttggaggacttctagcttacggaactgtgagaaaataaatttctgtttaagccacccagtctatggaagcagcccaaactaagagagatgactgtctgggtgtagacctgtgcatacacatcctcctgccctttgccctcccaccagttccaagatgtcttgaaaccacctttggagagcagggcatggcaggctaaaaacaggaatagggcccatgtcacaggtgtttgggttcctctgctataaccagccacagtgagcagccagaagggttgaggttaacgcatttttgttggtgggggttgggggagaggctggagatcacggtggggaggtagctgcagatgctaggagtcaaggagaggtagcatagtggtgaccaagagtctgagttctggagccaatgacctgagcttgatcatccactccatgccttcatcgttatttctgtatttctgatagcccgtttcatcatctgtagaatagagatgacaataccttcttcaaaggattttcaatatggagtgaaacattatcagtaaagtgttcagctcatgtttgctatgtagtaaatgccctgaatgtgagctatcattattaaccaggatggccatttcagaagtgcatgcagtggtacaaactactttttgtcagtgacctgtcctttttcagccatgtgctatcaggaaacagtaaagaggtctgtacttcccaacaggtatgcccagagttggaggacagctattctgggtcttttctcactttgcaccttccccctaaactatctcattcgctctcatggcttcagttgcttttcagatgactctctccacactatccctgagcccactcaacacctccatttgggtatctcatgggaaacttcgaactcaacaagcctaaaactcatctgtctaaattagatcctccttcagtcttcatctgaatagactgcaccagcgtatggctgcccaaagtaaaaaatgcatggtggtcattcttgaccctaaactcttcctcatccttcaatatgtaactcatcaccccctaggcaccactctactccatctactcctgtctatgtccaccatcacaaccctaactcaaagccctacttccatttttgtctctcctcactcaataaacacatctgccgccagccccagcatatacaccaatggcttctctttgctctcaggattaaacacaaaagcctaataaggaccagaatcaactggtcccaccagcctcatcttctctcactcctcttacactccagtggcctttcaatccctacctctgcctaagctgtttgtttctcctccttcctctggctgatgccttctcatccttcaggtctccagttaaatgtttcttcctcaaaaaggacttgcctaaatcctcaggtaagattaatcctctcatgaccccatattgcctccccaatcacagctactaaataactgcataattagtagcccaatgcttcttcccactagtaacatgtaagttgtatgaacagagaacagggacaacatgtgtcctgttcactgctgtttcccaatgcctagcatagttttaaacagaaaataggcaataaatatttattgaatgaaatacagagggaaaacagagctaaagtaaatttaaaaggtgtatttacatcggagcacatatcctttgattttccaccttaaactaaccttgtatcaggtgaaatattgagttgaacactcctttattgattggtcttccaagtggctggtttcctagcggtggtaatccaaagttcttagcaactaacgtttcccgtctccacctgtgtaacacttcagttattactatatctcctgcagagactaaagaacaagcaatttaatagaagtttgtacctttagctatttctgcttgaattattcattttctgcagaaaagcacagatcattgcagtaacattcacatgccttctgaattgccttgaataagaactggttaaatcactgcttcacgtaacaacttcctcatcttcctggacttcgatcaaagattatttactcagtgaaaccttccctggctactatatctaaaattataattccaccttgttccccaaccctggtatattcctttcctgctttatttttttctctttggaacttactagtaaacacaccatatattttatttaccttgtttgctgtcttcattaaccagaatgaagatccttaagggaaagaatttttgttttaaccactcttattcctcagcctgacatctaacaagccctcaaatattagtcaaatgaatgaacaagctcatacggctcagggccagaaaaaataaaaatattcagaaacacagaagtagagtctatagtttaaaataaccctcatttgtgggtcctgcttctccaccctccaaaactgattaacctaatgaactcggaactactctgttacagcttcactttccatgaggacaagaacaatgattccagccctactgccctgcctaccataaagttggacctgtgttaatcactcaattggcaagtaagtattaattaggttacagtccaaactgctataacaaagccatccgccacgcaagtttctttctcacagtactctttcaggtgtagcacagtactctttcaggggtagcacaactgtcatcctcatccctcggcttccatgtccacttcaaggtatctatgctagatcctgccttcatatctgcattccagccactgagaaggggaaaagagcaaggggtgcattcctcttccagatataatgcagaagtggtgcctatcacttctgctaatatcctactggccaagcttagtcacatgaccatacctagctgaaaaaaagctaggaaacgtggtatccagctggacacaggtgttctgcaatgaaagggcaaatgggcattggtaagcttacagcaggttattaaacagacaataaaaggaaaggaccttcttttcatatgaacatcatctctccagccttactagttacacattactagtttgtgcctgcattcttcaccttcactgaattcactaacttggtctaaacaattctaagttaatgaaaaccacatttcacaaaattttatgtaaacaaaaggcaattagggaaagtttactgttaattacacttctgaactaatgttggcaaaactataaagtggacaaaatctaaaaaaccctctagaccctgttgtttcttcttcctgaacttctccccctacatcacccacacacactcttcagcaaaattaatcttttattctgaagcacaaatatggttcatgtatttgttttatcatacgttctctctctcaaaggtattccttgctcccactcccacctgagtgcaatgaaaggcttgccccttatgtacaacagttagggaaggatattatggggtctaaaccagggcactaaaatcacactacaaaatttgtaacaccccagcttctgtaagctgtgtaattaaaagtacactttttggggttattttctcttgtcaagcgtatcaaggaaactatgcccttcctactttctttgggaaaatattaaatgttaacaggttaaagctctaacttgactattaattttgcaggttctacaagcaacaattccaagaatttgataactttggagcaaaagtccaaaagttcaaagagaaaggatatgagtgctttcttagctgaatttccccttcttctcaattatactttagccagctcccacaataccccaccccacatcaaaccacttctcaggcataaagagagctaataaaacattgagctagaagcaattcaactaagaagtaaatattacattatttaaaaggtaaattctaatacttaaaaaattcacttcttgcttcagtactctcattcattcaacaaatattggtatgcttacttataacatatcaagaactgttctagcagtggcaacacaggtctgtcctcacagatcttacattcccatgaggtaagacagtcaataaacagggtaaagaaatatatatgttggatggtgataaacgctatgcagaatgaaaggctttcttaggtacaaagaactcaagaaacactttagaaccaaaccaatttctctgagaaccctttcaaaaagagctagagctccatctataatcagcaaagtatctgtcaaagaaagccaaggatcaatgtacagtgactaccagaacaggttagaagggcacactcataaacctttgctactggtttgggggtttcagttttaacttttctgttaaaattctcagcatttatctcaaatgaaagtattatttaaaatgaaataatgaaggaggtttattagatgggaaggggtaactgattaagacaaagtataaggatcttttcaaaatccatctctaaacatcaataaactgcctcagaaaatctctcactaggaattatacacacacccatttgatataatatggataagtcttcaccaccagtctaaatccctcttcccacctcccatccaacatacgttaacatggagatggttaagcaagctgcccatagctcttctttgaattttccctatagccccattaccctttttttaaacagaaaaactgatttagatagaaagaacaagttttgtttttgcaaagcttatgatagacttacaaactcaatgacaaaaatcagtaatatttaaaatgttaaatgggaagggtgttttaaaaatgcttccttctttcaatcataaatactacagagctctaaataaatcttccttataagcattgctgcagtctactgacaatcttaaaaatgtttataaaacgatagctgcatcaaaactgctgtaatacaaaatagtattagccactgtcccaacccctcatcacctgaactgttttggctacagcaacctgaaaactaattatcttaaacccaagagaagccaacatcctcttagtgctcactgaaccttcttccgctaggacaagtgtgcttttttaaaaaatacacttctaaaacaaccagtgatgttgctacaaaataccttacaaaatgccttttaagtaaaaagacataggaaggaactgattctcagaaattggtaggaatgtccaatcttttggcttccctaggccacagtgaagtataattatcttgggccacacataaaacacactaacactaacgatagctgatgagctaaaaaaaagaaaaaaaactcgcaaaacaatctcataatgctttaagaaaatttaccaatttgtgttgggccgtattcaaagctgtcctggaccacatgcagcccatgtgtgcaggctggacaagcttgaatagagtcttttttatctattaaaaaaaaaaaaaaaaaaaaaaagaacaagtgcttttatctttatcctttagggttaatatgtagtttgggtttttctacatttctggcaagggcacatgatttttcaccattccttttttttttttttttttttttttgagacgcagtatcgcttgttgcccaggctgcagtacaatggcatgatcttggctcagtgcaacctccacctcctgggttcgagcgattctcctgtcttcagcctcccaagtagctgggattacaggcacgcgccaccacacccggctaatttttggatttttagtagagacggggtttcaccatgttggccaggcttctcttgaattcctgaccttaggtgatccacctgcctcagcctcccaaaaagctgggattacaggcctgagccactgtgcctcgctcaccattcctttctaattagaatgagtttgcatgtcttgtatatgtaattcagaggttggtaaaagtgtgcaacacagtgacaatgatgcaaagtcagtctgtgatttaaaattttttcaaaaaagaagacaaaaggaaataaaaaattgtaaattcacaaagtggatcatcaaaggttgatacaccgaggtcaagcaacataagaagtaattattctgaatcaaagaactagtggaaatgtaaaagatagtaacaattttaatatttgagttcttatgttctaagtactgttctaaatactgtatttgtattacacttcaattaatcttccctcaaatccttcctatgaagtagacttttcctttacaggtcaggaaagtgaggcatagagtggttaagcaacttgtctaagctatgaggcccatgactcaaacgcaggcaggccaactccagagccaaaacaaaaaaagacacattaagcaggtttgaggtttattaaagtaaagaattagcaaacaatatgcaaaaacaaagttcttaagagttatggctttcaaaagcacaatatagtaaaacctaatacattttcataagtatcaaaataacagaattgaagcatgttgctagaatttcagcttctacaacataaacagaagcacaacaaatacaaataagcagcagacctacagtgcagccactagcttggtcttcattatctgtatatgaaatatctttttaagaaaatgtgggcaggtagatacaaacattctatttccatgattacaatcctcttcgattttaaaataagtgaatttcaaaatacaacttacgccaaccatatttaaaaaaaaaatcacttgcctaaccattatcttctagagttcctatagttaaaatactttatgaataaatcaatgcaacatcatcttcaatgatattagaagggaaaatctgaccctaaaagattttttttttttttccacaaagaacttgggattctttggccttactggagttttgttatagctaacaccagtctgtattaattaagaaggcactattaatgagggacggaaaaatctacctgtacacaaaattctgtactttaacagcatcttcaaataaacctttaaaggataatggtttacgatcattttaagaattttaagaactgagttatttggacaagaaccatacaaacctttttcactctgccatgaatgatcgaagaatcctgctctaggactggatcttttcagagaaaataacttatcacctgttttactgcagttgctactagcaattattatatagcatgtgctcttcaaaacagaaataaaaattgatgtgtgaaatccctttcattggttttggtaaaccatccaattttgggctgtcatttcaattataatacagttgtattttaagagagaagataatccaatataacaaaggcttgataaatattgtcactctgtaatcaggacatactaaactgtaattcagcgaattccaaagaactttccaggtttctgtccagcaggtagaattctttgtttatgcagaagaaatgccttcaattctcacattcgattcaggcatcttgtgtgataagaaaagctcctaagaatcttacttatatcaatgagaaaaatgctgctgctctgggagacctgagattactccccaaaaagctgccctaataatatctgataccacctataaaccaccacttaggaaaactctctccataaaaatcaccaaacacttctaaaaccaccaggctacctactaccctaagatacttgctcatctagctgaacaatataacgatgacacacatttatattcatacccaagagattaggtgaggatttaactagtaagacaaagaagggatctgacattctttaaagttaaaatgtaagtccaaaatataagtcatcacaaaaggctgaactcagtaattatcaaaaaattcttccttcctcatgaagtaaaaaggatatttatatattttaagtggcaaaggtgataatcatccaaagtactattaagcaattgattagaaaaagtataaagaaatagatctaaattggtacatcagatgttctctatcacagaagtacagcactttgataggtactatcaaactttttagagtttctctgctgttggaagaatttcattttttgtataaacattctcttccaacaaaatactaccacacaggggaaggaactgttccccacaggtaccctcaggtaatatggaaggtttttaacatgaaccccagttctaatcttgacaacagatttcaggtatgagtacttaataatcacttcacatcctgaaggatatcttactctcaaatgttatgaaaggtataaaatagctacatcctctatctgtgccattagatgtggcttgttgaactgtctagtactcttactctggatttcacctcagaaacccaaccaattctattattttttttatatagcaacaatacaatgtgaaaaattattagtcaagctcatgtgctctaagcaaagagaatgagagccaaatgaaaggggaaaccccttataaaactatcggatcttatgagactttattcactactgtgagaacagtatgggggaaactgcccccatgattcagttatctcccactgggtcctttccacaacatgtgggaattatgggagctacaatttaagatgagatttgggtgaggacacagccaaatcatatcagcatttaatattaaaattgctatttgagtctcttaacttcaacagttttgattattattactagatttcattagggtgacttggcagaattctttagaatactaaaattatttcattcctagctaagtactgttattaaaagtaatggcagaagccacaattacttttccaccaaccttaatattaaggatttgcaaagttcaaaggaacttttcaagtttttcatctactctcttcacctgactgtattgacattccaaagatttgtgcttaaaatctgaaaagaattttagtcatgtatttaagcaatctgtactgtatctacatatttaagcaatctgtactgtatctacatggttcttaagaatttagcacaagaagagcacctgtcacacgctgtgcatgggtttttttctttttggtattcagccccagtccagtgttttcatgatactttgctgtagatctattgtatacatcagtttactggttaccctgaaggtatttctgccttcttgtacagtaatgtgacttttgcatatttattttaatctccactccccaatgttcttcactcccctgaccgccctccctccccaacccagttttcctgggccaagactaccataagcagtaaaccagagaacctgataaatccaggaaaataaaagtgaaaaatttctatttcaatttttatctgcagttttaggctaaagatttcagctcagttcatcccagtaatttccaaccttaaaggataatcactatgtgactgccacattaaattatacatgcatgtattgatcaatatctacaatgccttatctgatattcaaacaacttgaaaataaaaaatttttcgttaaaaaaaaaaacctgggccgggtgaggtggctcacacctgtaatcccagcactttgggaggccaaggcaggtggatcacctgagatcaggagttcgagaccagcctagccaacatggtgaaaccctgtctctactaaaaaatacaaaaattagccgggcatggtggtgggtgcctgtaatcccagctactagggaggctgagacaggagaattgtttgaacctgggaggcggaggttgcagttagccaagattgcgccattgcattccagcctgggcaacaagagagaaactctgtctcacaaaaaaaaaaaaaaaaaaaaaaaaaagaaactctgacatgtgacatgatcttacatgaggctatttatgattttgattttgattttttatatatgattcctttattagtatttaagtgacatctctttacattttttagtggtttctccaggaattaccacgttatctttaacataccccaatctacctagagttaatattgtactatttttagaatgtaaaatatgaaaaccttgctgttgaagagttttaattaccttcttttattctttgtgctattcataaattttacatctgcacattatatcttataatacgagttaaaatttttcctttaaatagtcattaagtcttacaaagaaattaagagaaaatggtatttataaatatttgcagtcagattctttggggctatgtaaatacactgtttctcctttatattttacccacaatttttgcattcttcaatatatcttgtctacagtaattattactgtggtgttctagtggtgattttctattttgcatttatcccattaagggagaatgtatctcagatcagaaatatttgttttaattatgagatactgtactgtgttacctttctaagattaaaaaaaattatgaactataactggctctaagggtttcttttaagggaattatatattattttagaattcatgaatctttaaataatgtagctgttgtcttttaatttcatggtgaatactaagactggttttgtgatagttattctctttatgtaacttctacatatctctactgttaaaagctatctttttcttatggtaaaattggtttagagtggttgacagtttaaagagggatttgtgatgatatctgttcattttcatagggttggggagcagaatatcaccggcaggatgtaaccagcaccccatgttggattgagattatcttcatgggcctcttcagtggctggataaagtccttactcagatgggctcccctctgaaccccatatcttctgtttcataatgcagaagtattcttttcaattatattgttagtggacttgttttaattttagagaaactttgagtacagatactgtgagcttacattgaaaacagatattacagcttatttttttctacataattgtgaccaatacatttgtattttgtgatgaatctacatttgtttgtattcatgttcatgtgattaactcttagaagtgttgtaaaagatgcagagtaagtattatgccccagttcagaaatttggcattgatcttaaactggaacatgcttttactttattgccctaacaattttttattaaatttatttgaaaatgcatcacatgatgaaaaattatagtagcttataagagggcatatacagtgaagagtaagttttccctcctactctcgatcttccagaagctgtacttttaccagtttctttgtcccaccaacttaaaaaaaaaaagtacaattcattgttttgcaaaagtgtatggtaggggcttaaaagaaactataaagttttatttgaatgaacactatgcactgctgtaactggtagtgttcagtaaaagcaaaatgatagttttctagatgacataaaatttacatttaatacagataagtgttcttcagtgtaatgtgacttcatgctatatatcttttgtaagacatttccttttttaaaaaaatttttgcaaataactgatctcaagtatatgtcatttactcaaaatctgtcataagcattactttatagctagtgacagtgcatgcacagccttgttcaactatgtttgctgcttttggacaatgttgcaagaactctatttttgacatgcattaatcttttattttgcacttttatgggtgacagtttttagcataacctttgataaaatacactcaagtgacttggacttagatgcttatccttacgtccttggtaccttttttgtattaacaaacactgcaatttatagattacatttgtaggaagttatgcttttttctggtttttgttttactttcaacctaggttataagactgttattctatagctccaacttaaggtgcctttttaattccctacagttttatgggtgttatcagtgctggagaatcatgtagttaatcccattgctcttacaagtgtcagcttacttgtatcagcctccctacgcaaggacctatgcactggagccgtaggaggctcttcagttgggccccaaggataaggctactgatttgatactaaatgaatcagcagtggatgtagggatagctgattttaaaacactcggctgggcacagtggctcacacctgtaa

SEQ ID NO: 6990 - DNA, 4156 bp, Homo sapiens
gaggaggaaagaaaacacaaatgctggggacctgtcacttccagacagtgccagctaccagatttagcccattggctcagcccttttctggtcccaggtctgtcttttctgggcgcttggagaccttcaggccaggcccacgtctgggtacactctttatcctggcatagttcttggacactgagctgaagaaggaagatggtgagacagatggaacctgggcctctgggaatgccacagtgtttggaaaagcccgttgggggcggggggggacgtgtaggtgaatcttttgtgaccctcagcctcctttcttagtggctctgcggacacttggtccaactcctttcttcaatgagcagatcagggaggaaacgaacgcaggatgtcagagccaggaatgctgggcaggaaggatgtgtgggttccgaggtgagaaatgcagatgagatagggttctctctgaggctttcaggagtggcgaaggtatgtggctttggtctaactttgcttctcttgcagagaaaccccgttcaccaaggccatggaagtggaggctgcagaggcccggtccccagcccccggctacaagcgctcgggccgccgctacaagtgcgtgtcctgtaccaagacatttccaaacgcgcccagggcagcgcgccacgctgccacacatgggccggcagactgctctgaagaggtggccgaggtgaagccaaagccagagacagaagctaaggcagaggaagccagtggggagaaggtgtcaggctccgcggccaagcctaggccctatgcgtgtccgctatgccccaaggcctacaagacggcacccgagctgcgcagccacgggcgcagccacacgggggagaagccctttccgtgccccgagtgcggccgccgcttcatgcagcccgtgtgcctgcgcgtgcacctggcctcgcacgctggcgaactgcccttccgctgtgcgcactgcccgaaggcctatggcgcgctctccaagctcaagatccaccagcgtggccacacaggcgagcggccttacgcctgcgccgactgcggcaagagctttgctgacccttcagtgttccgcaagcaccggcgtactcacgctggcctgcggccctacagctgtgagcgttgcggcaaagcctatgcggagctcaaggacctccgcaaccatgagcggtgagggtgccttccggggcagggcgccttccggggcagggcgacagcgttgctgcagccaatggggcctgggtttgagtctcagggtaaagtgagccaatgggaaggtgggcatggcagatccaaggggaggggctaggcatgtgggagaaattggtgcccctgattgggcagaggtggcaaccaccttgaggttgatctctgagaatgggattgggtcagattggcctccgttgtaggccagctggaaagggggcggggtttggagttgggcagttctgagggtcttttgtggagaccaggaggtgtgagtggggcctggtttgtctaggtcatttttttttttctttttctcagcctctacattaatgacatgtttctaggctgggcacaatagctcacgcctataattccagcactttgggaggctgaggcaggaggattgcttgagcccaagagttcaagaccagcctgggcaacacagcaagcctcgtctctataaaaataaaaaaattacccgagcgtggggatgtacacttctagtcccgggtacttgggaggataaggtgggaggatggcctgagcctgggaggtcgaggctgcagtgagctatggtcaggccactgcattccagcctggggaacaggaaaaaaaaggcggaggacacgtatcttggttttctgttttgttttgttttgtttttgtttgtttgttttttgagacggagttttgatcttgttgcccaggctagagtgcaatggcgcgatctcggctcaccgcaacctccgcctcccgggttcaagcgattctcctgcctcagccttccgagtagctgggattacaggcatgcgccaccatgcccggctaattttgtatttttagtagagacggggtttctccgttttggtcacactggtcttgaactcctgacctcaggtgatccgcccgcctcggcctcccaaagtgctgggattacaggcgtgagccaccgcgcctggccatgtcttggtcttttttttttttctttttctttttttttttttttttttgagacggagtctcgctctgccgcccaggctggagtgcagtggcaagatctcggctcactgcaagctccgcctcccgggttcacgccattctcctgcctcagcctcccgagtagctgggactacatgcacccaccaccacgcctggctaattttttatagttttagtagagacggggtttcaccgtgttagccgggatggtctcgatctcctgacctcggcctcccaaagtgctggaattacaggcgtgagccaccgcgcccggcccatatcttggtctttaatgtgcagagacaggtctttggaatagagacacccagccagcctgaaggcttcttcctctggggtgcagccatgtggctcttaggggattaagcctaggcccccacgaacgtttggggagcccctaaagtacagcccagacaggcagtggggtcacgttatgggtctgtcgccttcatgccaagtcctccacacccccgcaggtcccacaccggcgagcgccccttcctctgctccgagtgcgggaagagcttctcccgctcatcctcgctcacgtgccaccagcgcatccacgcggcacagaagccctaccgctgcccggcctgcggcaagggcttcacgcagctcagttcctaccagagccacgagcgcacgcactcgggggagaagcccttcctgtgcccgcgctgcggccgcatgttctccgacccctcgagcttccgtcgccaccagcgcgcccatgaaggggtgaagccataccactgcgagaagtgcggcaaggacttccggcagccggcggacctggccatgcaccggcgtgtgcacacaggcgaccggccgttcaagtgcctgcaatgtgacaagacgttcgtggcgtcctgggacctcaagcggcacgcgctggtgcactctggccagcggcccttccgctgtgaggagtgcgggcgagccttcgccgagcgtgccagcctcacgaagcatagccgggtgcactcgggggagcgccccttccactgtaacgcatgtgggaaatcctttgtggtgtcgtcgagcctgaggaagcacgagcggacccatcgaagcagtgaggccgcgggtgtgccccctgcacaggagctggtggtggggttggcgctgcctgtgggcgtggcaggtgagagttcagccgccccggcagcaggggcggggctgggggaccctccagcagggctgctagggctgcccccggagtcaggtggtgtgatggccacacagtggcaggtggtgggcatgacggtggagcatgtggaatgccaagatgctggtgtccgggaggctcctggtcccttggaaggggcaggcgaggcggggggtgaggaggctgacgagaagcccccccagtttgtgtgccgagagtgcaaggagaccttctccacaatgacgctgctgcgtcggcacgagcgctcacacccggagctccggcccttccctgcacccagtgcggcaagagcttctctgaccgggctgggctgcgcaaacacagccgcactcacagctcagtgcgcccctacacctgcccccattgtcccaagcccttcttgagtgccagcgacttgcgcaagcatgaacgcacccaccctgtgcccatggggacccccacaccctggagcccctggtggctttgctaggaatgcctgaagaggggccggcctgaagcccatgaccccccagcaccacactccgggagcccagcccccatcgggggcttcctgtacctccttttgcctggctctgctctttagactccagatccctacccctcagcaactagctcccctgtcggccagctaagagagctgggacagtggaggctggcagaagctgagacgtgactgtctaggagtaacactcattaaagctttcattttggcaccaggtc

SEQ ID NO: 6991 - DNA, 313 bp, Homo sapiens
gaggaaatagtctttttatttttttttttttgagacggagtcttgctctgtcgcccaggctggagtgcggtggcacgatcttggctcactgcaagctccgcctcccaggttcacaccattctcctgcctcagcctcccgagtagctgggactacaggcgcccgccaccacgcccggctaatttttttgtattttcagtagagacggggtttcactgtgttagccaggatggtctcggtctcctgacctcgtgatccgcccccctcggcctcccaaagtgctgggattacaggcgtgagccaccacgcccagcc

SEQ ID NO: 6992 - DNA, 369 bp, Homo sapiens
agcaaaactctgcctcaaaaaaaaaaaaaaaaattatcacaagcattgataagtccagcagtgaacacatctgtttagctttgtttagcccatacttatttgattatggaaaccttttactgagtagttctacttttatcctttcatagataataaactgcagataaaaattagttatctttcctgtatactaaagtaacaaattagaaaatatacttggtggaaaaaggattcccaattcacaacaaaatccatggaccatgaaggaataaacctcacaagaaatgtgcaaaacctgtatgaaaagaaatgatagctccaacctgaaggatatgaaataagacctaagtaaatggagacatataccat

SEQ ID NO: 6993 - DNA, 1264 bp, Homo sapiens
caaaactaactcctccctaaggggtcattcttcataaattacaaaattttttgtgggatcttggatttttgtaaacatgagccacttccatgcttttggccacaccacctttgtggtcatgcataaaattcctctttcagctgacacttatgctctgcttcatgcttgctatatatttaggatttaggaaagtgataatactcatggcacagtatttctgagttcttgttttaacttggcaaatgttttcactaataattttgttggtaaaatatgatattcctaaagaaaatcattttaatttatcatcacttctgacaaaaaatacttggttgaaaaaatattcattgcatctttatgaacatctcccatataatataccagctataatttaaatgttttccctatgtccagtacttctaaatggtcaatagactatggttggccatttggcaaaactgacttctcaagaggaaacaagcatattttgataaaaataatcttgttactcaaggtcattaagtaattgatgaactatgtacaagtttattatatctctttttatcttgtagctacctgtcagtatcacgttttttttcctaaattgtaatccttcatgcacagaaatgttccatgtggcaacttcaaagacaacctgctgagaaaccaagagaatatttaataatgctcaagagcaatgaggcatgaatgatcaaatgaaggtctttccagttagttattgattattctatcatggcaggtaacttcaaacaccacacacaatcttttgaacattaccttcatctcctaatatttctatcactagaagaaattactttccttgaccttccatagcaggcaaatctgttttgcattatttattgatcttataatataatattcttggagggataaatgagactcatcaagttcaaataaattataattgtagaagtcttaaaggtaacccttatattctcatatacttaatgcagaagaaaactgttagttctcatagatggacttctagaacaccatccaggacttaaaagtttaaattgaaagtgaacttttattttagactttttaacaatatatgtcaaagtgccatttggcaactatcccttaacatccagaaaactaatgaagtgcaggtaggttacaccttagcttactagtccttatggttatctccttttctaaaatgacaaaagaacttgaagaattagctgtggaacaaaaaaaagaaaatatactctgctca

SEQ ID NO: 6994 - DNA, 1717 bp, Homo sapiens
gtagcgtgacagcaaatacgcacaggaaatgccgtggaccctggcaaatgtagtgggtaatttcatgcaagcctggagacacgtcgctctgctggcatgaacctctccatgtgtgttttcacgtcctgcctcaccacctggagcttcccatggaggcacaatcttgaattggggctgaatgaggaggccatgtccccagggatcccctcaatcaatgaaagatggaagcaggtcattgccccagctttccatctgttagaggcaacagtgcttgtggctgtcttgtgcgcttcttggagatcctggtgggatcaagtccccattgctcataccatgaatcaggaaatgtgcccttataatattcctccttctcctcctcctttctctcatcctcgttgccccttcaatcttgtacctaaaatcatctcccaaacaaaccacccaccctcatgttcttcaattagtttcccccacacaaaagaaccccaaaataaccccaaattagacacacttaatgttgctagcttctctctttgctcctgacagtgtaataataaccttttaatttatatagtattggtgcttaaaatgtatccttttccttaaattgttagagcttctatatacctcatccatgtgatagttagaatagtctgagaagtaaagtggttgtttccagggactgtgagattgaggtgttggggagatcttggtcagaggctacaacatttcagtgagacaggaggagaaagtttaagagctccattgtacaacatggtagctgtagttgataacattatattgtattttttcaaaattgctaacagaagattttaagggttgtcactataaagaaatgataaggatgtaaagcaatgcatatgttaattagctcaatttagccattccacaatgcatccatattttaaaatattatatcgcacatcataaataggtataatttgtatttattaattaaaaatagcttttaaaaacagtaatatcacactcatgaattagaaaattctagttcagatttaatacattttaattgttatatacacaacttcttaccctggtgataaatattttccagtagcccatcctcagttattctactaatgctttttgtaccagtcagtgttctgaaaaaaaaaatctccttttttgttagtttctgaataatgagaacattgaaaattggataccccttgcaaataaaaatgtctcttcaaaatgataactgggtagtaaaactgcttttgattgtaatagtcatattgaagaaatgctcatcttttctagctgattaagtcactgtattattgattgttggttttattcattattaagttggtggaatagaactcattggtccttccattatttctttaggaaagttgtacttttagataatggaaagcagtaagtatgtggaattgatgttaaaacacgttcatcgtttatcatgagcaagttcacagtcaagatctttgtccagcaaccaaatataatatatataaaataaagaaaatataagaagacaaactattcaaaacaacttctggagaaaatttccctgccaaagaagggtcacattcaaagtgtgtcacaaaacctaacgtctttcccctatttttcttgttctccctccctctcctgtatgcatcagtgcttccaaagtgctcttcagtcatttattaaagcctctgtccca

SEQ ID NO: 6995 - DNA, 1718 bp, Homo sapiens
gtagcgtgacagcaaatacgcacaggaaatgccgtggaccctggcaaatgtagtgggtaatttcatgcaagcctggagacacgtcgctctgctggcatgaacctctccatgtgtgttttcacgtcctgcctcaacacctggagcttcccatggaggcacaatcttgaattggggctgaatgaggaggccatgtccccagggatcccctcaatcaatgaaagatggaagcaggtcattgccccagctttccatctgttagaggcaacagtgcttgtggctgtcttgtgcgcttcttggagatcctggtgggatcaagtccccattgctcataccatgaatcaggaaatgtgcccttataatattcctccttctcctcctcctttctctcatcctcattgccccttcaatcttgtacctaaaatcatctcccaaacaaaccacccaccctcatgttcttcaattagtttcccccacacaaaagaaccccaaaataaccccaaattagacacacttaatgttgctagcttctctctttgctcctgacagtgtaataataaccttttaatttatatagtattggtgcttaaaatgtatccttttccttaaattgttagagcttctatatacctcatccatgtgatagttagaatagtctgagaagtaaagtggttgtttccagggactgtgagattgaggtgttggggagatcttggtcagaggctacaacatttcagtgagacaggaggagaaagtttaagagctccattgtacaacatggtagctgtagttgataacattatattgtattttttcaaaattgctaacagaagattttaagggttgtcactataaagaaatgataaggatgtaaagcaatgcatatgttaattagctcaatttagccattccacaatgcatccatattttaaaatattatatcgcacatcataaataggtataatttgtatttattaattaaaaatagcttttaaaaacagtaatatcacactcatgaattagaaaattctagttcagatttaatacattttaattgttatatacagaacttcttaccctggtgataaatattttccagtagcccatcctcagttattctactaatgctttttgtaccagtcagtgttctgaaaaaaaaaatctccttttttgttagtttctgaataatgagaacattgaaaattggataccccttgcaaaataaaaatgtctcttcaaaatgataactgggtagtaaaactgcttttgattgtaatagtcatattgaagaaatgctcatcttttctagctgattaagtcactgtattattgattgttggttttattcattattaagttggtggaatagaactcattggtccttccattatttctttaggaaagttgtacttttagataatggaaagcagtaagtatgtggaattgatgttaaaacacgttcatcgtttatcatgagcaagttcacagtcaagatctttgtccagcaaccaaatataatatatataaaataaagaaaatataagaagacaaactattcaaaacaacttctggagaaaatttccctgccaaagaagggtcacattcaaagtgtgtcacaaaacctaacgtctttcccctatttttcttgttctccctccctctcctgtatgcatcagtgcttccaaagtgctcttcagtcatttattaaagcctctgtccca

SEQ ID NO: 6996 - DNA, 1717 bp, Homo sapiens
gtagcgtgacagcaaatacgcacaggaaatgccgtggaccctggcaaatgtagtgggtaatttcatgcaagcctggagacacgtcgctctgctggcatgaacctctccatgtgtgttttcacgtcctgcctcaacacctggagcttcccatggaggcacaatcttgaattggggctgaatgaagaggccatgtccccagggatcccctcaatcaatgaaagatggaagcaggtcattgccccagctttccatgtgttagaggcaacagtgcttgtggctgtcttgtgcgcttcttggagatcctggtgggatcaagtccccattgctcataccatgaatcaggaaatgtgcccttataatattcctccttctcctcctcctttctctcatcctcgttgccccttcaatcttgtacctaaaatcatctcccaaacaaaccacccaccctcatgttcttcaattagtttcccccacacaaaagaaccccaaaataaccccaaattagacacacttaatgttgctagcttctctctttgctcctgacagtgtaataataaccttttaatttatatagtattggtgcttaaaatgtatccttttccttaaattgttagagcttctatatacctcatccatgtgatagttagaatagtctgagaagtaaagtggttgtttccagggactgtgagattgaggtgttggggagatcttggtcagaggctacaacatttcagtgagacaggatgagaaagtttaagagctccattgtacaacatgatagctgtagttgataacattatattgtattttttcaaaattgctaacagaagattttaagggttgtcactataaagaaatgataaggatgtaaagcaatgcatatgttaattagctcaatttagccattccacaatgcatccatattttaaaatattatatcgcacatcataaataggtataatttgtatttattaattaaaaatagcttttaaaaacagtaatatcacactcatgaattagaaaattctagttcagatttaatacattttaattgttatatacacaacttcttaccctggtgataaatattttccagtagcccatcctcagttattctactaatgctttttgtaccagtcagtgttctgaaaaaaaaaatctccttttttgttagtttctgaataatgagaacattgaaaattggataccccttgcaaataaaaatgtctcttcaaaatgataactgggtagtaaaactgcttttgattgtaatagtcatattgaagaaatgctcatcttttctagctgattaagtcactgtattattgattgttggttttattcattattaagttggtggaatagaactcattggtccttccattatttctttaggaaagttgtacttttagataatggaaagcagtaagtatgtggaattgatgttaaaacacgttcatcgtttatcatgagcaagttcacagtcaagatctttgtccagcaaccaaatataatatatataaaataaagaaaatataagaagacaaactattcaaaacaacttctggagaaaatttccctgccaaagaagggtcacattcaaagtgtgtcacaaaacctaacgtctttcccctatttttcttgttctccctccctctcctgtatgcatcagtgcttccaaagtgctcttcagtcatttattaaagcctctgtccca

SEQ ID NO: 6997 - DNA, 98 bp, Homo sapiens
gtagagacggggttttaccatgttggccaggctggtctcgaacacctgacttcaggtgatccacctgccttggcctcccaaagtgctgggattacagg

SEQ ID NO: 6998 - DNA, 98 bp, Homo sapiens; identical to SEQ ID NO: 6997

SEQ ID NO: 6999 - DNA, 98 bp, Homo sapiens; identical to SEQ ID NO: 6997
